United States Patent Application Publication US 2014/0057251 A1 - sequence listing, part 165

SEQ ID NO: 317025 - DNA, 1083 bp, Cannabis indica
gaagctgcatacatgggaaatcttgatctttgtggatcacctcttcataaaaaatgtccggatgaagaagaacataatgctactcagcttagtgatgagcacatagaaaatgaagatgagtttataagcaaaggattttttatcagtgtagcacttggatttttggttggattttggggaatttgtttcactctaatcttcaacaagtctttgagatatgcatctttcaagttattggatgatatagaagattggataaagctaagataatgcaagtgatcatagataaaaggtacaaaatatgctaattttttctttttcaaagtttgttatttgataatattcatatttaattaagaggaaacttatttgtgaagactatgcatttttaattttatttttgcaggggactcacctttttcatttatggagagtgtagcacttgtggacttttcttcatattatgttgagatttttcttagatatttgaagtgtaagaaaatggttaaagggtagtttattggtagttttgttttggtcttttagcttttgttatagtatatgttgtacaaactcattttgagtattgtatactatggatcatgtgatttgctcaaaatattttaatatattatttttcttcatatacaacatcttatatatgttacaaatataataagtcaatagtttttccacaaatataatggtatgttactcaaaagacaatttgaatcaattttatttatataaattttataatgagaaaaattagtgggatgtacataaattaggaagaagagaaactcccattttataacaaatgtcattctcaaccctaacttattttttttttatttattaaaaataaaaaaatacaaatatgttcttcaaaaaataaacaaaataattacattttctaacaataataatttgatcaaactaaaacatttaattgtattttctagttatataaataaaataaattatgattttcatttcagttagtttatagtaaataacataattaaatattattttaattattttatattttaatacatttattctttcatgaattatttt

SEQ ID NO: 317026 - DNA, 1040 bp, Cannabis indica
tatttcaaagatgttaaaaatttactttcatttttttagagcaatttacatttagaaatactccattcttttaaacatatttgattaatatataaagtaaaaattaaaataggaacagttagtcagaagttctcttatttatcatcaacgaaattaaaatattagattttcattcttaaatttataattataggagattatctttttttctccagccagactcgtcagccttttatagacatagtgtggcttggttggagttgtgtcttgctatgtgttgcgattcgatttttgctacttcaattcgtcttgtctctgtgacatagttttgagtgttttaatcttatctctgtgacatggttttgattgttttagtcttgtctctgtgacatagttttgagtgttttagtcttgtttctgtggattttaagtgtattattagtcttgttcttgtgacataattttgtttgttttgtttcgttgttgactcttctttatttttgatagctcgtcatcaaataactgttagcggttgagaataacaagttctctgtggctgaaggagttgttagtagtgcagttatataccttagacaatagttgaatgctcaagatatgaggttgaatgaacatgttacaacaacttgtactgttgtgtcttctgagcgatagatgaaactaaatataagtgttcttaatgttaactgtgatgttgtaaacttttttatccgatttaattttagttttttttgtcaaatgatctagaaattaggcagctaattatttgactcatttttctaattatataatcatggtcgtgtcttcaacggaagagagatctcgattggactgtagtgtattattttagttgattgctattaataaaatcgttgatttattaaatatatgtaaaataaattatataaatatgagaaaaaataataaaaatattaatagggtttttacaaaaatactgaatttttaacataagtttataattttacttctacacgattttttttttacaaaaatactctttt

SEQ ID NO: 317027 - DNA, 1062 bp, Cannabis indica
aacttgagtggaaactgttgctcgatgatttacaagcccctaagtcacaatattagtaaaactgataagtgatatgctaaatcactttttagggacttaaaattaaaactgggagtttccctatcgatggatagtgttgaaaaactttaaataagtcattgatgattgtaaattaaaatagtctaaaactataaccccgaacattcccacattccaaatggctaattatattgccccattatttccaaggtacttacccaaatctaagtgactaaaaaagccatacgccacgttccactattaccatacataaaaatatgaaaaacataaaatttcatctatatcataattaatacacctaaaattcaaatatattaccataatcataaaaacaataataagaagtctatttgtgaaaataaaccctaattatctgctagttcttaaaataaagctaaacaaccattacaattatcccccgttaaaagaatttcatccttgaaatataacttaaacaactttagatattgagacttcatgtcgaactccaattctcaggtggcttcctcgaacttaattatttttgcagagtatcttgaccaaagctatggtcttattccaaaagactttatccttcctatcaaggatccgtactcacttctcttcatatgacaaatctggttagagttccaagttttcatagctcaagacatgtgttggttctgaaatgtattttctaaacataaagatgataagttgatattttttcttctaaatatgatcaatttatgtattaattttattgaattgattcttcaaattattgattagtgtgactataattttttagtctattttaaagactagtcatgcttttggagtcttttgaagagattttagcacattttggtggaaaatagtataagtcgacgagctcaatttgacaaagctaaaaataaatgtgattttttaagaccttagaagcagaactagacttggagctcaacatgaaagttgtagatctcattcttggctttctagaacatcttgaatcgtttaatt

SEQ ID NO: 317028 - DNA, 621 bp, Cannabis indica
aagaactttctcccaatcttccggtttgatgtaatgttgcttaaaccacttatttatgttggtctttcgctcactgtacctctctaccatctcagtatataaagtccatattagtaggtctcgatagggattcccatcaatattaaaataaaacaatatgataaagcaaataagaatttatattaattcttaaaggaatttatataataattagaaccataaattattaaaattactcaccgctattcgattaagcacttgatcttcatattgttggggtgtatcaaaaaaattgtaatgatgacctagacacaaaatggttacttgttgacccataaatcgactataagcgttggcttcagtcctaactactttgcccatactgaggtccacctcgacctttaatggtttaccagcttgcctccttcgttgttcaagtttactgtttgaagcaaggccacgaccctttctaaccgttggttcgactttaattgttcgagaaaaaagttattctttaagacattagaaagtaatcatgtatttatagtaaaaataatgttagagataatgggggccgattttccttcacttgaattggattcttcacagtcttacacacta

SEQ ID NO: 317029 - DNA, 1294 bp, Cannabis indica
aaaaaatagtttaaagagtaaaaaaaagtttcaaagtaattaagcttagaaaaatatcaaatcatcaaaacacaataactaaaatcaaatacagtataaaacatactaatatgtacaaagtaaaacaaaaattaataataatcaaagaataattcaaatttgaaagaaaagacagcaagatacaaaagcaaaacataacaaaaaaatctattgtgagttgagtaggagaatgatttgcaggacaattcaattatttttacatgaattactcaatagaaagtagtctcgatataggaatcttaagcattgagacatgatcttcagttttttatttttaagaagacatgatcttgatctttcacttcttaactccaaaaacattatatatatagatatggttatatatattatagggaagggttattggtacttcgtaatctctatattgataataataaaaagaatgtatatatatagagagagcacatattgtttgtaaaccgcaaaaaatgaaaggtcaatttaaaaataataacaataatattaataaaaattagtaagttatgaaaatgaaaattgtttcaaaaaaaatcatgaaaatgaaaagacacattaaattgtatttatgtatgaagtttgaagtatacaacgtaaacacttaaatgaaaaactgaaataatttaatgacatagaaaaaatttaaattagtagactattattaaattaaaagtaaaagaactaaaaaaataaaaaaaatatatttatatatatagatatacaaatattcgatattatctctataaatattattgttagttgttattattactactacaaattacactattcacgtcggtcaacgctactattcatagcgttgatcgacgtgaatagtgtccaaattattggacccgtctatttaaaaatgccacaaataatatatattttgtgtcttttacctaagtgacggtaaaaggtaaaccgatgaaataaaaaaaatatataaaacaattgcttctatttcgcgtcaatttataaaactcgcttaaggtatttgcgaggtttaaaaattgacgcaaaatgcaaaatatgagaaagagaaactgacgcaacacatttaaaatccttgtaatgaccgctttagtaatttggattagcaaaggcaattagcactaatttttattattttattattatttgtgaatttatttaattatggatcccaatatttagaaataaatattagagttataatttctcaattcaggagattttattaaactctaggggtatt

SEQ ID NO: 317030 - DNA, 700 bp, Cannabis indica
aagcatccttgggccacatctaagcaaattactaggccagtcatatatacaaatggaggtagaggtgaagggataaagatatgttaattttgtcgatccatactaattaattaatattatatggaataatttacgttattggtaaagaacaaattaaaagtttaatcaacaaaaatggagaaactaattacccataaacatatatagacaaatttcacaatcaatgcttaataaaatacctcatattaaaatttaaattcataactaacttttattaaataattcatttgattatataaacttttcattttaccttgtttaataaaaaagatgtgatattaaaagaaaaaattaatatttaatttaatttaaataaatttaattattttgaaaaatgaccaggaacaacaatttcgttcctgataacaaaacagtcgttcctgataatgtgtaaaaactaaatttctagcctaattttttggaacgacttttactttttaggaacaatttatttttgtttcggatattttagcatcaagcacgtcaatatattttgttcctgatatcgattttcaagcacgagttatcaggaatgaccagtcgcaccaaataatcttttggaacaaactatgagattttttggaatgaaaaagttcttcgtgatgatagtttttgttgtagtgactctctctctctctct

SEQ ID NO: 317031 - DNA, 1254 bp, Cannabis indica
aaagatttataaggtatcaagataagcaaatgttaataagtacaaataagaagtgctttaattgaatatctatcaaaacgaatacttaacttgttaataagttaagtcagtagaccagttgaggaggtcccattggagaaacagaaagacgcaattataaactatgtattgtgggatcttatggttttgaccgagtaataatattttgacataccgagttaatatactgtctacccgtgtagacaatttatacaataaatgaggatcaatggaatattagaaatatgttgtgatcataattgataaaagttagattatcttagaacaatcatttccactgacgaagtgtttgtctaaaagtgatgattatatgtccattagttaggtactttaataagtgtggtatgagaaaaatgttggacacttgttcactggagtaacacggatgataaaaggacacgatgaatcaaaacgttccaaggaacttataatattatagagtgagttcaagatatatactcacttcattacactgaattaaagcgtagggatattaaatttcaagtgggagactcagtatctctttgagtatcacctatgaaaggagtgcgtagatttcgaaaaaaaaattgaagattaagccctagatacattgatcctttttagatattggagcggataggccaagtggcataatgattagctttacaacccgtattgtctagggtgcataatgtcttccacatctctatgttgaggaagtatgtgtcagatccaacacgtattttgagttacgatgatattgaacttcagacaacttattttatgaggaagcgacttgaaaaatatagtcaaagatgcaagagttgtatacctaaattatccaagtatatttcgaggacgaaattcttatgaggggatggttgtaatatcgtgataagcctaatggtaaataattagggtttatatctatattatgggttaatcaagtaataagtgagattatgatcctactaatctagttcaacataaattttaaatttggtataagtgagtaattaagcgtaatttataaattatagagatttatatagcatgtgtgaatgtaatatgagctatatgtagaataaaaatattttcaaatttagcgaccttagaaactcgatcgaggacaaaaaatatcataacgggtttaattgatataattggtggaaatattgttgtaacaccctaactaccataggcgtattacgt

SEQ ID NO: 317032 - DNA, 1656 bp, Cannabis indica
atgtagtagagtttgccaaacttcttagcaatcccagtcctcaatgtctgagaagacccctgaatagaacaacaatcagatgtgaatattaatttggtagaacaatgctgtaacaatgaacttactgataacaagttaaaccgaaattggggaacatataagacattagtgagagtgatttctgaattgataataaccgtgccaacctttgctattttaactgaagtgccatcgggaagggtgacacagttagcatgtggttttgattggaaagagttaaaacatctataatcaaaacaaacatggtgggttgccccactatcgataatccagaaattgtatggaaagtctgatttgttaccagaaaagttggttgaagcaggagtgttgttcgaagttgatggagtagactgaatttgttgtgccagcattgagattaattgttggcattggtcattggtaagttgagaggggtgtaaatcagtagaggattctgagacttgagaagcatgtggcagagtcttgttgttgtctggtttttttgttgaagattcctggggttttctattgccatatcctgggggaaaaccatgcaagaaatagcatttgtccttgaaatgcccaggtttatggcaatgggtacacatgggtcgcattttcttgttcttggaagcaagattcgcagcaggatcgggatcaatttttggagaatgagtgctggttttttgtgttgtggcagcagcaactggtaaatttggtcgattaccaaggcttctttggcgttcttgatgaacgatcatggaaaaaaccttattcaagggaggccaaggatcatagagtaaaatctgagctctaacagaatggaaagattcatttaaaccagttaggaattgaagaacctgatcgtgattaatttgagcttgtctttgagttgctgcagcataggtacaagggattctggggcggagttgattgatttcgtcccaaattgcagtcagcttagtgaagtaagtactgaccgagtcttctccttgatgcaggtatatcaaagattcgttgagttcgaatatccgaggtccgtttccttgattgaagcgattattgagttctgtccacatggctgcagctgtttcaagatacattatgctgctcttgatttctggtgaaacagaatgtaatatccatgacataaccatctggttacatcgaagccaagaactaagaagaggatcttcaggaggtggttgcggaagcgttccatcaagaaaaggagttttgtttcgagctcctatggagagtttgaagtctcgtttccagggatggaaattgcgatccgtgaggacaggggtggcaagagccaagccaggatgatctgcggagctgatgtaatacggactgcgtacatcttcataggctgggcgatcttgagtagtggatcgatttgctggtgcgtgtgatcgattgacaccagctgaggtttgagatggtggaggagcaataggatcatgggcatcgaccgtggggatatcgccatcggtggtagcagaggacgttgctcgtgtgcgcaccattgttgaattcgtttatgtctgtaagagttcttgatggttgttcagggttgcatctgataccatattagagaagatacagagcgag

SEQ ID NO: 317033 - DNA, 872 bp, Cannabis indica
aaaccgtatgcaccgccaaacttacttagctagaagagcttggtactaacaaaatatcttaaatgactatgatatacattctcatgtaaaaaaaattaagattataactataatttcaaaaacacaaagagggtgacattatgaaatatacataaatcttttagaacaataataaaaaatgagaaaaaaaaaagtatgtgatacagtttgaactgtaattattaaatttaaaagctttaaattgcaacgtattgtacagtttggcaaaaaaaatgcaatccacaattacaccattaaaacatttcaaatcacattttgtatgtagtacgtaaagttgtaaagtgcgagcaatttgtacaatgtggacagtttaataaacattgttcgtgtttgatatcaaagtttaacttgatggattttatttgagtgaatacgaaattagaggaatcacaaattcaattatttaaaaaatttgtccacaaataaatttaaaagtgggaaccaactaatcatatatcttccacttaaattataccaaatataaatttagtattacatttgtcattcctaaaaacccaaaataaaaataaaaataacacattgttttggttttacatagagaatgaaacaacaaaaatgattattttagctgaaactaatgttaaatttaaatatgtgtaattggatttcaagaagaagagaaatttacttgttacttctttaaaatttgaaggatctctttttagaaataaataaaataagaatttaattatggctcattattttaggaaaatttgattttttattgtcttactatttgtttaaatttttttttctaaacaataataactaatatttgttggatatgacaa

SEQ ID NO: 317034 - DNA, 2412 bp, Cannabis indica
tttttttttaaaaaaattgatttaaatataccaataaaaaaattacacttggataatgacttaatatttaatggtcaggtagctacagagttctaaaaatataacttatgtattagtacggtaaaaatttaatttatgtatttatttataactgagaagtatttatatcccaaattactcaaattataacaatacaacaattaaaaaattaattaaaagataatatttattattctttctaattaatatttaaaaaatgtacattaagattttattaaatttatataaactagattgatgttacgtgtaatacatatctaattaatttttttttcattagattcaattaggtaatgttaaatgcaatacatgtttaattttttttttaattaggcaacgtatttcaacgttgtgtgtctgattgaagaaaattgtctcttattttaattcaaagttaaactaataaattaaaaaaaaaaaagtacatttttcttatagtgtgtgtggtgaaaaactggttcatctcaaagaacaagtataagttggatgagctggtttgggtttgttgggaaagcatgaaataacaagtttataaatgagaactaaaacaaatactctcactctctcttaaagatggtaacttggtcacagatggtcaaagaagtattccacaaatcttttataaacaaataaacagtatcatcaatcattccgaaaacataaaaactttacatgtggagatcactaacacaaaaactgaatcattacataaccatttttaatcaacttcacctcttctcttaatggaaaccagactcttgacatagaaacattcaaaaaaagcagctatgtttctaactaaaacataaaaaatcatggaaattcctctaggaaagttgcaagacacaaactgtgtttgagtcccataatctctccagaatttgattaaaaagtcatcattcttggaaaatggtaaaacacgaaaatgacagtctaatgttggaagctgaacatttttggtaccatccatggtggagatgcaaaggttgttgtcagtgtctctccaacacaaaacaagtgaatcattccacactgataggtgaggcctatcatcagacattaaaagttcaccaactggcaaatcccttatgaggtcaaattcctcattactcatattaaatgtcaggacattttcatatgtatcatcaaacacaacaaaccagtaacaaacaccattccaacataaaccatcttgtaatttagcacccataataccaactattacatcttgagacatgttgatctctctccaagaatcagaaccaactgtgtatacctcaaatgcatagtcttcatcgtcgaaccagatggtgacacatttgtaatcattggttttagaatcaaattcaaatcctatgttggtataaggacctttaattgtagtgttccttggttgtggtagaatcatggattctttcaaacaaggattgcataacatcattctcccaagaggatttacttgcaaaatgagtccatcgcagtgataaaaccgattccattgattctcatcattgcacctttcatcatgaataagaggtaaactaatagatcctgggacaggtacaactgaatagaacaacttaacatcatcatcatcatcatcatatattatagtcaataacgggtatttgattaagtgatcatcgacatggatgaaaggccttttgaaaagtaaggatgcagaggactggtttttggtaatgaagaggtgcttggaaacaaatttcgggtctttgattaaacccgagatcagcgaataacaaaacttgttcacaaatttaaactgaagcacagaatcaggaggtaccaataacataattctccccaatatgtttctgggcaaattacaaaaacttgccatgatctgcattaaccataaatagactttcttatattaaaactgtcctaaaatcacaccaaggattaaacaaggcttactcttgaaagaaaaagactaataaggaatttagtcaaacaggtggtaatagaaatctacataatgattaatgaagcttcaagattatttagtatgtattattaacagaataaacaaatcaaattaagaaaatgcatggcattttactttctttttgaacaataatcttgaaatgaaacttttcagaataataagaattaaagagaaaatggaggagaaaatgcaaaccaatgaggttgtaatcgaagcagagagaagataaactagtgaacaagagtttcctttgaagttgaaaagcagagaagaaatcttggagatgagaaatggcttttctttctcagaaaaactcaaaagaaaaaagattttcaaactaattgtttatatacaaatataattaatattatataaatatgcag

SEQ ID NO: 317035 - DNA, 592 bp, Cannabis indica
gccattattttaagttacaaattaactataaattttatttttactattattattttcaaaatggctgcccagaaatgcttcttccactagtaattcattcataaacacaagatgatctctttttaaatcaataccaaataataatagggatggagaattatattcttaacttaccaatcaatataaatgatttttattctccatcttgtttaagtaatatatcttatcctttttactgaaaataattttacatgtgcaggcaacattcctattttaagtgttttttttcttcttatatattgttaaataatttttaaaattatattaatactttatttaaataaattagtctattcttttattatcaaatttcttactatatatatattatttttttaatttttttctttaactttatagtttgaattttgaattgctccgtagttgcttcagtaatttttatgtggattgctatgtagattttgattgtgatttacgttattctattaattgctatgtaagttgttaattatgaattttcttaaaaatagaaaaaaaaattactttaaaatataaaaatgtaaaaaaaaaa

SEQ ID NO: 317036 - DNA, 706 bp, Cannabis indica
actctttgaacactgtttttgacatattaatttttttgaatttctcaaaattttaccaaatatcttaaataattataatgcatacgaccatataaaaaaattaactaagtatttttctatataccgaaatagatcaaagtgcaacgattttaaggggtatattaattgtagaattttccaaaacaacattactttaaaaaatttacacaagatgtatgtaagtactcatacattcaaattaataagagacatcaagtacatttcaaattattccattagcaatgtgtatcaaaaattatttccttcttctcatgaaagattctgttatgctgagttgtggaaccggttggcaattccggaacaccgtcttattatttggctatgtacaccggctaaaaacgaaggattgggcttgctaattttggtatggacattgagaggagttgtgggatttgaagactggaaaatgaggatcacaaccaccttttctttaattgtgtgttcttactaaatcattttaaattgtggttgcatatccaaacttcttttgttactcctgagggtcttttaagatcaatcaagaggtgtagattgaatttcatcttaaaattgttgccgggcttgtatataatatatatatatatatatatatatatatatatgggtgactattcaatggttacaattttattgtaaccatatcgtt

SEQ ID NO: 317037 - DNA, 951 bp, Cannabis indica
agcagtattatctcaactagtgaggggagcatgggcctataaaaccgagctttcaataaataaattctctaacttattaatttcgtcttgtgccactatagatttagaattgaatagtaatctcaattctatagaataatctatatgtactacgatataaatacgttatgattatccattgttataatcctaatagtcaaggattattacatttttttttaaatcgattcttaattattatatgttttggaaagaaacaaaaaaaatcactgactattcaaaaaaaaaacaaccgcttatcatatttttttatatgaaatatcattttattatataataaataaatatataatttaataattagtatttcaaaaatctttttaattacttttagtgacattttttcaaatgagagtactaaaagataatataatatttttactcacactggtatatctcacttttgtcaaaaatgttactaaaccaataaataatgtcattaaaactaagtaacacactaacattttcaaatgttattaaatccattttttggtgtatatatgaagagtattgttttatatatatggtgaaattttatggtgcaccgttaaaagaagatatactgacgcaccatttttataattttgacattaaatatttttaattttatttattttgtatgacaatgtataatgtagttatttaaatttttttattgatttttaaaaaattaaaaataaataactcacgaaaaataagagtcaaacagacgcacaacatttttattttataggcttgtgaaataaattatttaaactcaattttttatattataaattattttaaatatttcaaaacttttcataaaatatcttaaataactgcaatatacattattattattagtattagaaatttttacatgaaaaatctattttgcacaatttatta

SEQ ID NO: 317038 - DNA, 1022 bp, Cannabis indica
ttaaatttaaggacttttgtctaattcattcattttactgtttcagtgatttgtttatcgtaactaaaccactgcctccccagactttgatatctaatcaaatcatgcccctacaaattttgatatgtactaaattatgccctttgaactttcatccatattagtaatttttttatttaaattagacaagtaccttaaaattaacaatctcaatagtgcaaaaggaaattttaacggccaaaaaagttcaggggtcacgatttagtacatgtcaaagttcagagggaaaaattactaaaaataaataaataaaatacatttgagccctccatgtgtcgatatttatgagttaacggaagtggtagcaatgggtgtcagagaattgtaacattgggtattttcgcctccaaaaataaagataaagtatttaagtgtataaaatctgaaacattaaatatttatacggcaatttaccctaaataaaaagtagcgtttttttcacttttacatttaaagagtttttattatgtttttctatttataaggatatacacatatcaagaacaatctatatcgcaacttatatttacatcgcaacttaggaaacaattactaaagtaacctaaactattaaaataaaaaaaaaatagaaaaaaaaagaaaaaataatataggaagtcattccaaaaaaaaataaatcaccttttctatttgtttatagatgctttgcctagatttggaaatgtgtcaaagaaaaccgtgtaaatctatttgctaatacagtttgataaaaagaaaagtttcttttagttttaatcttcttttttctttttccttactattttgaattttgatcttatctattaacacaatgtgacgctattcgtacgaaattgtttcgagggctgatgaggccatctactacaatgcacctgttatggctcactttctgtttttaggaattttacaggttaattttttgattaagaaatttttatatttatattttttatttaattttt

SEQ ID NO: 317039 - DNA, 1438 bp, Cannabis indica
tttttttcaaaggttctttttttggaccaatggagaagttttaaggtaacttctttgaatggttttaagtccaatgagtgcgattgatttaagcttgtagtttaaagataatcacaaattagattattgatctactctttgactttgtttcattagttgagaatttaatttattaattataaatttaattatgtgtatttttatataaaacaaggtgtccaacacatataatataatgttgttggtgcaacacattttacacaatctaattttaattttaaattacactaatcatattatgttgtattaagttgtcccttagtaatatttcaatcttataaattaatataagtatcattttataatttaaacaataaaatctacttttctttttaacacaattataacacataaaaattgtaaaattaagctatcaaaactataaatatgaacatagaaactacaacatataatctaaaaattagagaaaacaatcaaaacatatattacaaaaaattgatatttttagtgataatattttagtcacaatataattttttgtgactaagtgtgacttttagtcacaacaaaaaatagtactagtgactaaaatataatatttaaatataaattgttattaatttagttttaatcacaataaataatgtaactaaaaatatagtgagacaacaacaagtttaatagaaaaaaattaaaaaggtgtcaaaaatattctaatttgtgaaaaaagtgtgcaaataaaatttgttttgacacataaaatattctaatttgttttggtattttagaaagatgtaactattcctaagagggaaaaaagtgtgcaaataaaatttcttttaatttataataagtattaatgaatgatcttatctcttttaagtctatttcctagtaagttagtaagattgttttgtgtgccacttgctaggcaattttcgtctaaaccttttcttagacaatattgtcaatttgccaaacaaagtaagatcttaatatcattatcattttatcataatttttcaaaacgtcaaatgcgatcctcatgttgaaatgtataaaaatccatttaactaatctacaataataataataataataatcgatttaattaatcattgttttttatactggcatctctatcatccaaaacctacttagtggtccatttcgaaaagaaaaaaacccacttagtggcaattcataaatatttaatctttttttttttttttggaaaattaaagcgtttagtaagtaagaaaattagaccttgtgagttgattacataagaaatataattattaatattccaaatggaatgttggtattcataaatatttaatctttgttgttggtattttagtacaaagttaatgacttgtttggtattctttttgttttttagtttttaaagttt

SEQ ID NO: 317040 - DNA, 1251 bp, Cannabis indica
ttgcataaaacttactagtaatctaaatggaggatttgatatgtagaacacaattcatgacattaattattgtttatcatgtttctaattataataacataagttgtgtttgggttttcgaaaaaaatacatgtttcgattataatttgtatatacatgtttctattataatttgtattcaatttattttctaaatttctacctctctttacctcatggtgagatgaggaaaacatttaaatcaagtagggacacatggcactatacaaaagttacatgtggccatgtaaatgtgtcatatatattttttagagtattgttattggataccagtagtaattaccatctctagacatgttaccttgcgatcggctagaccaacaatattaatttgtaatgtaatactgatatcttttaacatttcgatgtcctttatgatacaagcattcatatggggtgggggtgtaataaagttggtttattatacctatcatttgtgatctcatgataattaatgcaattaactaattattaaaatgtgatttttaaagactataattttggtatgatggccctaaagactacattattatatatactcattattctcctagggctaaaattcatcaattaatattgaagatatacaaaatagattgatattaaggaataacaatattaattaattatctttacaaacaatagattgatatcaatgatatgctagctaataagctaattaatactaattaatatacatataaataaattaaatagaaaataataactttataaggaaacatacaacttttttgccctagctgtgtagagagaaacgaaaaagttttcttgcataataaaatgtaatcaaattgtttccaaaaataaataataatatttttttgctgaaaaaataaataataattaatatttaaaaattaagtacaatgaaatgtaatcagattgtttccgaaaaaaatgccactaatttcttcccctttattttttttttttttttttaaagtttaggattaagaagtttgaggaccaaggtaacatattatatattaattcattaactcgcttggtacgccatattgtattgtattatattaaattttgattatatatatatttcatatttttatataaaactatgttaaaaatttaaatttatactaaaaataattatatatttatgtatccatacaagtcaatattacatataattttacataaaaatattatata

SEQ ID NO: 317041 - DNA, 749 bp, Cannabis indica
tatttaaaattaaatttaaataaaatattttagcataagaataaattgcattaatttcatcaaaatattatttaaaatttaattaactttttattattacactaataaatatgtaatattttagcatttaacaccagactcgaacttggccctcgaccctgaaccccaaattcgacccctgacccgatccccgaatcttgatccggaccttggagcccaaacccaaacccacacccacacccgcacctgaactcaaatttggaacccaaacccaaacctagaccttggcccttgacttggaccctaacccaaaccctatattctagcactagacccagatcctagacctggattcataccccgaacttagacctgggacccgaccctataatcggaccccgacctagacccggactctagacccaccttaaactcaaactagagacctaaccccatacttggacgccgaccttgctaccagccctggattcaacctcgtatctgacctcggaacccaaacttggatctggaccttggatcccatacccggactagcacttgaacctgaactcagatttggaccccaacccttaaccagggtccgagtctagggtcggggtttggggatgggatctaggtccgaggttagggttgaggtcatgtttatggtaaatatagtatgatttaaacaactcgttaattgaagttaataccgaacataatattgtattaaataatactaatataat

SEQ ID NO: 317042 - DNA, 1926 bp, Cannabis indica
aaaaaatatgaaaattcacagataacatgcatatcacacatataattcaataaaatctcagaaattgtgaaataataatcataacacatattttcatgaaaatatggtctataaagaataaaacatttaaataatcaagtagtcatattaattagtgctaagtgtcccactaatcccatgtctaagtataacggtcattacacccatgccagttccattcggacggctcaaagttgaatcctggcttcatcagcatccttcttggccaagtccacttccgcctaggaatggaaaatggggcgggcttgccccgacccgctactgacccgccctgccccgccccgctccgattacctcagaagtttaatcgggtctgacccgacccgacccaacagggtcgtatttgacccgacaatttttttttaacactcaacaatactatcacctcaaactattagccccacttctaatcgaatatattattattatttttaaaaaaataataataaagaatcctatttgaaaatctccatattgaactatgactttgagtattctactaccctgactgcgagttgtatataattaaatgtggtgagtgagctatagtggctccttctcaatttttatcactcgtttgaaaattatcaatcattattctatggtctgtagtggctcctcttttattttttctttatctttcagccatatataaaatagaaaataacattattataaacttacctttatcagtaattatagcagaaaatatatatgtttcagttcaaattctttaaatttactcttctctttcaccagaatttagcatttcgattggagaagcttatgtgtgttaattgtaaaaactaagcaaattaatatatataataacaattatgccataataagcttaatatcttaaccagacacaatcggaagtattatttatttgtaataatctttcatttttacaaaagcttcgatgaaatttctaatcgactttaaaatatatctttttcttttttggtactttcctctattgttgatttgccatacaaaagatattgatacccttcgaaagtgcagctgtagagagtgtattatcgaatcgggtcagccccgacccaaaaaaaattttaccggggcggggcggggcgaagacccgattagatatccgattgtcccgggacgggactgccccatcaggttggggccccaacccgatccgcaaaaaaaccccaattttccattcctacttccgcccgcatatagtgttggaaatgcagcgttcttagaggcagccatcttagctcgggaataagcataagccatcttcagaccggtctgcacagagaaataacattaaaatctgaactaagtgaagaaggacaagaggaacctgtcaggaaagacttaccctcgtaaactccttaatgactcctcccatcactaactccagcgaaaggtcgttatcagccccagccagctgctcattcacctcagggaccgaccgagtcatgtagtgagtgagcatatccttgcctcttttagtctctggatgcagcaccggaggtggggcaggggccctggtctgctcagatccgcttctaaccagctcagatctgcccttcgattgctctagtttgtccgagctccctcctcgggagtctttagacttagtcgcttttagggcaaaagggtctacgacggtttgttcctccaagagatcaataactacctcagccgatgctttctcttaggacggggttgtctcaccgcccttagatttcttagccggaggagataggcccgagcttcctcccactctcttcttcaaggcttcaagcatttcctgagacatatctgtacgaaatgaaagtaagatggttatgaaaaagcatgagaaatatgaaagcataataatta

SEQ ID NO: 317043 - DNA, 932 bp, Cannabis indica
taccaaggtattggaatggggaacctttaagaaaagactaccaatagaagtaccaggttggatgacaatatgaagtactaaacaaaagaacatttactcttaagtgaatggccttctgggcggaccacacccaaaggttcggataaaattttcaaagtactcaggtcggatgaccaacatctaaagtacaatttttaatttccgcaatttgttttatttcatgttaagctaaaaattagattagatcaaattaatagctttgatgtaagttactacggtaacaaacacattttcgatcaataaatgaataaagatgtttatttcaaaattcaaattgagtcgaatttagtagcatgatgttaagttaccatccgatgcgtacaaaaggtttggtcaaacccaaaacccagaacaaacaaaagagtatacttgcaaaaaattataagtgaccaagagtcataagtctgctcagtcacttggggggaacctatacctgtacaaagtatttttggtaaaaataaaacaaacacagttgcatgatgattataaacacagaatgaaattcattaaagataacaaagcatgtaaaaccgagattaaaggctgctcggtcagcccgtcgtctgaaaaatggaaaaaaaattcaatgtttgaagaccgcttggccggttactttgtcttaaaaaagggcttacggctagacagatattaaaaaaaaagatagacataaggagtattcaaatgactggagtcccaggctctttgtacgggtgttcttggccggttggagttggaggatcagttttttgagcaggggacatgtcaacatccagaccggaggtataaaaggtcgccttggattctccgtaagccatctgagaagcacaatactcgagaaacatgtctttggaatcgcccaagtaatcaaagtt

SEQ ID NO: 317044 - DNA, 682 bp, Cannabis indica
ttaatctaaaattaatactaaaaataacctaacaatcagtattgttattagacatatgtcgtgtgcaacaacttatgatgtattacgggatattttttaaaaattattttcttaagttatatgaaactcgatctttaattatactaatagcaatataacactaaaaaaatgtgttaagtttaacatttctcttccttataaggatggaatcatctcaaacccaaataaacgaaattataaatcgagaaacattttttaaaaaaaaagttcattttagcgtcatattattcacacatgtaggaaatttacagatttaacctacacaactcacacacacacaagttattacgcaaggtcaattttgaccttttttatttgaatttggttcacacacaaatgacacgtattctttaactttgtttctcttataattgactttactaatcttttctttttgtctgaacagagcttcgaaggacaagcagaaaattagggcaaaatcaatacaagagtgaagaagaaaagaattaaagagggaaaccagttctgatcatgaactggtttcagaaacacatgtgcagcaacaaacaataagaaagtaaagagattagggtgagagagcgattgcaaacacaaagatttttacaaggttcacccctgaaattggggctacgtccttggt

SEQ ID NO: 317045 - DNA, 673 bp, Cannabis indica
gggcgtggccccgtggactaggagtgttcgggagaacactgatactacgtacaaatctcttgtgtcaagttacttaaatttctacaattatttttatattctgtctattttgttttgttgctgcaaaactggtttctgccgtaacataattacattctgcttctgcaggcgtatacatttttatattttcatatatattattgacatttgcaaaaactcgatttttcacatttagttataatattgtaaggaatgatgagaaaagaagagaggtcaaacctaacacttataaatattagtaaattgtaataagtgtcatttttctctaatttgtaatttgaggacattatctttgtaatactcatttagggatatttattataacttctcactataaaataagaagcctaaaagcttagtcgaaatccttcttcaaaacaactacttacaaaattcataaaatgaccactgataattctcaaggttgttcactaggtgtaggtccacgtcctcgtttaccacgtaccctgtggcacatctctaccacggcctctactgggtggagaaactactctggctccagcttgtctttgcttaatgattctaattatccttattggaaagttagaatgagggctttcattaaatctcaagatgagaaagcttggaggat

SEQ ID NO: 317046 - DNA, 739 bp, Cannabis indica
aaacagttcaagattcagcgagaatttaataaggagggttttaataacttgcaatcaatggttgcaaaaaccaacagaagcttgatgattcgcaaaccagagtgcactagaagcctttaactgagtcactgttagccaaggagagagaggctcgggatcagcttatttctgcacagaaaaattatgcctccttgctttagcaaaaagcaaaatctgcttggattcaagatggagattgtaatactacattcttccattctagcattaagcagagattaaggcaaaacaagatcatttctatagaacagaaggatgggagtagaactcatgacccaaatcaaattactgtagctttccttgaattttacaaggagctgctaggttccaaaatggagaacaaaaggaaggttcattctggggtgcttgctaaaggtcctagtttatctcttgagcagaggaacattctacttcaggattttagtaaagaggaagtgaataaggttgttgtctttagtattcctgaaaataaatctcctggaccagatggattctcgagctatttctatcaagataactgggattacataggagaagatgtttctaatgctctattgtcattcctgcagtcaggtaacattctaaaagagattaattctacaataattaccttgattcccaagataaaatgcccaaatacagttaaggattttaggccaatttcttgttgcaatgttattta

SEQ ID NO: 317047 - DNA, 2921 bp, Cannabis indica
agacaaaatttgggaagtttcccctttttctttcgcaagaaccgcgacatttgatagagagttgcgactctctcatttttctgattttttgttgtgatgactgatagtatttagattataactctcttgatataactcaaaattggacaattcaagttgttttggaaagctgaaagagagatatagagcttttattcaaaaagtttttcctaaaagtgaatggatcatagtcaaacattcgctttaagctttagactttatttttgatcacaaacgaaacgtgttgaacatttaaaaatttagaatttttcacccattgtatcttacaactccaaaattcatgctaaattcataaaattcatattatttagcatattttctctcattttaacccacatgatatatttgaccattaaaacttgaaacaaaaagaaaacaaatgtaaacctgaaccaaaacaaatgaaaactactaaaacacatactaaaatagactgtaaaaatgtataaaaataaacctaacaaatttctttaaacttaacatttacttgccctcgagtgaagaccaagttaaactaacgaacaaaaaaaaaacaaacaaacaatgaacacacaaagtaagccaccattgccatatactacatccccttcctctgaaatcttaattgcaatttttaactaaattttcagctcaactgcctcaaagttaaacattaaagctcaattagagaaataaataataaatgaccccaatattttgactccaccatacatgttcatttcatagcaaacaattccacaaaccaatttttcaatatgcttacattatttaaccttctccactaatgtcaacaacaaatgttttgaagtcaaaaggactttaacaagttataacgtcatgataaaggttgataaaaatgtcatttatgctcaaccataccataagctttttacattttaaaaacttcaatttcatttcaaaattatccccaatccccacttaataatgcaatacaagagagagaatttttatttctttttactttgctttgtaatccatatgaagaattattttctatatttttttttgtttcttttgtttcttcttaattttttcttttaggtaattaaagaaaataattgcaacatattaaaacaaaaattctctctcattctttttttttttttgacgcggtgaacaaagtcacacatgattaaacaatgcagcaaaccacaattggccatggaacctcctcgaaccaggatagctcatcgtaatttctttttaagcctcctcaaaatacaatatccaattgtaatttcttccaaacttatatgaaactcatggtatagtcaggacaaagaaaagtaatacatgagtcaatttctctttactttttttagctcaaaaagtgtgtaacaaaaagaacaatcaatttaatgttcaaaaggggtaagctaagaataatcacaaaatatgttagtttgaaagatacaaacgttccaaaaaaattgcctaaattatttttcaaagcataagtcatcaatgatttcgcttcaaaggccaaacaatgcaagttctatcaaattcaaactatcataccaccaaccctaatcaagtatatataataaaatctaacatattttatttacgaaacatattaaaactttcccacacaaaacctttcaattaaactctaacactattaaagcacacagttattagcgatttctttttcataagtaaagcaatttaatatagacaaaaacaatgacttaacaacttaaaaacaaacattaacacaaacaacaaaacaacacaaaaaaaaataactaaaaattataagtccatcccccatactaaaaattcacattgttcccagtgtgacaacaagaacaaagagagagaacttacctcaagccacataagtacggcagtggatggtatgacggtaagatctttcaatatgttaaaccctcaaagtagtgtcgccgctctaccttctttctcaattgttttttttaaacgtatttcacaattcaagagattcaattacaaagaaataacttcaaaaattaaaactaaagtaaaaataaatattaaggaatccaacaatcaaaaataaattcaaactgaaaataacattaggttgtctcccaaaagcgcttactttaacgtctttagctagacactcaatgccatatagtgtcataagaagaagctcgtcttgtaccattggaaactttaaaattatccctaatatcatcaatgccttcaagttttccacagaacaatgacttcatatgacgccgaaaaaaatgagatcgtttcttggtcttcttctttctcctttttaatcttagaccatcatccactacttaaattctacaacaagtgggaatatcagttgttgcaaaaacattaaatgttacatcttctttttgcacctacaacttcaattcttccttttgtacatcaatcatcgctctccctgtggctaagaatggcctccctagtataattaggatatttgcatcttccttcatgtcaagaataatgaaatcaacaagaaatatgaatttaccaacctttactagaacctcctcaatcactcccctaggatgcttaacagagcaatccgccatttgtaaggagatagttgtagcgcaagcttcttccactttcagctttcgaaaaactaatagaggaattaaatttatactagcccccaataacacaaggcctttgttttagctaagcctcatatagagcatggaatattaaaactacccagatctttgagctttggatgtaatttttttttgcaagatagcattgcattccttagtaagtgctatagtctcatattcctccaatctccttttctttgataagatttccttcataaacttcacataact

SEQ ID NO: 317048 - DNA, 1110 bp, Cannabis indica
tttatgttgtgactaaaagttgttattaaaatagcagtttttgtagtgaacagaaaataaatataattaaaggctcataattctcgctcaccagccataactaactccaactatcctaacagaatttctgttatgacaacataaatttctctactctaattacaacagtaataaacaattataaaaggaggtgtcctcactaattgtccagcatagcaaaaacatcaaaagtgtgagacctagatttgtgagaggagctcctatgttgagctcgtggagttcatgtaaaagaaaaacaagaaaaattaatagagagagagaatatcaaaaaaaaaaaaaaagagaggaaagaaactatgaaataccagttaagattgtggcttgaatttcatacctgatgtaaaattcttcaaagtaagtgcagatctgatatcgttcttcaagacgagctcaaagagaatgtacccctagatttaaggcgaacctctataatttttgtgtttattttctctatctcttttattttgatgcatgctcttatgtttgtatggctttgatctaatttctggggttgggttctggtgatatcgatatggtttgatcgagaagggggatttggttcctagggttctttcgagaggaagaaagggagaaagagatttggttcaaatctcgaaggttctttgattgaatctgagctagggttagctcacttgggatttattgtttgctctggtcaacgacaaatcgtttaagttcaaacgatttgtcgtgtgaagataaactacttgtagttttacattgttttaatcaaattgattttaattgtcttcatcaaatttaaccatgtcgctttgcaaggatattaaattggtgtaggatattattggaattaaagaaatcctacacaacttaaaaacataatgaccatcttaatattaattagttttattttttcactagataaattaagtttgtgtataatttataatattactcattattactagtggtgtccaattatacgctacgtttcttagaacacaaaaatttttggacaaaattatacattatgggctcgtttgaaacgtcgtattaggttacgtattg

SEQ ID NO: 317049 - DNA, 928 bp, Cannabis indica
tgacaactatttctaatatttgcactacattttttttgaataatattgtatattataataattaaaagttataataataataaaaaataaaaatgtaactaagtatacgtatacgtgcaatgcacgtaacttcaatctagtatatatatatatcttgatgatatcgatttaaatgtgtgaaatataaattaattttataaaatataattagaaaagttaagcaaaaaggtagtgaggtgagagcttgttagagcatctctaattttaaatttttaaaagtaagaaataagaatgttaaaaataatgtctttgctctttgtaagtttcgttttgggcttagcttattttgtctggtgtttatgattgataaagtttttcttttttaataaaaaagtaatatataagataaataaattaaatattatatttaagaatatcaaaaataaaaataaaataaaatattatattaggattttaacaacttgagtactcccactaatttttctttaaaataaattatcaaaactctacttaatttattttacatcaaatttttacattacaccatacattaacttctctattttttttttctgtgtatcatttaaatatatatttttagtatatttttttttattttatataaataatgcatataatattacacacatattaaaaaattaagaaaataatattaaaatatatttagttcaatcaataattatctctacaagaattaggtaaaaaaaatatgtaagataactcagacttacctcatttgttgaaagtttaattttataattttttctcaataatttaaaaattaaactcatttagtgctctttaaaagaatgttacattagctctctagtgccgatgtaagagaggaagcagtcatgatttgttgggccatttggaatgcccgtaa

SEQ ID NO: 317050 - DNA, 2011 bp, Cannabis indica
aaaagtgataataaaaaagaaaattaactataaaattaacataaataataggctaaaattatcctaatagtacgtacctctaaaagttcactggcagtgatgagtaatacatcaatgatttgatcatgtctaacaaggttcagtttcttctccctgtaacaccgttcttctgaggtgtttcaggtgctgtgagttgggataagatcccttattccaataaatagaattttaatgcaaaatctaaatactcgtcatcacgatctgatcaaagtgtctttaataatttacctaattacttttcagccatagctttgaagtctttgaacattccaaaagtttcaaacttcttggtcattaggtaagtataactgtatctagaataatcgtcaatcaaagtgacaaagtattcataactacctcaagcttgattattattaggtctgcacacatccgtgtgaataatctaaagttgttatttttggctctattgccttttgcagaaaaaggccttttagccatcttgccttttagacaagattcacataccgaaagagttctaacttttagttctctcaatgtaccttcctttattaactggttaattctgtctaggccaatatgacctaaacgtagatgccatagatatgtttcatcatcatttaaaatcttttgcctcttattatgttgaggcaatgttactttaagcaattcattgtttaaaattaatagctcatttggtttgagcacataaagtccattactctattttgcagaataaattgacgttctaaatttggaaataataatctcattattattaaactcaatgttaaaagactactcatgcaaaataatattccttagtacatttaggaataaaagttcattatcaaaaacttatttttaaaatttaaatggactttgtcaacacacttggcagacacttgtgctccattacccactcttatagtcacctttttattagtcagttccctttacaaatgaagtatttatattagagaacaaatattattaatggctcatgaatcaacaatccatcaggattgatcatcttccaataaattagtttcaagaacaaataagttgaatttacttttcttaagctcaaagaggtaattgtcacaatttctctttagtgttacatcatgccacaatagaaacacttgcattttgcttttcttgtccttggacttagggttgtgtttgttcttcttggctttaggtgccttcttgcctttcgacttgagcttgctactaatgttgtccttaccgtcctatttccttttcttacctgaataagaaagagagttgagtgacttaagaataatgctcacttgagtcctcttatctacaatagatccatgtgtctctgcctcatgtattagtacaatcatgtgcaatgcatgagtttctataaaaatacttttcagtaaagatattattttaagctctaaatactctaaatatgaacttaattccattttaatactagtaatctactaaaacaatgatattactgcaaaaataacatcaaatttcatttaaaactaaaatttacataaatttactatgggtataaaatgcatgtgtggtttggtagtggctgacgactggttggtggttattcatcatcggcagtcgttgccaaaagtgggtgatgagaggaagttgccgacggtttaggtgtggatgtgggtgagaatgagagttactttttgttgaaaaaaataaagaataaaattagagcttatttatttatttagtagtttcatttaagggtagaaagggcagcgacaaaaattcataaaagaaagagatcatttaacttaggtggcgtttggtaacacttttttaatcagatttctacttttaaaattgaaaaagtgaaaatatttttcaaaaacatgttctataaaattgttttcactttttaattttttaattgagaatcaaaattttaaaaatagaaaaaatttactttcaatatttt

SEQ ID NO: 317051 - DNA, 1180 bp, Cannabis indica
aatcacgtaatacgcctatgctagttaggttgttacatgaactgtaattgattaatttaaatgaagtaccaacaaaactttagtctttttctcattaaattaaatacaattatattaatgtgaaaaagttgagagaaaaaagaatacacttttgaagtagtagttgcagattttcttcttcatccaagctttattgaagtgatcctcactatgctaatgccctgttcaaattttagcataggagccatgccttagcgatgaacctcttaacctagggacaactttgttgcatcccgtcggttaaggggcgatcgattcatttacatgaagtaaggtgaatctcactgtgacgcgagctattttagagatagttgcttttattggtagtattgtcatagatgcaccatattccaataccttcgtatcgtgactggattcaaattgtagtcatagcatgccaacttgtaagttctgggttcaagcgcttcaaccacgacatatggttcttctcaattaggctcgagtactcatgttgctgcttctttcgtattcaggaataccaatcataacatcatgtctccaggcttaaatttcgtatctttaaccttggagttgtagtgttttgcgacctttttctaatacgctgcctttctaagctcagacctttctctgatctctttgattccatatagggattcgaccaacagctggtgattggtttgctggtcatatgtaagccttcgataggatggaggtgtgaactctacgggtatcatggctttatacccataggttagagcgaagggagtgtgacatgttgctatttttcttatagtagtgcgataggccgatagtacttcaggcagttgttcaagccaattccctttcgcttgctctgggcacttctttagcgtatccttaagagtttggttgactaattccacttgtccatttgcttatggatgggcaagtgctaagaaactctttatgattccatgtctgatgcaaaaatcaataaaggggtcgcttccaaattgtgttccattgtctgacactattggagtccaaatggacaaattatgttcttgaccacgaaatcaagaattttctttgatgtgatggtgactaagggatctgcttcggcccacttagtgaagtagttgatgttgggttttgtgcc

SEQ ID NO: 317052 - DNA, 1501 bp, Cannabis indica
ccgaaatatacaataaataataaaatatttttgttaattaaatatgccaaaaatggaattaacaattatcaaaaacgtgaaaaaatctatcaaataacaagaaatatgtggtaatattactataatttttgtgggtttttccaatcatcttttttccaaatttccaataataataatttttttaaagtaattaagctaccaaaataatgtaatggtgctaagactgtttgtaatagatgattagatggtgtcatatttagactaaaaaaaaaatagcgttaatattatatacacaaaacatatatattttaccaataaaactataaaaactgaaagatgaaaatattcacaattaatatatattatgacaactaccattttctattatatatttttatatagttgctatgaaacataaaataaaatattaatattaatatataataataatattatatagtgtgttcattttttttttatttaaaaagactcgaactcaggacctccaatacacacgcactcccctatggccacttgagctagactcaagtggttctatagtttgttcacttagtatttatacatattgcacacataatttgtttttttttatgttttatactaaatgtgttaaaaattgtgtcctaaaaaaaacatttgtggtttaaaataatatcaacttagcaatgctatatttaaaaataattaattaattagtatagatgagaagtgaaaagaaaaaaaaaagtgtgtgctaatataataatcaaaaattcttaaataaataaataatttttaagctttgaattaatattaactatgttaattagtaatgtacaaatttagttgatattatattttatgtcaattttgaaataatttttagcatgtattaaatttagtacacattcataatttcatatcatcaataatattagattattattatttttttcaagatatgttaataataataattaatgtatcatttttatgacactacaccttaaatgtttatacaaaaattgggttatacaattcaaaatgtcatgattttccactaaaaaggtttgagtggcttgaacaaaaattgaagccgccgccataaggttggaaaaacttgttatattgttcaggtttccaccactattgaatttggttgtctcaataataatcaatcttattttactacttttattaatatctcagttattgttccaccttatcttctaatttgctccttttgaaaatatgatatttgttaaaagaaaaacagacaaaccagtggcggaaccagacgacgaaataaggaggggccaaataaaatatattttcacctaattttttttagtatgtaatattttataaatcaatataaaaagttaattacctttatacaatgtatataaaataatgaaaaataataaagagcgccttatagtgccaagtactaaaaaacactataaaaactgttacttttagtgacaaccttttagtcaca

SEQ ID NO: 317053 - DNA, 655 bp, Cannabis indica
tttttttttttattttttgaaactttgtcctttagagggtttaatcattatgcttgccttttttaatagcagtggtggcactgtctctaatactttagtgctactttgattgagaggtcattcttatttcaactatatttagtgacaattttttagtcacaacatgattttttgtgactaaaaaaatttatatgtgactaaaatataatatttaaatacaagttactactaatttagttttaatcacaacgaattataatttttatgactaataccttcagccacgtgctttttaatcacaatatgagaattattatttataactaatcacaattttttacttttagtcacaagttttattgtgactaaaaataaaattttttatagcgagaggtaaaagcaaaaaaactcacggctcaaaatacatctaatctatcaaattaagaaaaactaaatcttaatttcaaaaaaaaaaactaaatctttcttagacctcttctattcactgagcatagtctaattttaatacacattttactcattttatctaaacaatcaagctaatatatttattctcaaacatacacatatttctgttaaaccaaagggtaaatggcggcaaaatccccaaaatttcatttggtttacttacccc

SEQ ID NO: 317054 - DNA, 592 bp, Cannabis indica
agttggtttcttttgagtagtataaataagggtcatgggtcttcaagttgtgcatccaacaagagtgttcaaagtgtgttcaaaagagtgagagtgtgttctaaagtgtccctaaaatctttcaaaagtgtgagttatacacaagtgtgtagtaaaggtgtctagtgataaaataaagagtgagtgcttggtgtgtattgtggtcaagttaaagtgttcaagtcttggtgtaattgctttttcaataataaagtaattacgtttttcacgtgttgtggtgttcaacaatctttgcgtggacttttactaggatgcatctgaaatatgacctttctcacatcaacttaagtaaagggcatcatcaaaatattattcaaatcgttagtaacccaaggttgaacataattcaacacatgattcatagtatctaatgaaggttggtgggaagtaaagagaaacccaaaatactactaaaagattgaggctatacaagaaggtttttcaacccataccgagttttgacaaaaaaaataccacaaatcaagttcattttttttcgatgagaagtactttggtggaataaagctaattt

SEQ ID NO: 317055 - DNA, 1164 bp, Cannabis indica
gtccggcattggtcgactttggagcaataacttccatcaagaacttgtgcctcaaatttcccactcggacggctgagataggaatggtctgaggaaatcaaggagaggaagacagtgttataatgttgcagtacacttgtccattttcacaatccaaggggttacaacggcatcctcatcaagccaagatgagttggatcctcgcatcggctccaagactacattggaacccatggaggatattgaagaggtaagaatttgtgatgaagacccaactaaggtcaaccgcttaggaaagggtttagatctagaggaatgaagcaaatcatcgataccatcaaagaatcaaaagacgtattcgcatggtgtcatggagacatgaccgagataagtccccatgttattactcatgttctgaacgtcaacccaagcatgcttctggtacaataaaaaggcatccattagatcaggtaaagttagacgccctggaaaaagaggtagataaaatgctctcaaacattttcatctgaaatgtataatacccagagtggttgacaaaccctgtcctggtacccaagccaaatggaatgtggcggatatgtataaacttcactgatcttacaaagcttgcccaaaagattgattcccattaccaaggatagaccagatggtggatgccacttcaggttttgaattactgtcttttatggatgcatattcacgatataacaagatcaaaatgcatgttgcggaccaagagtgcactagcttcagaaccaacaagggggtataatgttatctggtcatgccctttggattgaagaatggaggagctacatatcaatccatggtcagctgaatgttcaaaagccttctggggcaaaacatggaggtttacttggatgatatgctagtcaaatctaagatacatatgggccatgcagatgatctcatggaatgctttgaagtagtcagaaagtatgggatgaaactcaatccaagaagtgtgcttttggtgtcaaattaggaaagtttctagggttcatagtaagccagtgcggaatagaggcaaacccagaaaaatctattagatatgccttccccaaaaatacataaagacgtgcaaagcttgattgggaaggtagctactctgtgttgcttcat

SEQ ID NO: 317056 - DNA, 945 bp, Cannabis indica
ctaaattggaaatagtcaaaaagtattaattactttttcagttattaataaacaagtattggtccccatttttgcatcgcttcacatatcgtacgtttattcctgagaaaaaattttgatgtaaaaattagaagatcacaccattcaaattcaattctatagactccggtatgcttctgctaatctacaattctatcgtttgattatcatgaattaagtagggttaattttagatttacagtattttaacatgtggtatcagaacatccctatattaattcttgagaaatttatgtagtagtatttgttatctttaattaaattatttttcctgcatttggtaactctcaaatatatatattttttatttagttaaatcatttaaatatatatggttatgcaattaaaatttttgtattacgttttgcgattaaaatgtgattgtaaatacatgtatataagattttgttttactatatatattcaattaagtcaacttacaattaatatatatattcaaacttgttttatttagtttttttttttaaaagagcgattgaagtttgtgaaactttatcatgtatatataagaacaatcgacatatatatgataaagtttcagtatatgtcgagcccttttgtttttaaaaaaaaatctttctatctgtatacataatatatatatactgttgattaattttgaaagtatttcagcaacaattaaatttaaattttaatttaaaatttattaacgatatataatattttagttaaattaattgaagcaaaataatcaccaaagtgatctcttttgtgtagattaatttaattaaaaatattaagattattgtgtgtatgtaattaataaatttattaactaacccaaaggtgagttgatatttggttgaatttcatgcatatttgtggtgataaatgtgtgataat

SEQ ID NO: 317057 - DNA, 824 bp, Cannabis indica
ctattggctgctcacgataccttcagtccctttctttctatttttagtttcttttaggtttcaactaatttgggccttaagcccttaattggtccaagcccaacaatgatggacgaacccaacaaatcgaataacaacaataggcatctttgtgattttacaccaatgcaaagctaattttaatgttttagtttgagttgagtttctgatacctgcaatgagaataggcaaaccagctactttatttcctttctaaacattaactacagcactcaagccaagctcaccattcctcaaatctattgtagcacctgtgttcaacttgaagaaacccaaaccaactaaattctcaagcatctcatgatgaaatgttggttgttcctaatcattcatgatgttattcctttgagccatcttgtaatcattgatgtaagaactaatctactctacagtattagtcgaagtcatatatcttttttcaaacaatttattatttctacacctcaaatagttcataagatacccaacaacattgctaaatcctctttattgagagaataaaaagcacataacataaattctttgacatcacaacacttgttatcattatagaattttttttaaagggggagactctccaaatctaattagcgttggaacaatctaggagagtgtgggtcaccgttttattaggataattacataacgtacaagtaggacaagaaataacttttttagaatataactttaaggggatttttctaccaaaaaaaaaagataagaaggttaagtatataaaaattaaaacataaaggagtttcgcc

SEQ ID NO: 317058 - DNA, 642 bp, Cannabis indica
aaaataatttccaacataacacttgcctcctaaaagtatgctcataattcaataagtaatacttttgaacttcttctgagacttgcaaaataggtttaggattacctctccaatttttatttcaaatgagggaagtggccatcacatcttggcatggggacaaggtgatggcgtctctcggtcacgaacgaaatgatgtgattcacccattgtggaacaaaggtgatataaccatgtagatgatgacatggagtgaatgaggtgatgatatctcaggatgatgtgagcaataaggtccagccaccttggtacctgtttgggtggcgcggttgtgtgaccgtggttatgtcgaaacatctcaacaaggacactttgtgatttggccaagaagttgtcgaggtggagcagcttcagtcttggaggccaacgtgatttgggcattctgggtagagtcaaagaggtttagccatgaggaccactatctctcatttggccttgatgttggctccaagtaatatgtttggtcatgtgggtcaaagttccttgagcatcatgtgttaggttatatttagcctatgttttgggtctgtaaagttagcattttctcgtctattggtgtcttttggagcagttttacgcttg

SEQ ID NO: 317059 - DNA, 2039 bp, Cannabis indica
ttttttttttcaattttttttttcaatatattacagaattatacattctctttcttcaaattattattattctttctacaattatcactctatattaagtattattttttaaaaaaaattacatatgacatttaaaaaaaatgatgactaaaatctaaaataaaactaactatacgtggctaggcacgtaacttctgcctagtataaatatatatttgtattccaaacagttgaaaaaagtaaatttgaaagatacatacttgagatctttttatagtattataaccttcattgttttaatattataaacgtatgtaataatcacaaaatcaatactattattattaagttgttttttttttcttaaaatatataacatgcaataatatagaaatactaattgtaattgtaaatataatttatttttctttcttaaatgccaatataattgataacctttgatttggattgttatattttttttaataattaaaaaataaaaataactacaaattagataatataaattgttacaaatagaatgtatttaacttattttagatattaattatagtcaaactatataaaagtttatatctaaatatattttcatattatctaaatttttatttcctcacatttttgttttctatgtcaaaaataagataattgtttggttaattactatcagtacaagaaatgcatctttgctgatgagtcttctcgccgctaaaattaggtgtaagttgccagtaatattttgttagcgagcttatgtaccgagaaaggctgccgaggatgcttggtcgacataaggagttttgtattttgccagcaaaagtattttttaatgacgatgttcttggccaacataagtttattcactggcattaacctatcagctgagggctgcctaacgaggttttactggcgaaatcaatcgccggcaaaacttttgcgccaaatttttttttttctgcgaaagttttatcggcgcatcttacttcatcggcaaaactttccaaaagaattttttttttttggcaaagtaaattgcagtggcaaaagttttttttattttttaaattttaaatttatatatataataaattaaaattaaaattaaattaaaactaaaaccaaaattttttaaaaaataatatataaataaaatctgaattatattataaaactaaaatttatattacaattataaaaactaattttctaaaactaaataaaagtattgttagtttataaaaatttgtattatttacactgtaagctaaaatataaaactacaagtcaacaatagtgttatcgtcgtcattgtcgttatcgtcctgagtgggaggggcatcatgtgaagaagacccagcaccaggaggccaaattactggaattgatagaatcagagcaatcgggggcatgttgaatactgaaacggcaccagccagatacatattttgttgctaaaacgtgcttaggatttgattctgagtcttcatcatttgtcgttgccactttttatgtacttcctcctcttccaccatttgcttcaaggcctcatattcctcttgggtgacaataagttggttggagtgacctgccctgggagttgccttcttagctcccaccctaagcctcggcaactggctcagtccccttaagtggcgtgatcgctcacccatcacctgtgtcatgacaagcatgtctgggagaaattggttgaggtcgacattgtactactggggacattggtcggtgctggttgagtttcacgaatctcaaccatttttgcctacaaaatttgaataaattattagagctgaataaaaattaagtataggacaagtttattaaagatataaaattacttacatctaattattgtgtgtgtttattgcgccatttgttgttcctttagtggaactcttgaaaagtatccacaatactgaggacttctctcgtgtcaagatcagcgtatttttatacaataaaaaaatataaatataattattaaaaaaaaatattaattt

SEQ ID NO: 317060 - DNA, 2054 bp, Cannabis indica
ttatgttaatgtttagtttgattatagatttagcaagttattggtctaaaaactcagcctaacaaatagatagacggacgcattaacttattggtcgaatcaagcatatttatattactagtcaaataaaatcaatttttactattttacaaaccctagtataatatattatataatatgaatttttttttgtaaggaaatagatatcatgaatttacttgtgagttattatatataaattatgtgatctctcagtttcgaaatgggttttcatgttatcatttgtattattaattattttatttttatgaaaaagtaaagtaggtacgtactttcgataagtatttatatatatatatatatatatatattattatagaacatgcatgttttaaattggtgagcatgtgtttagtcaatttcagttctcacttttttatattgtgtggatttgatcataatcttttatcttgttttgttctactgtatcgtatatgataaataagaagaatacaaaaacatcaaataaaagtttcagtgtacctttatatacccatatataatataaggcaagatagtatatctttttttttttctttttgagaaaaacaagatagaaaaatataaccctctcctcacttctatttatatacaacctgctatatctataaatatatataatataatgcaccaaaaaaaaaaaagcatatgtatgttttttattttgtcggtcgacgttttttaatatatatagttataatatagaataatttacaatataaagatttaatttaatttttaattataaattataaatatttaaatttaatttttgacaataatacttaagttatatatttaaaacttaaatgttatatttacatatatctatgactatcatttttttttttgtcaaattttaattatgtccaaaatggaatgagtatatgtatgaatatggatttgttttacgtattagttacattaaaatttaatgtaatataattaagtttcaaatgattaataattaatttttattttcaaaaaaataataataattaatttttgacgaggtgagcaaaatttgatttgcaatagtaccaaaaactgctacttttagttacaattttttagtcacaacataatttttttgtgactaaatgtgacttttagtcacaacaaaatgttacttatgactaaaacatagtatttagttacaagttgtcactaatttagttttagtcacaataaatattgtgatcactaaaaatacatttagtaacaacaaattgtaatttttgtgactaatacttttagctacaaaccttttagtcacagcataaaaattataatttataattagtcacaactttttcacttttagtcacaagttttattgtgactaaaagtaagattttttgtagtgatggcctttatatcccatatatttatatattttttttatatataacatgtggttattaaatattttttttattggtttaactaaacattttaaaaatataagaatatgctattaaatttaacggtattataaatagtgtttattttataaatatatataaatactgatattatttattttaaattaatttaaatatataaatattaatatattatttgtaatattattattttgttattatacttatttttaatattgggagcatgttcaattttaatatttttaaattttatatttattttttaaaaaaatttaaaactttaaatattattttttaaaaaaattaaaaaataaataataaatagttttctttaatttataaaattttaaaaatacacataataaaaataaaaactaaaaatataactaagtataagtgtaatgcacgtaacaataatctagtatatatatgtgtgtttaaagaaataataaatatgaaaactagctgcaataataaaaaaaaaaccctagttacttagggccaatttggaatgacttttggaaaagctaaaagctgcttctcaaaaaaaccgtgacaaaaaggtgtctggtaagcagttaaaaaaca

SEQ ID NO: 317061 - DNA, 2010 bp, Cannabis indica
tatactaaatttgatattgcacctgtcaataaatgttacacagttaaaaattaatgataacaatgctcaaaatatcattcaagattagatattctatttatggtatagtcatattagaaaatatacctcccacgttgcaaattccattacattgtgccatttcaaatcattattcaagctctcttaaaacttaatatatgatacacccttctaactttaaaaggttattaggctaattggattttaattaatagtggactacaatttattggacaaattatagttataagtctcatctcatgtacttttaatacatttagggttcgtttttcaacgtcgtattaggtcgtattgtattgtattatattgaattggattatatatatcatatttttatataatactatattaaactttaatttatagtaaaatattatatatttaggtgtccataaaagttaataccacatataatttatataaaaatattgcataaaatacaatttaatataatataatacaatacaatacgacataatacggcgttccaaacgagcccttagtgactattaaccatgctattatggttattacaaatatttatctacaatattaattttaatattcccacttacatatataattatctactgtaatattatccaccttatacatcaatcagctaaatcatatataaatatcatattgataggatatatacattacatataacatgactttgaaaatatttaaatacaataacaactattaccaatcaaacaaaatgtgcatgaggtgtaacaaattatgactatgtgcattcacatctcctttttatacttgtcacttcagtaaacaacatatatatatatctatatatatgacaataacaataagaagtgactgtaaaatcattttgtatgttcaaaacacaagtcataagcgttgtccagatttttgtaagcctgacatgtggatcctaatctggaaaaactaagtgatttgtagcatgtcaactctcttgaccgctgttctatgaagatggaagccttagctcacggaaagggccaccatgaaaggaaatcccctgaatagcgacaatcagaagtctctcccagccttggggctgaagccacatacttctgtaaggctaaagtcgagtgctcctgcaaaggtatgggtttctcacaaccaaatgcccgaaggttacttggaatgcgttcagttgagttattaccccatttcgcagaggctctactcgtacatgtgagactacgtgaaagtcctaatttctaccagttcatattgatgattcttagcagattaattctatgttatgaattagaaattaaaaacaatgaacacagaatttacaagcttcctctgcattggaaacgcattccaaccgagtagtgcttgggttcccttgaaccgggtacagtaactttcactaaacaatcaattcaattacaatatccagttctgattcttcaaatcaaacaatgtaatctaaattgacttttatacaaagttacctaatgcttgaacaacctcaagctttgagatctaaacacatttagatctcaaacacaagaaacacacagctgaacaaccttcagcaaagaatctgaactcccttcagatcaagcagatttgaacttcatcttcaacctcaggaagatctctcgaacttcaatctgcacaaacaagaacaaaaacagaaaatatgttgccctagcagagcaagaatcaagaagaagattctaacagaagagagttagttagtacaacggttttgatcgaatttatatactaaagataataaaccagactaactaaccaaccagcaaagtacagctggcacactctaacaaactagcagaaagctgacatggcactaaaatgatattagtgaaaaacagatgcaactaactccagaacagatgttagagacaacaaatactgaacaaaagcaatatctaatttgccacacaaaacatgacacttaca

SEQ ID NO: 317062 - DNA, 814 bp, Cannabis indica
aaaagccaactttgtagtagtggttgatcagagaaaaatcttcaaagaaggaaaataagggtcagaacaattcgaataaaggcaaccagaattctaagttcaagaagatgcttcgtgtgtaacaagactactcatctaagaaaggattgtcctattttgaagaactataatttcaagaaagatggtgatgctgatgtagtttcagatggagaggacaatgataggtatgatagtgctaatattttgacaatatccaagaatggatcagaaggtgtttggataattgactcaggttgttcttttcatacctgtctcgataaaaaccagtttataagccattcaattgttaaaactggtaatgtgaagcttggggacaatcgatcttatccagatcttggaattggcactgttatgttgaatctagatggagaaaatgttactgaattaaggcatattcgacatgtaccagacatcaaaagaaatcttatctcagttgctatgatgaatcaagatggttgttctgttaaaattgaaaatagtgtgttaaaagtaatcatgggatctataacagttatgattggagttagtaggaatgacatcactactacaaatatcagaattcgcaacggtcctaaaaacgattttttttttgggaccattactaaaagattaagtaactatttaaaatcgtctgaaaaatttagtatttctgacggcttaaaatcgtagtaaataaaataggcgacattttctaataaaatcgtagtaactattttgcccgttttacgacggttgtataggcgacggttataga

SEQ ID NO: 317063 - DNA, 1023 bp, Cannabis indica
ctacaagaaatatcacttttgccagcatatttttgtactggcaaaagtttggtttgtgttggtaaaatagaatttacttctgatgtgttgccaaaagaggttggcaaatcaacgttggtattaaaatttttgccggcacaaaatgaaaagcgctggtaaaaattaaattttagtcactgatgtgcgctggtaagactttaacctttttgtcggcgcagtttgcgaaggtaaaagttatttttaccagcgcagtagcgaactgtactggtaaaagtgacatctcttgtagtgtgtccaccaagaacatacaagggttccaactaataatagttcttcccccttgatgctaagcattatttgaagaaaaatgccaaccttcaaacatatttacatatgaggcacccaagtttggagccttaaattttgtcttgagaagaccaaccaatcacataaaatgagatagatgcaaatttggatcttcagaggggagtccaccaaaatgaactgaagattgcaccatttggagtatggctggctttatttcaaaggtattggcttctacggcgagtggtcttatacaagactgaaccccatcaatgttggaagaagataatccctcagactacggttaggtggattacgaccgtttgcctggtcttctacggctccccccattatttccattattgccattattggcgttgtcagccatgactatttctggttcagccctcaatgtagctctttctaaactcttgttccttctgttttgtctacaggtcttctcaatctcaggatcaacaagcactcttaaactagctccttgacgccgcatataccaaaagcacccgaggtaggatagaaaaaattaagacaaaatagttagcaagaagtaagaacaaaaaccaaagccgaatttagtttacttttgtaatatcaattttcaaacaatttctcggcaacaacaccaaaaacttgttacgaaaaatatgaataactacgcaagtgcacgcaatcaagtag

SEQ ID NO: 317064 - DNA, 832 bp, Cannabis indica
attaatatttataacaaaaacaataatataatgttagtaggaaaaaaaagcacatgcctcaaaaggaagaatatttggtcctaacgtcgatacatctttacaaaaatatccatttacactacttctcctaaaattcttgtccttacatgaggtgtgtgaaacctcaaatgaaagtgagggacttcataattagatattcaatgacaattagactgatattaatttaaattggatttgattagatgataaatgatattatcaaatactgattaagaatgaattcaattaactacataaattataattataattatgtataaattatttctatttcaatattagtgactatttattattttttattatactctttcacacttaattagaaaatcttagaaaaaatatgcatcgtattagttgttgtatagaatattttgaaactttttaattgtttcttttaatttatttgttagaatttgagaaataagatgaatgaggttccatcccaaaaccaattggcaatgggaggagtagtcctttcatcttatatatcacaatttattttcacatattagcaatgtgggactaactcttaatacaccctcctcgcgtttggacttggaaagtgtgggtataacgaacgacctttaaagaccacaggaccgaacgtgacatttgaaagaatcccacaaggccaaatatcgggaaattcgtgggtgtacacgtcgggaaatttgtggattttgaaacaggtcaaagacctcaacactagaaattggcacacattggccgaaaggtcccaaatgtaggttataggggagacagcggaagt

SEQ ID NO: 317065 - DNA, 1135 bp, Cannabis indica
aatttttgttgtgtatagtatattatatatttaagatgatattttgattctattttattatatataatgattatgtaaaaatattgttacatgtatacatttctttttgacaaaacatgtatacatattttaaatagtagtatatataattttcttagcatgatattgttaacgtagattttcgttaacttaaaatattaatcttttagtaataaatcaactacaaaattaattatagtaataaataagcaacataatatttttaacgtggttttaaagttaattcttcatagtccatgagtccatcttattatgaaaatttatttggaatagagaatataataatatgagtgacaattatatcttgcttttttctccttggattttttcgtcccttttaccttgagttctgttcttatttttagatgtgtagggtgacagttattctcttaggatctattcattcataaccgcccatgaaacgtggacattctccacgttttattattgtgcgcatgggataatgttaaataaacgttcaactactctttttttttatccataaacggttatgctgactatactggatgatcctcgccaagtatgcattatcctcctttaccgtcttttgtagaaaatgctaagtacagatatataatgcttctcttagatcactttttccattttggaatgtattagcgaggcagttacttcaacgtataaagagcgagatggacgaaagttgttattctttgtatatactcacgagtatgtggatcaatgagttgcaagctgagttgcaagctcttattcatgaatatgtgggtcaatgagttgcaagctctttgtttgttcattttgaataactttaactatgtattttgttcaccccaagatggacttgttgtcttgtcaatcttactcgttaatagttattattcatatctcgcttctacctatgtggagtttgaatatttctatcaaccgtaatttcaggcgagttatttaatgtgcatttttagtaatacaattcttaagctgattcatattccttctctggtacacgtgttagcttctgttattagccgaaattatggtataacaattacccctaaaaagtactttttaattaaaa

SEQ ID NO: 317066 - DNA, 687 bp, Cannabis indica
gtttaattattacgacacatttgaagatgtaataaccatatcgtatactggtgcatatacggtgacattgtttgaatgtaagtggtataacactaatccaataaaaaagaaaataatcattgaaaataatataaccagtataaatataccaaatttggtatcaagatgagtcgtacatacttgctaatcaagctaaacaagttttctatcttcaagatccacttagagatcgtgattggaatgttgttgaagatgttaactatcgacaaatttgggacattgacaaccatgaagacgagacaaatgttgatgtcgtacattattcgaactcatcaaattttgtgttgatggttgatctcggggagttgattttacaatccaatgaacaagctgtaaatgttgaacctaacgtccaatcaatggatgttgagacggaaaaatttgaacttgatgaagattatgttactgaagaaattgatgatttactagttgaacttattgaggatgaaaaccagaacttggtgaatgatggaaatgacagtgattcctctttgtagctttaattttacttttgtttgtgataaaaatgtaatgattgaataacactatctttctaatttgtatttttgtttgtctcaacttttatttatttgctttgcattttgtggatttttatttttgtaaaac

SEQ ID NO: 317067 - DNA, 1306 bp, Cannabis indica
tcttctcagatcattaagatccttaaccatatattatttattgcatctctgaattggaataacatatagtttgtattaaaaaataatctaatggtcacacaagctctgtgaagactctcgtttcacatcaaaacctatgtttgtttaattagagcattcctaatatttacttcccagatttcatattagtcatgaatcatgttagaggtagctaatctaaaacatgtattaacacaaatataaacaaatcacaaagatccagaaagaaagattaacaaatcacattaagtaattggagtaaaagtcaatcaacattcatcatatccctaagttgagaaacaagttcataacctctaaactcaaatccatgtttaaacaagaaatagaaattaacataagaaattcaaaaaagggaaaaagaaagaactagatggtaaacttgatctggatcgccacactcgcttcctcagtctccttctttgtttttagggttctatttatgaataatatggcataaaaatttgaaacccttttatagaaatcccttttacacatcagaatggccaagttatgaaacttcccataattctcgtactgaacatctcgtcgcgaccacaatgtgaagtcaaaaaaccacagttctaccaattgtgctcgttgcaaccactctttttctgttggaagttattttaccacgatctagatttactaacatatatatttaattataaactataatctaacatcctaaacatgaatttcttaaaataatgaaataaacacaaaaaagtttatagaaaaccttacattggttacagtaaaattaaatctctctttccgttcagatctctaacccttgatccattctgttgcagagtatgataaggatctgaacttggatattctcctcatttgatggtgttcaacacaatcttccacaaaggtctgagtattgacttgaattgtgtggacaattccttaattcacaataggcttcgaaaataacagaggaagaagaagagggattcgaatattatggtggctctctttattttctattttctctgacaaaagagtctgatcatcatctaaaaataaaagccatcttattcgatttatagagtagcttttagggttaggtttagaaataaaatagaattaaaaaagattacaaaaaatgattttatttaacctccttgatcgagccattaatgggcctttaggatttcaattttgccattttatttaaactcatctttcttttcacaaatgtcatattttaattaattctaactctataaatgtc

SEQ ID NO: 317068 - DNA, 1456 bp, Cannabis indica
ggtcagtcatcaatccaggaagcaaccagagtggcgtactcgtgtataagagccatccattccgtgggtgtgaggacccaatggaggcttgaagtggggacgttacgactagccctacccagcacctagccttgctttttatgcccaggtagggtttggcccccaacatggtaaatctcagctcccatatgagatttttacactagtttgacctcaaacgagatcactctgtcatgacagttacagaacaagactttctagagggcaagtcattacgaaggacaagtcatgattctcaacaacatgattcttataatgataggaaaagtcaccacgtgactccattaacatcaaggctctgataccaaagctctgatacattatcaaagatcaatgcatcagactccaagatcaatggctaacattcacttctagattaaacatattaattgttcgataaatttaatatacaagtatgtgtaatagaatcaagtaatataataataaagtagagtatcgttcccatgatgattgattattaattaccaatcaattaattctttgtttctatttgattaattaaaaagttttagaaaaataaataaagcaaaacaaataataataataataataataataataataataataataataataacttgagaaataaaaaataagaattattatgattcccaactattctttcttttacttctaaatgcaattacccaatttaccttcttcatattcaattgacaacttaaattaagtagttcagcatttggttaagctttacaaacccaatctatatgaaaactccctatattcttatagtaaagtttaatcacaaagaaatactaaacaaagcaacccataaaattacaatctaaatactttcgtcctaaattaatttgtatccataacaagaaaaccatattcaaatctcacttttcagaattttgatttgaattcatagatagaaattatagatggtcaataaataattacaaaattaaatgaaattgcatgaaattaaaataagagaagaagaagaaattaaataactacattaattcataaaagaaattaagcgattcacataataatccttaaaagaaattagctcatataaataacaaaaatctaattacaaacataaaagataaaaatataagagaaagaacactattagtatttggagtcttgtaatgatgtcttctgctccagtcatccttatatgctcaaaattggtctctaagttagaatggtgcctaaaccctagctctaactcattttatagaaaaaaattggaaagtttctagttcttttgcaaatgtcgtggcatagggtgcaatgctgcatcattcactgagtctttctaaatttctaaaattctactgcgacgcctaatggtattttggtcataactctcttaatattgttgggttttatg

SEQ ID NO: 317069 - DNA, 1808 bp, Cannabis indica
catacaaattgcattatctagaaaacaaagtcaaatatcagttgtataatagaagtatttatgactacaaaaaaaaaatgaaagtatttataaaagaaaaatcaattgttacatcatacatgtataaataacaatgaaccctcttaaagggaaaaaaagaaaagaccacaaaaaatcccatttaagtaaaatgaaattataagatttgatttgaagacaccttcatataaatatatatttaacaaatattagcaattttctttttggaaattatttacaaatatctaaagatgattatgaataattacccgattacaaacgggacaaagtgggcttctttgctcccactcatatatacatgagaggtgaaaatggtgaaagcattttgttgtgattcttggattttcaactgtaaattctgtcaaaacaaaaagttaattttatatttgttataaacatgaaaatatattatttaagaataatctttttatttaataaaatataaataataatgtaggatgctaacataagaatttaaatgggtttttctaaacatatatatatttgaatcaaaatcttaaatgactaaattgtaaaataatatttataaggactctaaaagtaaataaaacatatgcatgtatttatattttaccttcgagacatgtaggacattcttcattttcatgaaattcttgtaattgtttataaatttgactttgatcatcttcattaaataatgatgaaacctacaaaatataaatagtataaatatacaattctcaaaaaataaaataaaaatcataattaatattactaaattaatcatcataatattaaaaacaattttatgttaataaataaaataagagaagatggtaattttacgtacctcagactcagagctattttcgttgttactatttgagatatttattgcttcattatcattaaaacaataaaaacaagaaagacatccacccatgagtaatatgttgtttttaatctacaaatcaaaaatgtttaattatagtttgttagcatttaaatatatataattattttttttaatttttggagacttaaaaataaaatttacagtttggaaaaaaaaaatcaataagtgaatttctgaattattctacaagaaagagttacttatgaattgaaattactatttataacttagaaggaagacaagatactaataaatatatagaaaatttaaccaagagtgaaattactaaatgaattttgatactactaactaaattgacaaaccaaaatatgtgaatagaaaataagaagagtgagacgtatttcagcaaattaaagaagaaaagattaatgtggaaacaagtgaggattgttcgttagtatatttttgtatgtataacacttactataatgtatatttctattttgattaggattagttacccaaaacattactctagatattcaaaaagatatgttattgttataccataaaataaaaaataaaataaaataaaaagatttattttccctcccctatgattataaatgacaaattcaaaaacttaatttggattaaaaaagttccacatttataaatttcaaaaaaaaaaattaggtagttgtaaaattttacttacataatttttttgtgattatataattagactttaactactaacaaatttatagatattgttcgtcagaacaaataaataacacaaataatttagtagtattgttattgagtactaatggtgcttagtactttttgtatgtgtcgtcttgctattagttaacgtacattactt

SEQ ID NO: 317070 - DNA, 1044 bp, Cannabis indica
ttaatgattttgcctctaaagacgtccgtcacatttgattgtgtttttgattttgattaatttgtttgtgtttgatttgtaatgttataaatttgattggtgtttaatttcttatttctttttggcaatgattaatatttatccgcgcttctgagtgtattcaatgaagtacaaaaataaattatggttgaatttcttaatatgagccaatttacaaatagttttatttcatttattcattcacttgttacctttccttgatttctaattggctgtgatgatgtaaacttcagctttaatgccagttctgcttcagaaaattcttgattgatagagctgtttatataacctgagccattttgtttattgtcatggatgctgttcttggttgatttgtattataatctgtgttttccattgatgagtaaatccaatttgttgagttgtagtgaagctgagaccctgttttcagggagaaccccttggtgaatctacatttcatatgacattaatggatttaactgaggctccttttcttacgaattgttattattgagtattcactaagtctgggatgattcaatccaattgtttgaggtgttgtggagtcgagaccctgtttacagggagaaccccttggcgatacttcatttcatatgaatttaatggatttaactgaggcgaagctatatcattagttgaatttcttttgttttcaaaaagtattctatatttttgagtttaactatactcttatccttaattaagtggtaggtataagagtctgaaaaaactcataaatcgtgtgttgtctatcagcttcatcttttgtaatactacgagaatggagttaaataacagcactacatgtgaacaagtacatgtttattgccttagagtttattttttgtacgtgatatagggtctgttaaatttgtaggtttagctttgtgagattttgcagtctatgaatgtggatggggatgttacactgaaacgtgggagtgggagtgggaatgggcataacgaaattcatttgattga

SEQ ID NO: 317071 - DNA, 665 bp, Cannabis indica
aacaaaagcttctacactatgaatataagtttaaattcatgaatataaaaactttaacagaaacaaagctgaaaaaaaaaaaaccttttaccaagaacccgttgctgtaattgcacattggtcgagtccttaaccacaaagttcctgtaagaaaacagagtattaggttataaatatacacaaccggagcaccaaagaaaagcaacgaacaagttaaatgggtgaccagtatcgcagagacgaagactgaaatggcgaatcgagacagaaattgagaaccgcatccttgcgactgccaatggcgatgacttcaacgaactgagaatcactccagaagtcccgaaaatgaggttgggctctggcatttggggaagaagaatggttggtggaagtggctgcgattggaagaagatgagggttggaggtgggaaggttccaattccaagtgagggagagattattggagcggtggaagaagagattggggtttagtagggaaggggaaagaggaaccctcgaccatgaacccaaactcagaagcgaagagagctccatggctaacagattaggagggaaccatacagaatataatcataagtgaaaattaaaaaagagaaaaaaaattatatattttcttcggacctagttaaaaacaatattttgca

SEQ ID NO: 317072 - DNA, 2056 bp, Cannabis indica
ggaatttcgacgaaagtctttcttttttgtctattatttcgatttaaatattaaatggagtgaaatcacgaattaaagaacaaagaattcaaagaataattctgaagaaaagaaaaaagaaagaaatggaagaacatggagcgacacccataaccttaattaacaaaaaatagtaagaatgacctctaattaaatgtaattttatactcaatcttactatcaatactttaagtgtcaaataagtgtgtcagtttatgattggttcaagtgatttagttttttttttaaaaaaaaataataaaatttaaatataataatattaaaaaaaaattaaagatttgtttgccgcactcgatacatttgtacttcattccatgcaccttcagtcatgaaattatattttctcaaagaaacgaaattgatttattcttccttctttatagttctaaatatactgaatatgtattaatgaatctgagtaaaatcatacaaaaaaaaacattgtaaaagtttgaaaattattaatcgttattggttattgatcttgatcaatattttttttaatttgagtcaaatatgctaatatatttaaaccataagttaaaatacaataggcataataggcaaaggcatttcctcaaaccaagtactctgccaacaagtgagcgacattattagcagatctataaacatgtgagatttgtgctccagaaaaatcagagactaaaagaaaaatgttacttaataaacaatgaaaatcagaaattggttgttgggttgagagcaatcctttaaccaccaatagtgaattcgtttcgatgaagtgaacaggtagcttaatctcttgaagccattgtagactatgcataagagctagagcttccattatttcaggtttaaagcttccttggaacggtattgatgtggcaacaactacatctcctgcactattcgtaagattgtacgtaccaaaacaagatttttgattccttgtgttgactgcggcatcagtattaagcttcagcctaccagatggggggttcaactgaactttcgggcattagacaaattagctaaattttcctgtgaagatcctttgtgagtgtctgtcctagcagtatgatattcatccaaatatgagagagcaaagtaaagaagcacatccgttggtttaggctttgaaccatgtgtctctttgtttcgttcattccaaatactccaaagaatgttagcaaattgctccaactgcagggatgaccattctgtagaaaattccaaaattaaagccttaagatccaaatgatttgacagataatattcaaggcagaaagctgattgcagccacttttcgagcacgtttacaaaaataaaagagcaagcattattgtctcgttttctcggttgcagaccgagcaaattgcagagttactaatatatcttttatggaggatattagccacaagaagacaatcgtgtattgcacgccatagaaatattcttaccttcgaaggtgaagatattttccaaaacttcttccaccattgttgagcttgtacaccactggcagcagatgattgatcttccaaagacattgctaatgcataaccagacttcaccgagtacataccattggactcatgatgccacatgagtgagtctgcctgatctaacagagtgagagggatattaagaattttttcaacatcagtttccaagaaaaggcttcttaaaaatgttggatcccattgtcgagaattcaatagcagattagagactttcattgttgtacttgacctcaaaaaatcaatggtttgaatgaagtaaaaccagggagccaaggatcggaagcacacaatatgttaaaaccattcctaaccctccaacggagacctttagcaagcatttcttaaccccaaataatgcccctccaagtcaaagatggataagaatccaaatcaacttcaaggagagaagtatttttgaaataccttagtttaagaattcggcaaagtaaagaagtaggattagagaaaattctccatgcttgctttgctaa

SEQ ID NO: 317073 - DNA, 838 bp, Cannabis indica
tttattattcgctatcggacaaagatctgatggtttaatatttttaaaactgatatttatagttaatttgtttattacccattaataggtaatacccattaagaagtattccttatatatatatatatattatgtagttgagtattattaccatttcaatcaaatttaaaaaaaattataacaaaactattaaagtttagctttttattttattatcaaaatcaagcaaccaatatcgatcaaaattcaaccaccatgcacaaccacaagaacacaatcttaataatttaggaaaattctaaaataatttacaaaataaaaaataaagtaatgtacattaataaaattattagagattagacttatattttaatggacattgagattcaacaatttctccaccaaaagtgcggtcggagctacagccaccacaaccaccacctctaagtttagtttactctaaaaacccaaacaaagatgatcaaacttcggggatatatttttgggtatgaaaattgcaataattaaaaataatgggtaaaaacaaataaaaaatgaagaaaatggaaagtagtggttgggcaagagtttcgtgaaggggctactggttattttgtttggggagaagacgaagtgaggaagacaaatggctaattagggttacataaaacctatgtcatcgattattttgtaataactgacaatataggggacacacgtcaaccaatgcgttttcctatagcgttattacaaaataacatgagctttatttaaaaaaaattatttattttaatttttttaattttaatatgagcttttttataatatttaaatagtt

SEQ ID NO: 317074 - DNA, 2145 bp, Cannabis indica
atattttctaaccttgaaagtttttgtttattttaattttgaagcacgtagaaactagttatatttttcatccacacaagtaaccatgtactcccttggtttggatctctttgttctgatttagaagttctttatcattgcataaaaatattattgtttttagtatgtccttgtcactgtatatttacccttctttgatttcaaggaccatgtaatctgttatgatctccttttcttcatctcttctttttttagttgcttcatttattttctttataataaaatttgtaacttctggagctagttgaaacatgtttggagagcttgttatctgattatactcacttgaattctatccttcattattagattactagttgtatggtacgttgtgtatttgtagaatgaattcttcctctgtcttacttggtccttgcattggttgttcaaaagaaggattttctattatttatatagttatctcttctatagttgtgatgcacaatggagaatcagttactccagcctgtatctttctgagctcagtagttttattggtgttgttctcggtgatatctgatatgatatgtctatgttattgtttgtaatatcccgacaagcctaatggtaataattagggtttctatttatattatgggttaatcagataataagtgggattatgatcctactaatctatttcagcataaaattaaaattttctataagtgagtaaataagcgtaatttacatgtgtgaatgtaatatgagctatatgtagaataaaaatattttcaggtttggcaaccttggagactcgattagggggccaaaaatatcataatgggtttaattaataatttcacaggaatattgtgataagttgatagtataagtattggggtaattaagaatatgtgggattcgacttagcgccatagaagtagagatttcttagtggctaaaaaatgataagataattattaataatataatttttattaatattattaatatttattttttttataaaacttatcagtttgataagtttaatatatatttattgtaagtttataaacattaaaactaaatagaacgaaaccctctttctccttcgatgaaaacattttcctcctctatctattttctttgattttcaacttaaaatttagtgatttatgctccggtaatagagggatagaaaattcttgaagcgcgaaagcttaaggtatggtttaattttatcttaagctaagaacgattggttttatatataatgattttgtgaattagaatagttatggagattctgaccttgtagaattatttcgatattttttgttgaatttgaggtgatttcgagttagaaattgagtttggaacttttatagcttaagtccaaacattagtcgcgtttaccaattaagggctcgattttaatttctattacgtaagaatggttgtatgtatgctatttgtgtgccctgtgaagtttagagtggtttggacaggtttcggtagcgtttcaatgagtgcgtaaattgagaattgagagttttcacctcctacccagtcggtcaccctgttcttgtggaggcggctcaccggttctcaactagtttgtcgtttttgggcagtctcgtgaatttgggaatcgtatttttattgtaactttttacttgagtgtttgttttggacgttctatagaccgtctcgaagcttgaaacgagctctacaatatggtgtatattttagagccaaaatataagttttattttaatgtatttatattatgggttgggtaggaaatcataggttgtcctttgcaactattaagcagtgttttggaataaaaacgtattggtttgtcattgttatgacataaggcccaagaatatcaattgttctctaagcaggtcggccaacatgcctaaaatagaacttgacgtaagaaaagtataatgcaccacatggcatgataggttctataattgtcaattgtctggtaaggcaatgacgatgtgatgacaccatggatataatatacgggctcaccttattacgtgatgtgttatacctggcggcatactttattaggtacgggtggcagtgacatatgagtaccgagcgtaagtacaggct

SEQ ID NO: 317075 - DNA, 1187 bp, Cannabis indica
tttttatgtggcaagtaattatttcaatcaatccattttatttaagatgagtcatacttgctaaaagtatgccacatagctagatgtgtttaaagtttatgtgtgatttatgtatacacatattaatgtgctttcttttctatgtctctctttgtgaggtgctagatgaccttttctagggcttatggcttgatttgctgctatttgattatatatgtgcgacttctttcggttgtttggcctagcatgtaagactgttgtccatgttaaattttgaatgaaattcatgccatttaccaaaaataaataaataaattgtcttagccagtataaggactaacttatatgtaaataagaatacttcatttctatagcactcactttctaaacctactaaagaaaaaacattcaaggctcatcattaggtattctgaattaagtattgaaaaattctaagttaccacttgtgacttggctatggatggtactacacaccttcccttggtcaatttttaatattgatttcactgtaaaatgctataagaaatttttgacaaagtcactgatttataagaggatacacacccaatttatagccggttaattttgtgattaaactcatatttcttattaatatatatattttctactttaaaatgttaaaagagcacttgtaatatatgttctaaatttaatatttctttaaaaatgaagaagatacaaattagcatactacaaatgttttacataaatttttagagcaataaataattgctctaaatttattttattagtttttatttttagttttaaattatttttttatatatgggtacgtgtgtatattaatattatatatatttataattaataaaatatattacaaagaaattgtaaagttgatgagtggaatgtaaaacgttattgtaaaatagataaaatataattttagtgatttattttaaaggataaagatgaacaagtgtttaaagtgtctaaaattcattatcggacaaagacagatctaatgcaattgtgagaataattttgattctatactttttcataattgtaggaattttccttggtgtgaatttccaagtttgccctacaccaactcaagaaacctgtcaaaacgacagggacaaaatcgtcccagaaaattcaatttaaacaattgactcaca

SEQ ID NO: 317076 - DNA, 1730 bp, Cannabis indica
ctaattagttagcttagtacttttaataagcttgacaattcactaaataaagcagcgttaaggtcagcaatctgctaattgtttggctttttatgaagacattataaaaatttcacagacacaaaaaacctttgattaataaagttgtttctcgacaaacactgagacaccaacatcataattaattagacagtaatcaaactcttaccattataatcaaaagacatcgaaaagaaagggttagaaaaaaatgtcattaattaattattttaagtgcattaattaatatatattgtaaatagagtactagtactgtcttaaataacaagacaataatatataataataatgcacagaatttccccacatctggaattcatcacacgtaactgatcatttacgtacaaatatcatttcgtataataattaattaattaaactaataatatgcattccattttttataattagttaacttatatatcttaattagtttcattaactcccttaacaaaaaaaaaggtttcaaattaatatttatgtgttgttgttaagaagaataaattgttatatatataactaattaatgaaattaactagaatcaaataatatgcctttcttttttgtttgcgtaaatagacgaagaaatagacttttccgaatgtttgcattttaattttaaaagagaggtataataaaatagaaattgtcaactagagattatatataggtagagaggtttggttatatattttgatttttgggttttattaattgatcgaaggcaggacgtgacaattttgattacgtgggtatgggtgacatgtgggtttcacatgagcaggaccaagggtagcacatgttaggggaacatattacacctgcctatctctttactcttaaacatcattttctccaatgccctctcaaaataattaatacacaattattaggataaaactttgtaaatgctactttattttggtatacttattagcttcttatatgtaaagtatttcaatgtaaaaaaatttatcactaaagatttgttgtcaaaaatcattcatttttattttaaatcaagtgttaagtttaataactaaatttatatatatctatacactaagttaatattagatgcaaatacattattgaaaatagagactaccaaatctgtattttttgatctacacaaaatataaaatgagtacacaaccaccccttttataaactacatagtagagattttctcattgttattgttattgttattaaagttttaaaccccaagccatgccaaggccaatgaaggtatcatatggctaccatatcatatttttttaaaatatgtgttagattaaacactagaatactatattaattcaataatctagaaacataattaatctattgagataattgagaaataatagagacaattggtagtgcaatattaactaagtcttctttgagatctctaaaatagaagtagattatcgcatcacaacatacaattgccatagaataatatgtatttacaaaattagaaagggaacctaacaacaaataacctagttggattgagtttttgtgtcaagcttaagtccatactatgtttcaactataaactttacatagatgctaaacctattaactatatagatcactaactagtggcggacctaagattagtgtaatttttttttgtaaacttaaaaagaaaaaaaaa

SEQ ID NO: 317077 - DNA, 716 bp, Cannabis indica
tatggtcaggatgtagatgaccatgatgctatcgaatcagcggtggatggagagaaagatagagagctcgttggtgaaaatgaaaaatcaactcgttggcgacatgtcaagaggtgctaagcaccactaatacccagtagcaatagtcttttaacatacatattcacaaggaagtccttcagtaaagcattaatttgtatgcagtaacattctctttatgttctctacctttttcttcttttaattgtattttgagtattagtattgtaacatttatttactcgtatataacataatatctctaacaattcaatatttgccttttaccaacaaaattcagctagctaaatcatacataaatcatttaatataaaagagatcatggatcatggaaatttataattacatacaaaagaaattatatgtagaaaaaatgtattcatattagaagtgaaaaattgtggtgtaatacatgtttaatggctacattacatatatatatatatcataataataaataaaattaaatgatgggagggggacgcctcattctatgtggccaagaataacatgttggttttctacaataagtttggcaattacataaacaaggagctttagactttatataccaacaattttgtctaaaactatctatttcttggttatacacttcaaataataatgaatttctagttttattattattattatta

SEQ ID NO: 317078 - DNA, 1463 bp, Cannabis indica
aatgaggtatctcttactaacctttgtttttcatcatctgaccactcccccttatttttactccctgaaattactgctggtattatgactactgctctctttcgttatgaaaatgcttggcaaagagagcccttgtgccaccaaatcgtgtcgaatgtctggtattctaacccgactgaaggtattatggggaaaattgcgatgtgtgctaagcatcttgctgattggggtcgaactactattgggaactttaaatcccgattgaagaaaagcaagaagcttcttgctcagtacaaaaattcagccaatgagtttgatgctgaaaacttcatggtggagaagattaactatttcgagattttagcgcaacaagaactctattggaaataacgctccaaacagttttggttacattcgggggacaaaaataataaatacttccatgctacggctagtgctcaaaaaagatcaaaccaaatccaccaattgcaagatgttcacggcaattggcagagttggaatacagagattgctacagtaataaatcaatattttgaaagtctctacaagtccatgggttctttttctcctcaaattattgataatgttagaagctctgttactatatctcacaatggagcccttttgcaaccgattcttgatgaagaagtaaaattggcagtgttctctatgcaccccgacaaagcccctgggcctgatggcatggggcctggcttcttccaacatcattgggatattgtcagttcggatgttactaatttggtgaagaatttctttgaaactgaggctctacctgaaggattaaatgataccaaccttgtcttgatccccaaaaagaaaaactttactatgatgagtgacttgaggccgatatctttgtgtaatgttctttacaagatcattttgaaagttttggctaatagaatgagggacttgattgactgtatcatctctgaaactcaaagcgcttttattccggaccatctcatttttgataatgttatggtcgcctttgaagttatgcactatctgaagcggaaaaaaagtggcaaaaaaggcttcatggctttaaaactcgacatgagtaaggcctatgatcgtgttgaatggagttttcttgcagctatgatggctcggatgggatttgctagaaaatggattaatctaatcatggcatgtatctcttcggttcggtacaaagttgttcataatggtcgtgtccttgatccaatttttccaacaagaggaattcgtcaaggtgaccccctctccacttatctgttcattatttgtgctgaaggcctctctgctctcattcagaaatttgaagctaacagacttattcaaggttgtaaagttgctcaacgtgcgcctcctttaactcatatgttcttcgctgacgacagttacttgtttagtcaagccacacaaggggctgctga

SEQ ID NO: 317079 - DNA, 961 bp, Cannabis indica
tttatttccttaaatagaatttatttttttaaataaaatatatttccttaaataaaaatattcttatatttgaccgaacacaaaagtaatggtggactcatcacttcttcaatgtgaaggggtactggtactctagctgccttcccaaggattttttttctttttttttttttttgtgccaacaaacttaaactttttccccaagtaagcagtttttgaatttcttgtagtgtttgttgaactcatagtaatactcattctttgtttgtgtcacacattatttgggttaaggtgaagtagtttgatgggcgccttcaacatcgcatagatggtggccttgtttccaaaaataaaggattcttggctatgtgatagtgcattcatatgaggcgttaggaatatggttgtggaagtttttttcttcttctgactttcaataatttcaaagtttctttatagtaattaatgtgcattttactttgatagttaatttatagtactttttttttgaaaagatttatagtactttcaaaagtaatatatatggatggttaaaaaaacgttcctttagtataaggacaaaagagtgtgtaccatagaaattttctataaacaactaaaagaaactcgaaattattattacaacaattaccaattaatgccttacaaaagaaaattactaattgatgtaaaaagaaaatctcagtaatattacaatgctgattctgattgacacaacataatagaacaatacgataagttaattttgtagtaaatgattgtgaatcctttgtcatgttaaataacaataataaaccaataaaagtctctctctcactgagtttaacaagacataccattcttattatagttcagaacataagaacatacaaaagagtaaataattgctagtaaagagaatatcaattctactaaaaaaaacatatttcatcactgtccc

SEQ ID NO: 317080 - DNA, 1357 bp, Cannabis indica
attgatatttaattgtgatcggattggattagaggttattttttaatatccaatcggatcgcacagaatgttggatagagtgtctaaacatctaatatatgtaacattcaatcgaactaattagtattttcatttaatttgaatgactaattagattttatattgttatacataaaatatatatataaaaattaacattaaaatttaatttttttttaattgtatagatccaatacatattgaacctataatattagagggatttgatccgatctaaataatattaggtgtataatattgaataaacccaaaataaattaataaatatatataaaatacatctgacggataaaatcgatctaatccaacatctaatgaatgttgaatcaattagataactgtaattaattggattagatcggatggtaaaatctaacacctaattcaaatttaaataagcttaaaaacattagatatgatccaatgaacatccattatggtacttttaaaaaaatataagattatggtaaattatagaatggaaaaaaaactgtatggcacacgtttgacgctcttcctttttccaacaaattttattcaactttaacagtcaaaccttttttttttctcccaaaaaaaagaaagaaaaaggtaatttttacttgtttgttaagtttccttaacattttcatttttcatttgcattcattttattaattttcttctattaaatttattggctaatgaaagaatttaatggagcctatatttagcatctataattttgtaagtgtcaagctaaataagaaagaatatgtcaagattatgagcataagtatttctttccctaaaaataaaaaacagttgttcatgatgattttataatgtatattatataattatcttcaaaatagctggaatccagctgctggatagtgggataggtaaacctttgttcctctctctaataaataaaaaagaatcatgggaaacatactttacttaaactaattatataatgaataagtttccattcattattttttttattattgaataaaaaattacttatacaacttgcttaatttagtatttcatggcatgcatccactcaaaaaaggaaatgaacgtacttcaaacaaaataaaataatgataataataaaataacaaattgaaaatgttgtaccaaaatttgggacaagttcaagacatatgttagtgttactatgccatttttaaatcttaaactaaaagtggcatttaattggaagaataaaaatataaaaataaaaataaaataaagatagaaataaaaaatgaatggaacaaaatttaaaatacataaaaaaattgat

SEQ ID NO: 317081 - DNA, 834 bp, Cannabis indica
gtatgtaaaaatactgaaaacaattcaaacttcagattattaaaagaacaacacattcaacccaatatttatttcgtatatacagttacacattcaattaaaatttcaacatcaagggaaaataaagaaaatcaagctcaatcaattaaacaaaattaaaataatttttacttattttgggttctaatcattttgcatggtttgctttctcctttctcggcaaccaaacaagtgtaattaggggtaaattttttaatactaccttaagacgatgacacaatgtaagaaaatcaacgacggaggatgtcgacgaagaattcgatgagccaatcgaggcatcggagtcctccaagcttgtcgattgcatgggccgaaacccatccggagtgggtttctgactacgaacacataccagccttggagtcggagcttcggtgaataaaccggttctgaaaaaggtccgattggaaaacgaaaaaggagagcgagtacggagacatcgactgaagtgagccgcagcacagtgactgggtgaattaaccgccattttcacagcaccaccaaacaccaacggcaatattttcttaccgaaagcgaattttggcttattgttttattatttagtcaacccgattaggtattttattcgtatttcccaactcggttcacttgtgtttcttaaacgacggtaacatttgtcgtttgggaatcaaaatgtataaaattcgaacctagcattaacgatgcgattggtttggtgaatgaaatgtagttgaaggcaaaacaatcaatttttatttgactttttttagttttaacccaaaaaaaaaataa

SEQ ID NO: 317082 - DNA, 798 bp, Cannabis indica
ttaatctataagacactatatttttggtttcttgtacaatttttattgctgtactcgagaaattgttgaagatgcatttattcctattactccataagttgtatatcatgactgccattatcaaagtatgtatcttgtgctacttatccttcttattctgtaacagccagtgtttctatctgtgaaaaccagttggccaagtcctaagccccaaccaattacacacctgctcaatgacctgctgagagagacatcagtcaaaaaacaaatgagagttactctctactgctgcatcacacaccggacagaggatgctgtcaagggtaacctgaaactgagcaaacttgtcccgagttaaaagctaggaattgattgcttgccaaaaaatgaatctatgattcggcatgtttaaggagctccaaacacacttgctgaaatcaaactgaatttggggaagattgatgttgtataacatgttagctttgaagtgcttcacaccagcccctgccttaacaatatcaacccgagtgaacttgtcccttatgtgacaaagtttcctccaataccaactagtatcattcgtattattactatataatcaaatagtcaatgattacaaaacctgtcatgtcatgtggtacattatacttttcttacctcaagttctggttcaggtatgttggtcggcctgcttggagaacgatcaattatcacgggtccgatgtgataataatggtaaactaataagtgtttatcctaaaacactacttagcagttgcaaaggacaacctagggttt

SEQ ID NO: 317083 - DNA, 1837 bp, Cannabis indica
caatacaaaataaaaagaaaatggtaagaaaaactcctatacattcgctttgttttaacgttgttaactcgactgcatgccgtgctcataagatcttcacatcgggtcttctaacaaagactcattctttatgtatttatcaatagaatctaacacattatacttaattactacaccatcaaattctattttaagtatccatgctttcatatccaacttctttgtagtgagtaagaaggtctcccaaatagagttgatgtaggattgggattactctcatcttccatctcaattatgtaagaatcacttggagtgaaaagtccattagtctgtataaaaatatcttcaactatccctaagggataagaattagtctgattagtattgaatcaaaatttgagttttcttaacgagctagatttaaagaagcaaaattggaataagacatattattaataattgctcataaatttatcatgcaataatcaaacctggtttgcattgaattgtacttgtcttaggtaacaactttctttggagaacaacgaaaacattctctcccacacttattttctcacctccattcaactttatctcatttggatacaactccttaagaatgttagtacaatgaggctcttctttgatttcctcaagacatggaatttctacctcgattttgggaagagctttaggaatctccttgatgggctcctctttcttagattttttcaatctacttggaaaaggtagaggagtgacataagtttgtacaattagtttgtatggctttttcagtgatggtagaccaactaaagtaggagattcaacttttgatggagatgatatttcttcaagggatgaattgttgactgctttagttggaattaacttgtgcacttcttgatgtggtggtaattcaagttgtgtgccactttggatagtgatgacattgacattctctattgggttatctccacttgtgaaggcatagagtttgacacaataaatttactaatatttatttctaatacctctaattattttagtacaattataagtaagggtcggttccacaatgattatgtttatttaagtattcaaaaattagtgacaaaaagttaaaaaaaaagggagtttttatgcttagaagaaaatagtataaataaaaatagaaacaaattaaaagtgagactacaatatgagaaattagttaaaagttactcgccaccttaaaaaatcattcttaattccttttaatgaatgtaatttcaatttttaatcaaactattactcccgcaaataaagctgaataattaactcttttacctcagcagtaaatccactaagtatacaatgtatttatagagatagattaatctaggcaatatattaatgaagcatataatttatttaacttaggttctattcttcatcataattaaaatacttttgacaatattaaaaattgtaatttatcacaaacacttagaatcctagactattaggtgaatagtaatcatatgatgacggtagattaaagtaaaacctaatttagcggccgtttaaacaagattaaaacaataatcataacagtgaacatagaagaaaagaaacaatttgatatataatagaaattaaaaattaacattcaataatgaaattaataattcatgtctcgggttttgaaataacccttaactaaagaaactactcagtactagatattataacaataatcataataaatagtaagagtttaaagagaagaaaagaaacctatgatgaagaacactgtgaagccgcgatctctgtctcttctttgctctctctctct

SEQ ID NO: 317084 - DNA, 1559 bp, Cannabis indica
ataatttggattacattgaaatagaattttatttagggcataaaacacaacaccctctatctcttctttgggtcgagtttcacccgcaaagaagaagaaacaaaattactatcatcctagagggtccttccggaggtgactaatctcctgaagctcctacaaattattaagctccggatgcgattaatataacacgttccgtatggccacgtattttgagaaactgccacatggctaattcctaaagtgccacgtattttgagaaaatcccaagcaataagtactaaatttgtcgcttttattctagattatatatatacatatatgtattcaaagtattaatcatcaagcatcatgttaatgaaattctaagttaacaattttatcacttacactttgacttcattagcatttaaccccgaaaatttaaattttggccgtaatatccccaaaactcatttttttgttagcgattagctgtttctatccaaaattctctgttaaatgccatatttgactatctacgtgtacactcttgtacacgtgtcaaatttactttggtccatctaaaatacttatttcaaaaaataaataaataattattaaacataaaaaataaagtaataaataattattaaaagaaaaattatcagattgtcaccttcgctatctccctcaccttctctcctctcgcccttttcactctcgcttgctttatgctctagacacgacgtcagtcttcccatcaccagcgtacgacatgcactgcacgaagagaacgaccaccctctgaaacctccacctgtgcaagccttgcctgactcgagtcgacaacgaggcgaatggttcaatcaaagtcgtggctcgcaaaacctttaatccattttccagcgtgattctggcaccgtttggatagtggatggtacggttgagctcgtgaggtctaggagaacaaaacccctgaatggatcgggcttgaagatcgtcagaattgggtgttgacgttcgtcggcatccatggagtttcgagatgttggtggcttcaagacctcctctcgactaacagtctccaatttttattctccattgcatgggcttcccgatcccatggttcactacccctttcatcactattgaacttgggcaaccaccttgcctgtggttcaatggcgatgcttcattttgagtatccagaattcattctaaactttgaaattattattaggcaatccaaatttgaatatggaaaatataatgatggtgcttgtaatgagggtggttcggtggcgatagtgagggtggttcggtggtgatcatgtagtggttgtgctgccacaggagaaagtgaaagagaagaagttgagtgaaagtaaactctttttataatttaaaataacattttttaaagttaatttaatttttaatttttaaacaataatattataaagaccaatgtaattttgacacttgtacatgtacaagagtgtacatgtggatagcccaacattacatttattaagaaaacttagatgaaaacatgtttgacattattactaaaa

SEQ ID NO: 317085 - DNA, 1045 bp, Cannabis indica
tttgtttttttttatttttaaaaatgtcatatttagtgtaattaagtatttataccatctatatcaaaagttacttcattttctcatattttttttaaatagcccaactaaatattctgtagtgggctgagtaaaacgatgtcaatatgggaaaataaaggaatttatacaaaaatactggattcttggataaagtttacagttttactgccacacaaaatcttttacaaaaatacaatctttttataaaataacgtaaaacaactgtaaaacaacaattaaaaataagagtttaacaactaaaaacaattgtaaaacaacattaaaaacttaacactaaagacaatatgaaacttacacagtatttttgaaaaaaaatacaatatttttgaaaaaaattccacccatagtataaaagtaaaaaaattagaaatttcagtatgttatataattattccgaaataaatgcctcaaaagccataaaataacttctttttcttttcttttaggaaagtcatatttctgcacatatctaaaataaaccatcatttttggtaaatttgtacatttttatcgttcaaagttttttttttatatatatttttacagtattctattaaataacaaaaaaattacatgaaattgacaagaaaacaaaaataaaacaacataaaaataatatataaataacaaaaattaatgacaagagtacactataaaactatattaaatgactatattttatgtaaataaaattttaaaaactataataatgtttaaagttctgtaagattgtatttttataatttttgattgtttttcatgtttttatgaaattatctcaataataaaagatgtaatttctacaaaaataaacaatgtagaatgaggttaaatgagcctagaaaagggaataactcaaaggaagaaattacattatatacttattttattttacatgttttaatttttactttcatttttatatatttaagatatatatctatttattatagatgatgtctctatgataccccttaaatta

SEQ ID NO: 317086 - DNA, 2100 bp, Cannabis indica
ataatataacaattttagagttttttattttttaattaatatatatataaaatgtaataaaaaataaaaatatatataatatattaaatatgcgggtttgcgggctggttcggttcaacccgaaacccggtactcctaaaaactcaacatgcgaacccgcccgaagggtactgggttgaacccgacctgcccgaacatttttttaaaaaaaaaatgctggttcaccggttcgggttcgggcgggttgctcgggttcggatcgaacccgctcaaaatgttcagtcctaaccacaaatagattatcattatccgaaagccaaaggtccctagctaaggatatcgatactcatccctaaaccaacaaccatatgacctccttttcgaataagagattgggcttcgtaaataatattccagataaaacttggagaattcccaactctaaataaagaactatgtgatgggggccacattcctgtccacattcctgtccacataccctaaaatcccaatcaatggagttcaaataaagaagttgtcatagaaaaagaataagattgttataaggagttacacatatgtatggtacaagtcctttaaccaaaatccatacaaaaatacctcttacctgtaaaaacaacgtgcatatagaaacgcttccagttttggcctggtgatgtctccaaattgaattcatgaggtaatttactctcgttgtggtctagttcctctttgggatagtattaaaatcaagaaaatagtagatataaccactgctgattattgtgagggtcttaggcaccaaaatggtaccaagaactactagaacaaatttcatcacaaatagaaagtcgttcgtagtcttggcacttttttaggtctttctccaaatggttcaagctaaccagttgcttactaacaccaaggaactgctcaatctttttgatattatttttctcggtcatcataacaggttcacccccgttctttatacccattacttgtccaaatacatccggcgttattggaatttgtcgtccatatatgtttagagttgatgcggtggtgtccacattcccaataatccattgaaataaataatgtttgacgtatggaccatcatcccttatgcaagatttgtaatcggtaacaattatggcctccttttgctcaggcataaaatgcttacaaattctaaaaagtcgatcaaaggcgcaccttccatgtactttcaatccattctccacctcttcttgttccccatcactgttgtgctccactgttttctctttctctgcatcggttcttcttttctttgatgttcaccaaccttagtcttttttgcttctaattatttatgcttcttctccttttcaattcattgcttttgtctctagtgtatgatcattttttaagataatactttgcaatatgtgattattttcttattaataacatttcaatgattgttacctacataacgaataatatattttacaaaacaaagattgtacataatgtgagatatgcatactcactatattacctatatagtactaagattatttttgatggagatggcaagctttggaatgtcaaaatatattggtatgtatcaaaaatagatttcaattacccaaataataaatttatcatgaatttgtatgcaccaatcttaacgtgtattattattgtaggatttttaccaaattgtcctacactaacaagaattttaatatcagtatcaaaggtcaaaattgacctttcctagtctaattaattccttagactaaaacgacaccgtttatccaacacgacaccaaaacctgtgtcgtttggatcccagagtttaaagactctaaagaagggtctagaaaccctaacactcaaacactcagcctcacaatctcacaagtcgaaaccctagcagagcaagttctcttcaagaacttgctcgattccaagcctgaaacccagaatcaaaaccaaaacacacatagatttaggtttagcaaaatgaaaaacaaagtaagggagagaaaacaccagggaatttgtttcagagttcacccaaaagttgggctacgtctctgtcaagct

SEQ ID NO: 317087 - DNA, 1021 bp, Cannabis indica
gcatcataggtgcactctaatatctgagccacacacttttgctgtgaacaaacttagtttctaaaatgtcctaccaatgtccattggaatgcaaccaaacatgttctaaggtatctcaagggcacgatgcagcatggtatacacatatcaccaagtggcatgctctctcttataggatcactgatgccgactgggcatgtttcccagatgactgaagatccatagctagttactgtgttttcttgggagattcactcatttcatggtcctccaagaaataaacagtggtagcacgatccagtaccgaatctgaatacaaggccttggctcacttagctactgaaatcacttggattcaagagctactcaaagaaataaggtttaaactgccagcacctcctgtcatttggtgtgacaacatgagtgcaagtgcacttgttgctaatccaatttatcatgccagaaccaagaatattgaactggatattcattttgtcagagataaggttccacaaaaatagctggaagttcgatatatactgtctcatgatcaagttgcagactgtctgactaagggtctttcacacactcggtttcagttcttagtcgacaagcttggagtgattgcatcaccctcgcgcttgaggggtggtgttacagaatgaaatactcaggggtagtttagtcatggtctattatgaggtatctccaaagttgttggaataatttattcctgaggtaacaaacccagctgtacaaccaataccgttaggcctgattgtgggaagattctttttgctctgtaatgattgtaacacgtgtgaggctaagattgtgtcactatattactcattgtattcccctgcttctataaatgaaatgctcactatcagactcaaattgagctgatcaattaaattcattttgccctgaaatttaaactctccttctatagtgattcaaactctccttcattgttcttcatccaatttgagcctgtagtgatagagtgtcatgccca

SEQ ID NO: 317088 - DNA, 859 bp, Cannabis indica
aaaaatatatattttaataaatattaaaaaaaataaataatttaaaataattgatgcaatcgatagttttacagattctattaaatttgagttattatacaaatttaatttggattcggaatataaaattgaaacttaattaaattagatgatatctcaaatctaacttaaagaataacatttcaaaatttgtgaacgtacgtgtttgataaataagaggcaaaaataaaaaagtataatttaattatgaccgtccgcaatgtgtataataaaaaatatatattaatattattatacggtccgttaaagataagcttcatatatgtaatgaacacctgcctaattttttattatatgctatatacgcatatgatattttatgatttaatattttgatacgattttggttaagtctcatgtttagccgacaaggcgatcttcatataaaattatacatgtgtggagcatctgtaagtgctaaaacaatgatgtagtgttatattttagcatttttaagaaaattacttctttaataatgtgttaaattttgaagaaatactaaaacatactagtagtatttgatattttttaatgtataatattgttattcgtataattaagaattggtctttatataatttaatgtatttaatttttatagaatatcactaactaactataatgcatcatcttattaggcattattagtgccttatagcaatactctaaattttataatatattttaaatatgctaaaagagcattgttacgggacaccaaggtatttagcaccactgtgaggtggtgccgctttataattagttagcgataaactataatttttattaatataaaata

SEQ ID NO: 317089 - DNA, 531 bp, Cannabis indica
atctttagttgaattacatcaaatttgtcctcgtagaaaaagtataattagtatttctgttcgttaaattttttacactattaatgtgccacttattatataggacttgtaaatataatatataatatttctcaaaaatataacttttacaacaaagttaatttttataaaataagtgatatagtggatgattatttgaatgttttcaaataatagtagtgattttggaatcaatgcaaattttagagggtgtaaaactttagtttattttctaattattggccaattgtaagcatgaaaattaaatttcttttttatttttttgttttttcgtcaaacaatttataaatttggcggatgattatttaactcgttcttctaatttcaattctaatcgtgtctccaacaataaaaaaatgtcccatttgaattacaagttattatgttaactaattttaataaaagggattatttcacaaatacacaaaaataaaaaaaaattataaaaatacgattttacggaattttaaa

SEQ ID NO: 317090 - DNA, 1194 bp, Cannabis indica
aaatcatacttgtaaaaccatatcaaaatcaatagaatttctccattttaagagagaattttgagtttatatttcatcttaatttctatctcatttctgaatttgaagcataagttgattttttggccaaaaggttgttgacgagttctcaccgtcaataataaggtattgtgattctatgtccagggactttagtggtatctattactattgtaggagataatggaatatatacaggatcaagagcaaaaatatattttgctagtttggtagtcatgaaattgtccacccttaatctactcagaaaaagtattttaatatttgagggatttgagtagaatgttatagctatgtctaatcaaaatatgtgtgttatagatattctgtggtgttttgaatataatctagagtctattataaaagatctttaaaatgcatatatcaattacttttccacccagatcgcaaggtctgttattaaaaaaaatcattataattgcttaaggattgacaattatgcatatacactatttttatggttcaagtgtttatgtggtattacctctttgtagagattatcttgttaaaaaatattaacaagatgtataccgtagatgttgtatctacaataaatataaaacacataataataagataaataattttggtattggcgtaggtgtatatgttagataatataaatcacaattctataaaagtaactcataatgaaatccttttaaaagagaaaaaaattaaattaattctctaaaaaatgtcataataattgtttttaatgacttgaaaaaggaaatagaattttcaaactaaattgtaattaaattgtctaaaaaataaaacaattaatgaaatttaaagttttgagctttgtcttctatcttggacatttttcacctttttgtccaactattcatttgaactctctaagattataatccaagtttaagcagctggatctaaaataagaagaacatatacatggttagtaggtctagaattaataacctaaagggataataattctctaaaatacatgaattctcaacaattaaattagaaataccttgattctttgccaaaaacataggacattagggtgtccagtggtccttttcattgcaaaagaagcattttccttttcccttcgcttttgaattagcagccttttaccct

SEQ ID NO: 317091 - DNA, 1006 bp, Cannabis indica
aagaggcttgtttttgttgttggtccacttctttttcttgttggtttttgaagtagaagcaatatttgtctcaactttggtcgtaccattagtagtattaggagaattaggagcttttttacctcctttctacaggccttgaatcaaactctcaaatgtctgaaggttattatcagcttgtgaaagtcaaaagttaacttgttcataacatagtttgaagtaaagggtagaaaagctagagataaactattgagaatcaaactcacttgagtttcttgatctataatagctccatagatctcagcttcttagaaataactagccatctagagtaggtgatcacggacattttgatttggtttcatccgtgcattgatgaagttctttattgcatcaaaatgagcttgatcctatgcctttccaaaaatttgagttagctgattcatgatctcaacagccattttcaaggtatcaaccatgctagaaagtataaagaaacgagctttgttgttaggattctgccaatgctcatatctatctcttactatcttgtttgcattctcacgtggttactcaggctcttcttcagttagcacaaacaaagagttttcacctgtgagagtaatattaatgttctctttccacttgatgaagttagctctagagagcttgttgtcaaataatagtgtcacaattggattgtttaaagtcatttgtggaaactacaattatcaatagatagaagtcaatcttaggtttaataaaaattcatacacatctttggaaatttttaaacatttagcaagtaatgaagatatgagaaaaatacaaaataaacatatattaaatattttctaaggttttcaactagatgatatgagtgtcccactaggcaagagtcaaagatatcattagttgaatagaattgtcagctcatccaaaatagatgtcattttagcaatttctattcaatcaaaataagaatccaatgttgtcccggtaggcg

SEQ ID NO: 317092 - DNA, 1249 bp, Cannabis indica
agacttagttgatagtattgcactatcaaataatggtaattactatggatcaatcatgtacgtatatctaattattatatattattattgtgttctatattatatacaaattgatcttgaatttattatcaatttttctaacatgtggtatcagatagccaaattgtatataatttaagacctataatttatttaacgattgattgatatatgttaattttctccaattacatattaatttcgttattattttttgatgaattttttcgttttttaatctttaaattttaggagttttatttatcatgaaattctcttttaattgatattttatttaactaaaattgttgagtaagttggaataattttgtgattaaacttttagggttagtgtgttttaatgataaaattaaatttaaattttttgattataattataattggctgaaattgattatgaataaatgattctacattgttttataatgtggctacatatttctattaccgatttagtcaaaaattagtagatttaatgattttttttttgtttgaaatttttggattaaattactagatctactattgttttggatgttttacctgaatttaatccatgggtagattagattttcaaaattgatcaaagcccctcctatttctgatgatttggcgttgcttttagccagtttttgtctttgactcgactggagaaaaccgagttgcgtgaccctgttttagacccggtccaaggtaggagatgaccctccccagcgaagcccagtctcgacatcggtgcgtgggggcgcgtgcggcagttctaggagtcattttttgacgtttcttttttttttttcagcgtgcttagaatttaatttttgatttttttttatgatttttaattaatttttttgacttcgtttaataattattattaatttaatggtaattatacagttaaaaaattattaaaaatatttttgatgagttttcaaaattcataaatcatagataaaattttgagtttcttctcatcttgttagacatagtcactctcttatttaatttatcttgactatgtaatttctaccaatattctttctttcacatcttttcattatttgttgttctaaaattataaaacttgattgtttaatgcaaaaataatgtgttatagtgtacaccttattttttattatcgatatattataaacaattgataaatctccttttgaaaatttggctaatt

SEQ ID NO: 317093 - DNA, 734 bp, Cannabis indica
aaaataatttccaacaaaaggtctaacaacggtaataaacaaggtaatgtaaagaaagacaagttcactagcgacaccgaacatcatcctagagagaacgctgtcctaatatatgatatagaaacaatctatgcaaccacctagtgtatggtgtcatacaagaaaccctctctcatgaagaaggacataagtaaaagagataaaactaagttgtgtcattttcatacatattacaaccatgacacaaatgaatgtaacaattttaagtgggagattgaattcttgatccaaaaaaaataaaccgcacttacaaaataactagaaccaactgatgcctccaccagttgatgggcatctgtaggtaatcattgagggcccgcacctcacttaagacttgggcaaagctagagaaaagtatgctcgagccttgcagcatgaacaaaatgatacaaatcttgcagtagaggaaaggaaacctaaaataccacacgtaggggaaccaataataacattctccaaggcacatgctagccatgttatcttcccacaaaacgaccctttggtcattgaaatacagattgcaaacatgatagttgcacagagtatgatggacaatggaacttcctcaaatattttattccacatatttaatacaaacgaacattacaaaaatcgtgttatatctgtttagatcgcgtatttgataattctgagctctgtttttataatactat

SEQ ID NO: 317094 - DNA, 1124 bp, Cannabis indica
gatattggcaattgcagatgcagcatgagcaatgtgggcagtagctggtgtttaagggtgatttgctgtgagagtcagatctggacgaaatttatgttgtgtattgtggtaattctgccagtaattcaatgcaaaaaaaagcaagatccttggctgttttagctctatttccgtgaacaattttgtttctctcagtccaaattgaccacatgacacaaaaaatcttttccatctcaagttttgagaatattgcagccaagtgaaccatataatcgcctttgcgcattgtcatggagttgttccagtcaagagtaaaattagagtgcctccaaaccaatttagcatacttacaaacaaagagggcatgtccaatggattcccaagcttgatgacatattgaacaggtggaatccgtgattacctttcttttaacaagggctgtagcaacaggaaaggcatcattgtagacccgccaaatgatgatcttgattttctgaggcaaattcagcgaccataggaatttccaccatgaagcagttgatgaagagcacgagctgttgtcactatcttcaagagaggcagccaaatggtaccctgcttgaactgtgtatgcacccgaatagttgtgatgccagataaggatgtcatctttacggaaaaaactcaaaggaatggttacaattcgatcaacatcaggtggtgagaaccattgattgagtaaggtcatgtccgattgtctttctgctgtaatgagatttgaaacaacagcatcggtaggcccagaaaaatgatagggactgaaacttgagtgacctggtatccaagggtcattagcacaactaattctacaaccttcaccaattttccaccacagaccagccagtaaaagagctcgaccccaatggattgcttgccatgttaaacaaggggagtggccaagtgaagcttcaaggaaggtggaaggtgttgtttggataatatcgactttttaagagccttgcaagtagagagtcgggttgttgaagaagtctccaagcttgtttagcgagcatagcttgattaaaatgtacaaaagaatgaaaacccataccaccattttctttcctttgacataaaagtttcca

SEQ ID NO: 317095 - DNA, 817 bp, Cannabis indica
aaacaaaacaaaaacaaaaaaaaaaaaaaataagcaagtaaataagagaaaaagtaatataaaaaaacaaaaagcagtgttagaaaattagtagaatgaaaaccgtatatcgtatataagtatatgttcaaaaccagtgtatttcaataaataaaagtagtattctaaatataattaaacagtcattgtaaataaaatctacaaaatgttttaaattgtaaacatctttttcagttcatttgcaaataattcataaaccaattaatgaaatttaattaggttatctagaaatattacttaacaactgaatatattcagccttatatttctatatattcataaattaaacaaagaaatttaggtaaactagaaatgttacttatcaatatatgtagtatgcttaattaaaatattagatgcaatattagcccgaattttgtctcaccaaacactcaacacatcccattgaatgtaatattccaataaaattgtttatgtttattttatagaataaatcaaatttgattacctacattattcacacacacaaaaaaaaaaaagaaaagaaaaaattgattacaactcaacactttggatgatgcaaccattgcgagagagaccctccaacaccgcatcccataacattttatttccgatgtaaaaataaaattttactatcaatatttaacaataaatataaataaatataaaggactttttgattacactttgttaatgttttggcctttctttagttttgtgggaatttttatttttataatttttaaggtacaagtttataaaaatatgattttat

SEQ ID NO: 317096 - DNA, 457 bp, Cannabis indica
agaaattaaaatattaaaattaaaataaaataataaaactaagggagagagacttttggctctgcgcggaagaaaatatgtctgaaacaaggtcgcgaaagatccgggctggcggaaattggagagaatttgttagggttcgtttcgttcgggctcttttctaacccatctcataaaaaaataaaactatatatgattttacgaaaatacccttcaccaatcgtcttgcctttgctgtacacttgtcttacatgcagctttttcgtcactgacgtggctcttttgtttttattttattatttttggaaaataattgtgtcgaaatcatttgtgcgttatttctttgtattttagttcattagttaattattattagtgttagaggcgtttggttgggaggaatgaaaatataggaataggaatgggaatgggaatgagaataggaatggaatggaat

SEQ ID NO: 317097 - DNA, 1102 bp, Cannabis indica
aaaaaagattagaagctcataactaccattgggccctatcgggccttcatccctatccttggaaccaatcattatatcagactagagtttttagcggctaaaccctcccaattgttgtttcacttgcatttaacccttcaagcttaatttttggtgttaaaactctttaaactactgaactggtgccaaatttaaagtgttatccggttaactgtcactatggactgcttatgtgtatactattgtacacatgacatgtttatattggtacacttaaaattattatttaagaaatatttttaaaattataaaaataaaaaataaaatattaaaaagtaaaaaaatattataaattttgaaataattgtatttttttaaataataatatcaggtatactaatataaatgtagcacatatacaaaaatacacataaataatttatattggcagttgtggaaagtgaatgagaccttaaatttgttagcaatttagtagttggagggttgtaccatcaagatttgagtttagagtgttaagtacaagtagagtaatagttgagaagattttgccgcaaaaaactctatcggactatcattcgggccctatcggtctatatgaaaaaaatcattgaaactagaaaaaatacagtattcgcacacaataactatttcaacacacaaaacaacaaaataacaacaacccacaaatcattcatgaaaataacatttcaaattaaatataagaaccaataataataaaaaaaataacttacccatgattgtttcctaagttcgttcggtaccaaaatatggagtcttacaccaaacttcctaacttgtactagtttgtagtagcttaaagaggttaattgtatactaacaataaaattttagagtgaattggttagtgaatatgagagaaaataaagtttcgagagaagagagaatgagagaaagagagcaactgagagaaatagagacgtgtataggggcattttgggaaaaaggaaaatgttgaccttttcggccaatattttaatttttttttttttttgacaatgaactttcattgaaaacactcaaaagtttatacatagagaaa

SEQ ID NO: 317098 - DNA, 490 bp, Cannabis indica
aaaattcaaaatttgtggaaaaaataaaaaaaaaattgacatttttgggtgtggctgccaagaaggctgcatgtgcagccctcgagaggctgccagcagcgctcatgcgcgcgcaagaaggagatttgtagggtctcacgtcgagaattctcagtacctgcagcctgggacacgggcgaagtgaagggtcacgtgggtgagcatcagcatgctcaaacaagttttgtcctaggcacgtgcgcgcacatcaccttgtctgagtgactagtgtgcgtgcgattgagcctatgtgcacccgaatttcaaaccatgatatctttctcaattttaatcggaattgagttctgtaaaaaccaaaatttcttaatttttctcaaggaatccaaaaaaaaaatattttcagaatgaaaataaaactaatttcatgaaaaatattcgtaattcacatacattcatcaaataacacgtaaaccaatatgaacacatccaa

SEQ ID NO: 317099 - DNA, 488 bp, Cannabis indica
tagggaataaaacccaacaccttcgtgatctatcaactagtctttcttaaagtggctctctgacgagatcctggcctcctacaccgattctttggttaaaccgccttatcagatcactagcctctctaatgcggcgatctaactttgccttgcgtgatcaaaggatgtactgttagtcatccatccatctcagaaatttgccactctacagagtgaatgcatcacaattaacaacacatggttcttcaaggaattcgtgttttactgagcgaatacatcacaatgagcagcacgtggttcttcaattaggccagcttcgcagaccgcctctcgatttcgggctaacttgagatcttctcctaagtccacgtagggcttaccaattcctagtcttatctctcctgcatagtaccagggacaaaacccagttgttgttcttggggggtacccccccaaagattctgttggaatttattttaccaggatct

SEQ ID NO: 317100 - DNA, 836 bp, Cannabis indica
aaattatgttgtgactaaaatattgtcactaaaagtaacagttttttgtagtgcgaagtataatgtcttgaataacaatgtttttagattaagaaatgttaagggcatatagtgatttagtacgaccacctaaaaatgacatgttactattgttgtagacttgtagtttaatatttggcctcatatattttaatttaacaataattaatataaaaaattaataaccactctcatgagatgtcaccttacaataatattaaacacaatttatatttaataggaatgtcatttaaaattagtctatttaattaatttactattcaactattaaatcgtgttgttgattttttgactttttgcccgttaattttttttactaaactatttatagtgttgaaatatatgaattttattaagttttatctcacgtggctaacaaaaatagtgatgtggttgatgtgttattgtcatatcaatgctatatggatctttaccatttcttttgaaataaacttagggaagactaaagctctggaattttcctaggggattctcccttctcgtctggttcaatctccagtttacaattctagttttaacttctagtctgattccctcctcttttctctttcgtttcccccttttcttttcccctgcattaattgcttatgctctctcatcatttccttaccatcctatctaccatttattattgttcagagcgacaaagaggatcttttggatttgcatttaattttggctgctaatcctcttttatcgagtttcttttctctgcaggctctattctttggctgttattaaccctgaaatcccat

SEQ ID NO: 317101 - DNA, 881 bp, Cannabis indica
taaaaagtgggataaaaacttttaatcccacttttacatttataggtagcatcagaccaccatcggatcttcgtctttaacctttactcactttaacaacaaaagactcgagcaggcaaaaaaaccagttttctacctaaaactcatattcgactgttttcaaccctacatttaacattaattcacaaatatcaggcattaatcatacaatttacttctacgacaatattgttgatagagaagtcgtggttgatggagaagtcgttaggtccgtgtgtcgttaggttcacggtggtcattgggtccacaggttgttgagtctgtagtcacggtggtcatggagagaagtgaccgagattgtgggtggtgggttgtgggtcgagtccttggggtgaattcagaaagcgagagagagaaggggagaaaagagagagtcaggtgtttgaaacgagaggtagaattaagttttataaatgttaacctattctactgatgtaggttaacttaagtttagaaaaataattttaatctaataaatacatagaaagttaaatttctctttgtaaattgtaagttgcaattaatcaaacttaaaacatttctagaaggtgcatcatagaattttcacatcactccacttaaaagatacacaaaatgttacaccaaattagcgtacatcaaatttcacattatagatagtgttgaatttaaattcaaaccaaattggtgcataacttttttttttgttttcattttaacgtctatttttatttgttgaaaaaataatcataaattatttgttgacaactatatacataattatatcataaattagttatattattgattattaatgtaaataatataaaatgtaagatttt

SEQ ID NO: 317102 - DNA, 959 bp, Cannabis indica
ttaatcacataatcttgattactttccactatgctgacgacacaataaacaagaatattaatgtgataagggtttagatgaatttataacttaaataaacatataaatgataacatgaaccaaatgacacattaaataagtgatgaaaatacttctgtctctttattgatatttaaataatagagattacattgaaatagagttttatttagggcataaaacccaacagttgattgtccggtttgtggagctgcaactgagacaaaccaacacctatttttcgagtgcaatctctctcaaaaaattaatgaacaaatcgggttgtggctgggaaaaaaggcttgaccgaataagtttcaaaactggaagtgttggctggagcaagacagaaggaacaaattgcacaagattcatatggtgatcattgctgctgtggtctacaacatatggatcaatagaaacaattatatctttagtgaatattcttggctggtttctaagattgtgcaggaaattaaaaaagcttctttgtacaggttgaatatagcaaaaaagaggaaattagaaacttgagagaatgtatatagagcaattatgttgtaaataaggggttcaggtatgctaagcttatttttgttgcttagtttttgttgtaattgcttgtgattattgaagattgttccttcttgataattttttttttaaattcttaatcaaaagattaaaattaaaaataattttataaaacataattttaaaaaataattttacttttccaattttaaaaactaaaaactaattaaaaaaatattacaaaaaacactatacttttagattatacttgttacttttagattaattaaatccttttgaaaaagaataattatcttttttaccccttgtacttatgacactatactattatgccccttaatctattcagcttgttacaaatagtc

SEQ ID NO: 317103 - DNA, 461 bp, Cannabis indica
aaaaattttagagctaccctgatggaacgtgtcgattggtgaaatggtaaatacttttgccggtgcaaatgaatgtgcccgcaaaagcttcacctacttttacgcacacatttttttcactgcgagggaatttgattgccttttttaacacttaaataacaataattacctttttctggaaaacctacatgcgctggtaaaaggtaattcgaaccgccaaaaatttccacatttttgcagttcgattgccaacatttgtcggtgaagttaaggttcttcgccggcacaactcactattaccggcaagaagaggcaccggcaaaacattcgactggatccaatttgttgacctcttttgtcagcgcagttgttgacttgcgccggcaaaagggaacattcttgtagtgagtcattgctgagtgaaaattcataaataaaatatagtctaattttagaattat

SEQ ID NO: 317104 - DNA, 1507 bp, Cannabis indica
acctaattaatatattaggatttggcctaatatatatagctcatacaaaagggaagtggtgttagaaagtccaacattgttaataaagataatagaatatataagaaaaatgagctactcttcccagatttgaaatggaaccccattcatcttatcccattctaacaaggaggaatatatatgtagtacgaaccctattaattaaggtttaatatataagaaaatacatgattattgattaatttattagatcatgatgatgagtttgaaaacaaaaccaatccaatcaaacttattaaataccaatagctcatcatcagaatcgaaatggcgtccaaatacttataggcttttcaattttatgccttcatgattacataaatacttatcttaattgtcactaaaaaattattagttataaaaatctcaatttattataattattaaatggttaattaatatttttatttcttaaattttgacatatactaaattatgtcttctaaacttttcaactaaaaatttattagttataaaaatctcaatttattataattagtaaatggttaattaatatttttacttctcgaattttgacacgtactaaactatgtcttctaaattttttaaaccgaattttttttcttaaactattgaaattgttggattcaaagagttttatctaattttattaacggagcttgatgtaaataaaaatttaaggtgcacgatttaatacttgttaaagttcagggagtacaattcggtagatattaaagtttgggaggcacaacttgtacatggacaatcgttgtattaataaaattaaataaaatttgacaaaagttcttgaatctaataatctcattagttcagagagaatttttaacaatctaaaatgtttgaagacataatttaatacatgtcaaagttcaaaatgagataaaaattctaattaacctaactatatattttttttttttgacaactaaatatatttttagttacaaacaaattttataattaaaagtgatagttgccactaaaattgtattcactagagtaaaaattggaaaagaaatggttagatagagaaaagtgagagagaatgaaaaaatatgtgtgtaattagtagaaaggaaagataatttttttttttatttttttttatatatattaaattgccaaaccatcaaattaaattagaaatatataatattaatgaagaaaacttttgccacgtcactatatataattaaggtgctatatgacggtgtatacataatatttgatattttcatttaatcatataagtggcaaacaatgcacaacatactcatgtttgctatataattaattcatctctaaaatataataaaatatatgtagttatatatatagagagagctttataaattataaaccccatttatatgagtagaacaaatacttaattacaagctattggtatattttcttgatcgattagtattattattattattat

SEQ ID NO: 317105 - DNA, 732 bp, Cannabis indica
aaattgataattaattaaaataccaagagaatcgatgggttttacaattgattttgtcttgtgtgattaattttgctatattttgtactggaataatattttcgatagtttatcgatggtatatcgatagtaggctgatatttattttctcttggtattttaattgattagcgatggtttattgatggtaggctgacattttttttcttggtattttactttattattgatggtttatcaacagtatatcgatgaaattttgatgattctatcttgtgtgattaattttgttttttttcctatattttgccctggaataaaattgtattgatataccagcaaaaaattattaaaaattatcagccttagctttggtacaatataatcactgaaataatattgatataccatcgaaaaagtattagaaatattcatcccttaccttcttaccataattattgagaatatatggatatgtaatcaaaaaaacatcaataatttgttaaaaaattcagtttggcgagaaaaccagatcttgccattttaaagtaaaaaataagcaaaatagcatcaatgtaagcaacaactacacatatatatcgaaaataacctacataataatctaaataaaaaaaactctttgaacaatacttacacattattgaagtgaatgtgtgtgatttttcttttttatgatgaagtccgaccgtccattgagagagagagagagag

SEQ ID NO: 317106 - DNA, 924 bp, Cannabis indica
taatgtccattcttagtgttttattttagtaaattttttttatattatcacagtttttaataattaattaatctattagtattaaactagtttataaaatcacacacatggcgtccctatagattagggtgttacaagttttgtcttccttctgttaagactatcattagctgacaactggctttcctgtactgcagctctatgcgatagccattgcaagccaacatctgatcacctcgcattactcctacacctactggtgtttgaaacttgaaggaagagcatttgaccgaactaattgcccctagtccgattaacactaggcaacctaccaatttattgtaggcccatggtaggtcgatagccaaatattcttgtgtgattgtggtcgtcaaccaataaatccgcaaatgtttaccacaccaagtttcaattaggattttttgagcccctaccttatttaatgtctcctggttggcgagctggtgatgatcactgttgggtcaatcgtgtgagtatctcgcgttttctttatcttcctcgaaaatataattcaaggcttcttgttttttactttcttatgttcctcttttgggcatcatcgttcttctcttgcaatatactatcctccgaggtaaccagggtatccttccttcaacagggggaggttgtagtccctggttgcttgggttgttggatagattgggctttttatgttcactaatgtccccttttacttattgcccgaagtgtcctcgcgcgatgaaaccttctatctcatcttttaattaacggcactcttctattgtatgcccgatatctccatggtacttacagtgtctggttgggtcccttttacaatctcgcgtgcctcatgggctttggtttgctgaaagtgaccttgtgttcatgcgcgaggtagat

SEQ ID NO: 317107 - DNA, 1145 bp, Cannabis indica
ttttatttttattttcatttgttgatttcatttaagtcgggttcaagtccaattccggggcgaggtcatggtctggggtccaggatggaatcagagtctgggtagggatttgggtctaaggcggggatccaaagtcgggaccaggttaggggtctggcgtccaggtccgtgttcgaggcttgggttggggtcaggctccaagtcgaggtccggggttgaggctgaggtttggggtccgaggttcgcatccagtctagggtccgattcggggtctaggacggggttcggggtcaggtccgatgtccgagtctgggtctaaatctggttctagtatggggtctagggtcctagtctgggtcaggtccggggtctggcgtccagatccgggtccgtggtctaggtctggggtttgggttttggtctgggtccaggggtataggttcgggttcgaggtctgcatcaggggtcgggggtccgggttggggtcgggatttgggtccatggtcggggtctgggtccaagtcggcatccgggtggaggtataggtttagggttcgagtttggagtccaaaatattgataaaaaaaaatgtgcaaaaaaattttgaaagtgattttatttatttttaaaattttcaaaaatttgattctcaattaaaaaattgaagagtaaaaataaatttataaaacaagattttgaaaaatattttcacgtttgtaattttaaaagcaaaaactgattaaaatttttttaccaaacacttaatttagtaatattacatcaaaaatttacattacaacttccttcaaaaaattttccacaacttcactatgtgaggaacttagttgggctagattagcaaaggcttaatgtcaaggttataaaaggaaggtagcctcccatgtggtttccaccttttcttcgtcttagtttcaacggaagtttattcattaaaagaaaccataacatcatttacatgtaatttatttaggataaatactattttgaatcatgtattttacaaaagttattgattgaactctctgttttattaaatgataaaatagactctgtattttataaaatggtaaaaatacgaccctgagcttaatttgtgacaactttttttttaaataaccaacttg

SEQ ID NO: 317108 - DNA, 1160 bp, Cannabis indica
aaaacaaaaacaaaacaaaaattaaagcaaatcttcttggctaaaatcttaaagttaatgttgcacaaccaacaacattacaatcccaattattggaatgtatgaagatggctacaccgactttgaagattagttaatcagttaattctattgtaatctactttatgttagttaaaaagttgttacaaccgattggttgatttcttatttctcttgtactctgcacctctattaatataaatattagaagttgtcctcaaaattagttgagcagcataatcattctctccatctacacttagttcatttccattttctctctacttttctctgcaattctagttttcttgctttttttcatggtatcagagcttaatggccaacaatggcaatcaagatccaataaatcctcaagctccagctgcaattcatgctcaagaagctgcactaccaaacaacaatcttctaacactcaatctgagactcgatcgaaccaactacacgttatggaggtcactggttctagcagcaactcgagcctacaacttggatggatatattctggggataattcctcaacctcagtgttttctagctggtaatgtccctaaccctaccttctcctcttggttacgttttgatcaatttctaatgcattggttaatgaactccataacataggccatgcttggtcatgttatcaatgcacaaacctcctctgaaatctagacaatctttgagcaattgtacgcgacaagatctagggccaaagtacttcaaataagaggcttgcttcaatcaaccaagaaagggtcattatccattgatgaatatattctgaaaataaaacaatacagtgactctcttgatgcagcaggccaatctttgtctaatgatgagatgatcttatacattcttggaggattgggatcggaatatgaagctgtcatagtaaatcttacaggaagatctgaaagtctaacccttcaagaagttcaattcatgctccaaagccaagaattgagaataaatcaacttatttcagattctctcactaatgttcaagccaaccttgctaatctttccttcaaaaacaacaatcaagactcccaaaatcatggaggcaaaggatatcgaggatcatgttgggttttatgccc

SEQ ID NO: 317109 - DNA, 718 bp, Cannabis indica
gtattacttgttgaattagggtttagaatagggtaagtgtatgaaaaaaatgtacccaatgcgggtatagggtaggatacgggtataagtgtaccctgccctattatcctaccacacccgataatatacttatatttatatatatttgaatagtattcattttatttatatttgaaaaatatgtaaaatcctaaaatcttaatataattatataatactttgatattattttaatggttagtaattatatttttttattaattttacagataatataatacttattatttaagtaattacataaagtggtaattttttttatgtcattaaacataattttattgatttttattttttaaaaaaattattagggtaggatttattcgtggataccctatatctgttagtgtaacacccgtattctattcggaaaattataataaagtaatagggtagaatatgagtagaactttttttcataaggtaaaatcataaaataagtatatcttactcatatattacccgttgtcaatccctatctaaacaaatagttataacttataagtaaggtagtactcggcaattgttttttaaagggtaaataccattttgaatcctgtgttttgcaaaaattataaattggactctctgttttgttaaatgacaaaatagacaccgtattttccaaaatggtacaaataggactctgaattgattt

SEQ ID NO: 317110 - DNA, 636 bp, Cannabis indica
tcatacaagtccaactttccaaaatgattaagctctagtagcaataaaaaagaataaggaagaattaaaagaaaaaagttaaacaaggccttatcttcattggtagagtaaacagccttctgcccaatatttaggaaatcatattggcccaattcaataagaggagtgcacggcccaccatccgcctgagcactaacaaccaaaggcccaccaataatacgccttttaccaacccgatccgtagccaacccacctttcacaaagcaattctccacaagaggcaaattcccaagtccatttggaccatttccaacaacattcggcccaatagtaatattgaccggcccaaagactcctttaccacatccaccattcaaaactgtttgtgcacacgaggaacggtcacctgggctttcctctaaaataggaaaaatttcaagaagctttccctcctccttaacgtcaaaagggaacttattacccaacagagcaatagtcatttcacagtttgcaggtttgtacttggactgccaggcagcacgcagggaaaagcctagaccagctggctttcgagaagtcactatcttcgcccttctcgatttgcggccaggcccaatcatttaatatagtttcatt

SEQ ID NO: 317111 - DNA, 1924 bp, Cannabis indica
ttttattcaaaaaaaaaaagagccaataccactactattcatgaaaaggttaatcaagataatatttattatttttttttcaataaacatgcatataataacatacctctagttcactacaaaagatattgttcggaatgaaacaaaaacacaattataccggttgtgtgtaaaggtctattttaccacattataagctacaaaattgtatattcttttaacaaaagaaaattacaattagtaaaataacaagaatgtctattacaaaaagcagagtagttcttaattttccaatgagaatccaatccattgagcgtattgataatgttgaagttcctagctatgaaagaaaaactaacaaagtagaacagaggaaaaaaaaaaggaagaaaagaggaagacaacgattgaaaaaagagtcttattcattaatggtatgtgttatagcttatatagtagcttagtacaagtgattcaataatagaatccataacacacaataagagctaatagacacgtgctaactaactctatcaacctctaactatattaattgtcttcaacacctcccctcaaactcataattgaacgatcttcaattttgagtttgtgtctgaactcggaaaacttttgactcgatacagctttagttaatccatctaccaactattcatagacatagaggtgtttaatctgaacatttttattaagcaccttttctctgatgaagtacaaatcaagctcaatatgttttgttctttggtgaagcataggattctgtgtgagcatttggtacttagattatcacaccatacagtaggaggttgagagagttgtattcaaagttcagagaatagatactatagccaagtcaattcagctgtgacactggcaacacttctatattcagcttcagtgcttgatcgagagatggtctgctgctttttacttttccaagcaatcaaattcgagccaagaaagatagcaaagcctgtagttaacctttgatcatctggatttgaggcccaatctacatcacagtaggatacaagatcaagagtgcttggtttttgtagatgcagtccatactctgatgtaccactactgtagcaaagtaatcgtttaatagttgaccaatgtgtagacaaaggtttttgcataaattagcagaccttatttacactaaagaaaagtttaggcagtgtgatggtcagatattgcaaggctccaacaactgacttatacagttgaacatcttccaatggttccccctagtaagctgataaacgaataccacttgtcattggagtaggtgcaggcttggcattactcatttaagccttaacaagaagatctttagcttatttggcttgtgacaggtgaatgcctgcatcagtttgtgtcacttcaataccaagaaagtatgtgagagggcctagatcttttagtgcaaattgtctattgagagttgtgataatagcttccattgtagtttgatcacttcctgtgatcaatgtatcatcaacatagactaatataagtgtaacaaaattagaagtatgttgaataaatagtgagtgatctgatttagatgaagtgaaaccaagagacagtagaaaattttgacgcttctcaaacctagctctaggggcttgtttaaggtcataaagagctttgtttaatttgcatactagatctcttttgccagggacctcaaatcctgaaggttgcatcatgtacacttcttcttgtaagtctctattaaggaaggcattattgacatcaagttgtctaataagccatccttttgtcaaagccattgtcaaaaccacccttattgtgataggtttaactactggactaaaggtctagtaaagtcaaaactatgttcttgatgaaaccccttagcaacaagccttgcctt

SEQ ID NO: 317112 - DNA, 949 bp, Cannabis indica
cgtgtagcagtcccaacacgcttcctcccatgcggcatttaatgcgacttgattgctcaggagaaacctgacacctcgcggagatgccttagcgttatatgagcttctgggagcatcttgagttccatgtgccttctccgggacctacgtcctggacgttaccttatggcataaagacttagcaaatatttcgaactgcttgatccacgtgtccttatccggttggtccacgtatattgggcaaaatcaggggcaacactcatatttttaaattgtacatattgtaccataaaataaaatttaatcaatacagttttatcaatttaatcagacagttctcagttatatgtaattaaataattaaatttgaatttagaattcataaaattttagatttttgattgctttgataaaattttatcaaaaaaatttgaatttagggtaccaaataagtatgattttaaaatacagggtatcaaataagtattattaaaaatagagagtactcaacttgtatctagataaaacacatggtaccaaatgtatagacacttaaaaaaaactaaaaatatttgaaaacaaaactatttcaatacacaaataaagatgaataattctattttcgtagagttattatattgctaaataaaaaacatgtacaaaatacttagaatagaaaatatttaaggtcttattatcagtagtttatttactttatttaaattccatgtaattgttcaaatatttatattaatgaaaaatgtaggttcaagttattattaataaatttcattcaagttgttgacgcggtttttcgtcaacggatctaagaagatcgtaaaacgagcaaggtgaacacaagcaatagttaatcaaagtaaaccggtttgcaaaaaaaaattcaccaaaaacaaacacaagaattttatagtggttcaccccctttcag

SEQ ID NO: 317113 - DNA, 1255 bp, Cannabis indica
aaggagccgtactgctgcaaatgtggttgcttcagcaagaactctgcttgatcaatacaaatctgctcaaagaaagggtctttctttgtctccgttgattgatggagaccgtgtgcttgagcgttggactgcacctgctataaataagatcaaagttaatgttgatggcgctttgtttgagcgagaaggccggtttggttttggttgtgtggctcgagattccagcagtaatttggtagaagcttacacgatgggaaaggtggggtgggtgcaacttgaaatagctgaaattgttggcatcaaagaagctttaagctggattgaccgtcattcgtggggacaagtgattttggaaactgtagcttagtttttgttcaagccgtgcaaagccaaattactttgtcatcctcttttggtcttttagttcatgatgttcttactcttctcttatccttgaataatgttgagttgtgttttgtcaaacgatctataaataagttggctcatgttttagccagggacttttgtttctctacaggtcgtgtgcttcagttggaggattgttccaacaaaatgcgttctattgttattaacgattgctagttaataaagttgctaagttttattctaaaaaaaaaaaaaacattaaattattcactaatgggtctctggctcatctaaggcccatattggaggccaatgcataagcgacttcagtcataagcctatttttaaaaatctactgcttcactaaattttttcaatctatttcaaaattcaaaatcaaagagattttttactgtgataagtgaaaaaaatactttttttgtgtccattaaccaaaaatactcttatattattttttttgttaaactatatccactttttttagtggattcctcaatatattctcactatctacttcagtctattatataatttatattaacctaagtggtctaatagagacattatctataaaagtggatatatttaaaaaaaaatatataaaaataaaaaattaaaattaaaataaataaagtaaagtagatatataaaataatttcattttttttagtctgtttaatcttgaaaagacggaatgtgagtaaattagaacttttggaatatcaaaatcagatattgtacgaagacggaataatctataactatataaaaatgagaatgtgggtttgggcttcctacaataaattaccaaattattcttattttttgttaattactattaaatcct

SEQ ID NO: 317114 - DNA, 1740 bp, Cannabis indica
tataatgcaggatgcagtgatgaactatgttttttggtatttagaaattttttttttaatttaattttgtttatgttataattatttaaaatattttataaaattttaattttttttaaataattttacagtaatgttgaaataatttagtttgagctataatgttataataaaaaaattgacactaaaataattgaggtgcattggggcattttttagaaagagtaattatatgaaaatataaaccaaaatattatgcattttaaaattattttgtaatattttagtgaatattataaatgtgatatttggcctgaaatttcttttttttttttttaggattgtgtgtagtatggtttttttttaacattaattagtaaaaattcaattaaacttttgtaaaaaaaaataatatttaaattttgaaaggaaaattgataaaaattacaataaaactaatttataatgaaaattctattttagcgtaaaaattatatttataaattaatttttctaaaaaaaaacttgaaactaatttgattatcaaaagaaaaaaaaatatagaatatattaaaaattaaatttaaataaaatttatttttattttaatttacttaggtacaaaattgaattagataacatgatgccacatctgaaaaattaaagtcctaacggtaattttcttaagtttaaaggtatatttaagagtgtataattttagggataaaatagtttttatttttttttaaattactaccaaattattacatgcttttttttttttattatcttaatccgatgttattagttgaaaaataagattgtatattttgtgtgcatgacaacttatttttgggtttacctttttaatctttcctacaatttgtgtattaagtgtgtcataaattaccttatttgtttttaaaggtaaatattaaatatatgcagctaaaataagttttattgagtttatttatttacaaattcaaaattttatatgctgcaattatcttatttatttatttgatgtaatatttttttttgttttatttttatatcataggttatggatcttgtgtgtatccatcttcattaaggtatgttattattattattattattattaattttaatattgaaaatgttgggaaaaagtgattatattattgagaaaacatgagtctttgtctgttaataatcgaatataataaagtgctcatatgatttgtagcacaatctccataatttatttatttatttttagggtttcttattcttcacgcaaatatttatttatttattttatttatttttggtttttcaatgtgatgaatattagaatattttgagacatgtctctctctattcctctgtgtcttgtctattcatgggtatttgagtgaaccattggatatgtgacacgtgtccataatgaatggaacgtaattctaaaccgtagatagattctctcttctatcgattcaaaacaaaaacaacctgggattttgagcacattttaaataacattgtactatttgttttggaccgttggattagttttttgggatggtagttgataggaaaatggacggtcaggattgatttgagagaatcagtgtacggttacagatttagacagtatttggtgactagtaataataattcttctgctttcaaaaaaaaaagtaataataattcttatgaatctatttgggaaatttgattttctatacttagaaa

SEQ ID NO: 317115 - DNA, 1189 bp, Cannabis indica
gtaataaaaatagaaagaaaaaaaatcctatttatatattcctatgtatgctatttataagaataatataattttcatttatggattatatatgtactttagtttaaagtcttcttcttttaccttctttctttagaccaattacaaaaaaaaaaaaaagtcctttctttttttatttatttatttttttttaaagtgtatttttattgagaattatggtatttattttttacaaaaaatctaatttcattaatttataagagtaatattagaagttatatacatttatttgactttttcatttataagaataatattagaagttatatacatttatatagggaaaaaaatgaatagattagatatgggaagaaaatggcaaggttgttaagggtaagaattttatttttcaagataaaattaaaaaataattttaccctttaaaatatatctcatacaataattattttatattttatttaattagattcatataggataattgagttaattcaatttttcttttttaacaaagtaaataaaataaaatcattttgatttttttccaaaccattttagtaaaaatataataataataataattttgattctttcatttttttcattaatttattctgattttatttacaattcaataatatatcattaatgggtaatattgtttaatatttaaaaaattactttataaatattaaattattaaagggaagattttcttattttaatggagaataaaaaaattaatattaggatatgaaaattcaaactttgacattgtttttatgagaaaataattacagtatttgatagagaagaattatgttagaatataggaagagatatgagggaaagatattttttaagaagtataaagaaattatatttggattatgaatatttggtagatgaatgaaagaaaattaaattattttacaattatatttataacctttcattattatagtattaatatagattacattagtaattatagatttttctaatctgtgaattaatccacatttcagtaattatacattgttattaatttaaaaaagttttctactcacttttctcttcaagattttttttggacccaccttttttttaaaaaaaaattacataattaactaaaatttaaaaaaaaaattacaaaaatactttaaca

SEQ ID NO: 317116 - DNA, 1726 bp, Cannabis indica
tttacagttacacaagcaaatatcaagagtatattttccttgtcaacgttccaaaaattcaataggaacaaaaattataaataatgttccattttccaccctgaattttcaatttaaagagtccgttgcactgaacattgttattgttacaatgttggcctttcctttacatatttgatgaaaatcatcacaacttcgagggctatagttgcatttgatgatatcaatatttttttaagttgaacattttaatgttattttatatgagtaaagtataatttcactttgacacaataacataaaacaatttagacaaatttcttagaacaattttttttctgtttgctgaattatgaacaattttatttattgtttaattttattttttgtaaaatgcactttctctttacatttgttggtttactaacttttacccaatacattaatgtgaatattaataaaacaaaaataataattactattatgttctacagaaaataaatacagagctgaacattgtacaataagctacctttcacaattgtacataaattgaaaatctcgtgataattatattattctagataattgaaagtgaagtataatttaagtaattcccagcaaaaatatacatatatatattaatatataaatagacacatgaggtaaatttgtttgattcgtttacaaaaccaaaaatatccacaccaatacaaaaataataaatattaggaattatatgatttacaccataatttgagtataattaaaattaattttatcgaactaaataaattaataaaaaaatatgctgctccaaaagaaaacttagaaaagcgtaaacccgatcaatcaaaagaaatgagagagagagagagatagagaacaaaatagcatgagagatacctactttcttgttagcttccaagctcttctatcttgagaagagacaaattctggaggagttatgggggactcggaaacaggagctggcacaggagatctgaaacaaggaaaatcgaagcatactataaatggcaacagagtactggccaaacatacggactgaaaacagaggaaatgaacgcgataaagttacatccgtacggacacaatcttattaaagccaagcttcgggtcattttcgtttgtgcttgacataatatttgattacagtaaacggctcaagctgacgctcatatgaaccatatcccaagacaatgccagatttacgtgttggtttaatataagaagtttctaagccgaaaagctctaagacttgcaaggaaatataattttgcaatcaacaagttccttgcatttatttacatcatatggtttctaaattataactgaattaggccagtttcaaatatgccataccttattcttttaccaagtgactcagttgggctgctgcattgtggatttttcaaatcattgcatgaattgcagagagattcgtcttttgcagcacatgatggagggtaagacactataataaaccatagaaaagtcagcagcaaaccaaatatatatattataattaatatgggttaactgctctgtttgcatgcaggcacagtcattcatcaaaaaacaaaaagacaagcataacactaacctctgcatttttcacaagtgaagtactttcttcaggtgaagagcttatgaaactctgaactgttgcctccaatgtatgtagaggtgcccccctgcatgcttt

SEQ ID NO: 317117 - DNA, 2835 bp, Cannabis indica
attaatgggtaatacccattgaaaagtattctttacatatatatgcagagtatgtgatacaatatatattattatgattaaatatgaagaaataattattttctatgtatttatataagacatgcatacataatatatattatgtgtatatattatatgtcatgtatgtatattgaagtgtatatatgttatatatgtgtgagatatgtaatatatagttatgtaataattaaaatattatgggtatgttacatataagatgttgatactaacatatatagggctcgtttggtacaccgtattgtattgtgttggattgtgctggattgtattagtattatttaatacaatactatgtttggtattgacttgtattaatagattgtgttttattgtattgtattagtattatttaatatgggtcccggtctcgggtccgggtctgggtcctgagtcggggtccgggtccaggtctgggtcggggtctgggtctgagtacgggtcaagatccgggtttaggtccgcgtctgggtctgggtctgggttcgggatctgggattgggtccgggtctgagttcgagtccgggtctggatctggatacgggtttggggtcttgggtcccagtctagggtcccgggtctgggtccgggtctgagtcggggtctgggtcccgagtcggggtccggagtctgggatcgggtcagggtccaggtatgggtgtggggtcggggtccgggtctgggtcccgagtccaggtccgggtctcgaaccctagtttgggtcccgggtttgggtccgggtgtggggtcggggtccgggtcgggtccgagtttgggtcccatgtctggattagagattggtgttgaccccgaattctttgtaaatattgtaatacaagctaatacagaccatttgttatgtatttaataatacaacatacattgtattaaaaattttggtcgtaataattaatacaatacatttctttatccaaacatagtgttatttattatttagtacaatacgacccttatacgacgtaccaaatgagcccatagtatattaattagcataacattattatttgagagttataattatatgtatgggtatattaatttttatattgatatatgagttgtataatatgataataacgttaatagtgatataataatattgtttattattattgatgtgaagattattattatttatattgtgaataaagaaaattagaaattcattttccaatagtaattttgggaaaagaaattgtgacttttgagaaattacttcctttggaataaaaagtgataattatttcattttaagagataggaaaagtgaactataagagttacacttatgagatttatcttgtcatagcaagaacaaatagattgaaagtagatctaaacttgtgaaatgagtcataaaaattgaaagaataattttagactcaaataaagtgaatcgacgtgaatttaaaaattgtgaaaagataacaaaattagagaagcaattgtgaatcttaaataatcaatgtagtgaacgaaattgataagaattttgttaatctttggtataattatgggctaatctcaatgaggagataattttaaaattatgggtaaaaataatcatattattttgtaagtagtaatgtgagtttggtattttaattttgttgagaaaactaagaatgtcaaataatatttttctaataataatctctaagagacattttagtaaaatgattaaattaaagttgtttaaataatgtcgagattatttagataactaatattggtaaaaagtgattcttataaatattggtagaaatgttggggtgagccacaaattaatcaaaatgtgttgagacattattgattaatttattttattttgaattcaaattctaaatcaattttggctatgtgcatatatgaaaattttaacatatttggtgtcaaatttcggtaaaaataattttaagaaaaaaattaaatttaagagaaattatagagacatagtggtcgtctatattttaaaatcaagatattatcttgataataaattgtgaaagtgtcggggtgcatactccaatatgagaaagtttagacatgcttagtgtctaaaactaaaatgtgtatatttgagacatgcttggtgctttaataaaagtgtaacttaatcatgtttggtgtctaaaattgttggaaaatattttaccaggatctagatttactaacaagtatgtttattaacaccctaaatatgattttctaaaacaatggaatttaaacacatttaaagttgagaaaccttacattaattacagtgaaatatatgactcttcccactcagatctctaacccttattcctttctttcgcagagtattatcaagatctaagccttatactccttcaagttgttggattcttcacagtcctacacactatgattgagtactaggcttgctatgggtgggcatgcactcactcactttaggctcgaaatttgatgaagaacaataaaagagattcaaaatagaggaaggaagaagaaagtctcaataactctagttgtctgacagaatgtaaactaggttattagaattgttagataatgagaccatcctattccttttatattatttcacttagggctaggattaaattatgtggaataaaaaatgataaaataatagaaaaattaagacttcgcggccgaccatatagatgggccccactagttatatatttgccatttttttaaccattaatcttttatttcactttcacaaataccatattttctaattttaat

SEQ ID NO: 317118 - DNA, 1304 bp, Cannabis indica
gagaagggtaaaacagtgaaattaatttattaacgtgcttatgggactatattattatatagtatgcctgtgttgtctttttcaggtgtgttctgacaggttggcgcggtatagtcacaaccaggtattttgggccgaaccgcgttcgagcctgaaatacaatttggattgaattattggcattttatttattggtgattaatctgaaatttatttgggtttaagtatgcatgaaatgacttaaatgtccttgtttatgtttagatgtgctttatggccctaggggcaaaatgatctttttgacctattgatttatatttgataaattaattttgagaaataagaatttaatttctggtttcctcctccctcatactcgaacccctctccctctcaaaccctcttttgatttcaatttgattttggtgaattgcttggagtggagctaactgttggagctcgattttgggggttgttcttgctaaaaccttgaggtagtttttacagcttttaattgagttttcttgctgattttctatggttcaaaagtatgataaagtgatggtgttcttgagtttgcatgtttagaaaattggagttaattttgatgaatttgggtgtgaattgtaagatgttgttgtggattagattgttgattattggatgagattgttgagtatttttctaggttagaattcatgccatatttggtattttgctgctagaaattattagagttgttggttttgaagctctagttcaagaacttgaattttgttaatttagagcttgatttcatgcttgttaagaaatctgaattttggggtttattactggatttttatgcatgaaatgttgtttttaactccttgattgatgattaaaggtgtgtttgttgatttgggagtttttggttaagttttggatgggtttggttgtgttttgagctgaattttcgaaggtttgcatgctggtttctgggtttggaacccaggtgccatggcatggtctttagcatgccgcggcccgcctcctttctggacctgagagttggtcccaggtgccacgacatggcttttgcatgcacggcccgccctcaagtttctgggtagattcgagtgtaattttgaaaaggccatatctttgtgatctgaactccgttttgggagttcaagatatcgttggaaagctcgtttcaagctctatgtgattatctgtattttatatgccatgaatatattttatgaatgtggaatcaggggttaaccctatttgtgtaaatcccgatattgtgactaggatta

SEQ ID NO: 317119 - DNA, 642 bp, Cannabis indica
gttatttccgctggaattacaacactaacattacatttctaaattaactaatagttgataaagtatattaacttctagttcataattcgtacgatagtttcaaataatcaatacatttatttgtttaatattgtcatctgaaaaacaagtcactgtctcaaacacaactagataaatagttaatttaatttattttgaatttggagagcattgaatatgttattttactttgaatatggaagcataaagtctcaacaatagcatattttaatatcgtcaactgtactaatttatataaattaatgtgtataatagaattaccaatgttatgccaagaattagtcatatagataaagaatagtagtatagtaattgttcttgacttgttctttggccttgaaaccagagtagtttagtactataagaataagtcatatttatttttaaactaacttctactatatatcttttcatattctaaaaactatatgtaaacaaaaatatattttaaatgttttacaaaatatatatacttaattaagtaaaaaaaaaaatcaatacataagagcatataaaatcactacaaaagttacttaattagtaacaatcttttagttacaatataatttttttgtaactaaa

SEQ ID NO: 317120 - DNA, 1066 bp, Cannabis indica
ttttgtgcatttgtgaaataatctctatatatattcaaactcaattcaagtataacagaaagtattgttctttttttttaatattgcaattcaagtttaaacttattgcacatatctaaaaaaatctatcgttctattatcattattttataataaaaaaatattttctattattatttaaaaataaataaaaaagtattataacattaaaagtattccagttaaactaaaatcataattaacactttttattatattttttttttatataaataacacttaaattaagtatttttttcgaataaatcatgagttttattaatagcaattagctaaaataatagtctgcaattcaattggaatgtttcccccgttagagacacgattatgattagaattagaaaaacaaacaaaataatcagtaattcccaaatcgtttgacaaaagttaaaataaaatcaaatgaagaagattttagcatcacggttaattttaagaacacttatattatatttcatctactgctcagaagacacaacagtagaaacggttgcagcaagttcaacctcatagcttgagcactcaactattgtgtaaggtacgtaactgcactactaacaaccccctttagccgcaaaaaatttgtaattcctaactactaacaacgatgtaatggcgaactattgaagaataaagaagaaccaacaatgaaacaaaatcatgtcacatagacaaaactaaaaaaatactaaaaactatatcacacaataaaaaatcttaaatactcaaacttatgtcacagagataagagtaaaacactcaaaaatatatcacagagacaagactaatgacagtagcaagaatcaaatagtagtggcaaaacacaaacccgaccaagccacctgagcctagggaaggcagtgagcctagccaagaaaaaggcaacatttgatagttatagatttgtgaacgaaaaaccctaattttctctctgaattttgattctattctcaatagtacttaaattaaatatttttaataaaaaataatgttatttattaaataa

SEQ ID NO: 317121 - DNA, 890 bp, Cannabis indica
aaaaggaaaaaaaacttaattatatgaatgaagtggggtttgatttgaatgtaagtgttttgagttgggtgatggggtcatttgttgactcattcatcaactagtacagtagtagtattattagtagagtaccattcactacaggtaagtactactacaacaactgcatttttctctgttgtcagactcactcaccttcaaaacataatatatacatatgtatatcactgcatggtagatgattagttaagtacttacattacattgtgtcaactatattaagttaacacatatgataacacattcatgttaatcattctcatgcaaatttactattacaagctctgatatataaaccaaaaaaactatatatatatagatgaaaatattttgagtctatttaaagtgttttcttcttgttaactattattcatgatttgcttgcttatacattaattgacgaagtctctctcagggtaagcttaaaaagctatgccctctcagaagcctctcaaaattccacccaaacattcattcatttagtaaaaacttttaaaaaaaaaaggattattatataccaactctattccagatatctcagctgttatcatcatcatcactatctcaagctttgacgattgttgttatacattgcagcaggtgatctcatatgccctcttgaagatgaagatgatgcagtaatgtaaggatgattgccggcagaaccgtcgtctgtgggacaagtactccaccttgcagggcttgaattcggttgcctggaggacagtgaatggaagccagagctatgatgatgatgatgatgaactaatggtggttcgggatgcatagactggtcatgatcagactgacaactatagaaagaagtatta

SEQ ID NO: 317122 - DNA, 666 bp, Cannabis indica
tatttttacttattatcattatttaatttaattcttttgtgaaactttattatcacaacttttttcccaactaaagaattaatagtgtcgacacatcatatttttataattagagaagaaacacctaaacttttttgagtatacgtaatattaaaaagtcactaacaattttaattattgaattataagttcttttttttttttaataataataataataaaaataaaaaagcatattagactagagagcctttagacataaaagtgaatccatttttctcattaaaaaaaatgcaatgcataactttccaataataagttaatccataacactaatagactctttgagttttaagaagataattttaaatattataaacaagaagaaaatgaactaactaataatgggtatgattccacttcatttttgtaccttatcaaacaatgaacatacttatacatataaatattaagaaaatcttacccaagaaaaaatggagaagagagtgagtactcaatagagatttgcagttgatcgatgaatagaagagaagagtattaaaatacacaaagatgataataaggtatatatagagagcaaacaacaataaggagaatcctattctctaatctaaggaatcatataaaataaatatatatttatat

SEQ ID NO: 317123 - DNA, 758 bp, Cannabis indica
taacaattgccccttaaaaattaattttttaataaaaagtactttttaaatgattactgtgggtatttaggttataatccaatttgaaaatatgcatgcctatgattttggtggtttttgtggtttcgaggcacatcattagcaataatgaacaatcttttccacttttctcccatttctatccattggatcttctacattttgatccgaaggtaactaagttcgaagtataaaatggtttccaccttttttaccttttcaaaaactcaagcttttgtgagaaatactcatcccgatttcctgaaactttgcatgtcctccttgtctttgaaatactttttacgaattttctcggatttacttatcgaccttaagtgtttaacaagttcatcacgttgttcactccgtcttcggttgcaggacttttcatcacacgactatccgacttcaaacagtaagtgacccagtcttccctgttcttctcattttttatttatttttatgggttatgatcgttttttttttttttgcatcttgtcactccatttggttttagtgattctggtttaagttttttgggtaatttttagggtctaggcatgatataaatttaggtttatcatattctttgagcctctggtttaataaatttcatccaggaattgagattgttcttttttgtagagatgttccaatcaagttcagaagtttattctccagagaccttagaaacagaatatcctaaccaattagcccta

SEQ ID NO: 317124 - DNA, 1214 bp, Cannabis indica
aaaaataaaaataaactttatagaacacacttttgttttctgtttttaaaattgaaaaacaaaagtggttacagaaagcatttttgtttttcaaaaacaaattttttaaaaacaaaaattttactttcattttgtgattaaaaaattaaaaaacaaaagtgttaccaaacggcacctaaaaatattaaaattacttttatcaaatggatataaattcgtactatggaaaaaaaataattaaaaatatatagaaaataaaaattttatataatatttatacatatatatttgtgattataatgaactagatcaaaatattatcattattataatagaatcttaacaactcaccgcacttttaaatttataatttactaaacactcagtttaatttttttctatcgttctactttatcaaactagccctaaatcgctaataaaacatgaatttcacagattttaatgtaaaaagaaaaaataactttggtggataattagaataaagtaaaattttaaagtatttgaccgaaatttactgaaaaagaaaaaattaagatctcatattttaggagaaaaaacctattgttttttaaaatttcaatcacattcatttttacttttttttttttttacatttcatatttattaacaaattaattttggtatttttttttaagtaatttaagtaaacattattaaatgtttggagtagtttgtttagaagacacacaaacatcagatctgtcatctgtgatgcgactgttcccttttgttttatgaaactttctggtatataaatatatagaaaaaagagaaacacgactttttagagagagaaagattaggagagagttacgatgatgaagagtacggtggcatttctggtgatcctctgcatggttcgagccactgaatcgatttggctaactttaccctcctccggcaccaaatgtgtctccgaggaaatccagaataacgttgtcgttttgggagattacgtcgtcgtctccgaagaccatacccacgatactcccaccatctccgtcaaggttagttcttcatttcaccttctatgtccatatcaattctagatttccgcttctctctcattataattttttggttgccaagaaaaattaaaagattatatggttagataacgaaatagggatttctaatttagaatctccgacctcgtttattttacaggaggg

SEQ ID NO: 317125 - DNA, 774 bp, Cannabis indica
tagtattttattgtatttttttagatacaagtattctattatgtgtagtatttgaagatatgtgcacaatataaaaggttatttattaattaaagttactaattattactgttatttctaaaaattattttaatcatttattttttagttaaacttttttacataatatcattcaaaaaataaatatacatatttcatataattataaaataaaaattagatttactaattatatttacaaagaaaaattgaataatataataaatttaaaagaaaaagcaaaatataattttaatttgggatatgtagcacattttatcctagttttttttttttaaaaaaaaaaagtgggataaaaggtgacgtttaattctattttttttttctaaaaaaaggacaaagggtacatttttatgccgctttttaagaaaaaaattgagattaaaaatgtacgtattatctcggttttcatatagacttttaattccattttcatatatcccaattctcattttagagaaaaccgagataaaataccctaaaaattaagattaaagcccatttttctagtagtgaaacttttggtgatccccaactgcactttgggtgtctgttcttctgttcttttagtatcttcttctcctttatacacacacatatatatatatatatttatactaggttaatattacgtaaaatgcacgtatattagttttttttaataaggtttaattaagtgatgttatgtaacgccctaatgctaaggcacgctac

SEQ ID NO: 317126 - DNA, 2185 bp, Cannabis indica
acactatttttataagacaccattagagatgcttttagagcacttacttttttttatcatagttctaatgaaaattaaatttaagaataaataaattcattttgcatgaaattctaaactataatataagacaccataaaaattctaaactataatatgatgtgatttctaatattcgaactaagtcttataaaaatccataacgtcagagaattcagaacaatttataaataaattctaagttataatattagacacttataacctataaacaataataacacttatccatttaaaaagttcttgctgagtaaaaaaaaaaaaactaaaactattaatattttgatctccctaactttggcatgtatcaaatcaagcatttgaattttttatagtgctaaaaattcctctcaaattattgagattgatggattcaaggactttcttctaattttactaatggatgtctaacatagatggaagttttgggagcacaatttggtatatgtcaaagttcgaggggcacaatttggtacatatcaaaattcaaaaggtacaattttgtacatggacaattgtaacgccctgactctcagggacgccatgtgtgcttttacaaacttattattgctaatcatttagtgtggtttaattaaaaacttttaattgaattaaaaaattaaactttacaaatcaaatactattggaatatggggatcccctactaataaaattcttttacaactaatttacaaaatgactagtacaaaaatcatggttacatttacaaatatagaagaaaaagttgtcaatcctacttcccagaagtcaagacaccacatctgatatgtacactgccgggagacctctgactcatggctgaacacatctgctattcttcttacctgcaccatgaagcacctgtgagtcacaatgactcagcaagaaaagctactagacaatagtatagtaagtactagcattacaacataatatacatatcagtggatcaatacatattcagcatgcatatacatatcagtacatctacgcgaacaccttctaatacagtataagaataaccatacaaactcataattaataatttcaccttttcactaagtagacattcatttaatccatagccatataatctcagtgctttgtaaagcactctagtcatacatcattgtaattacataatttcggtacttcactaagtactctacttacactgtaccataatcacctaaactcagtgcttcataaagcacccttaccactcgttatcaacgagctatttatatcactatcggttcctgataacgcgaacgataagtaagaaacctatccgaggtttcaacgagtaattactcataacggtaatgaccgtatctcttacttgatcataatcgagtcacaaagataataatcgttccatatcatttcctcgatcctaatcgagtcacaacgatgataatcgttccatatcatttccctcgatcataattgagactatcataattataatcgttaaccacaaacggtacataatactttctcagtccaatagttaggtgtgcgggccgatctgagtggaactaccctcgatgatcccgggtcctatatatgtcacgataacaaagctcaataaacaacttattacaaactttaaaataaccctaacttcgtaaccagacatatctaactctccactggttcgaaataacttaaatatcattaaatatcctattctaagctctgggaaacaccccgatcaaaaccagtttcgaagcctaaaactagagtttccccctgctgccaaaaccggttgaccggtttcactatgcctgtgaaacgggttaaccggttttccctgctgcagaaacgggaaaactcaggtttgttgctcgaaaacccaaccaaatctcttccaaacctaatcaacagctccaaaatagtttaatatcataaaaataacatgtaccaagcatcaaaatgcagtaatacatcaagataataaaatcaccatgcttgagtgaaccttgagttcataaactcaattttgccaaatttaaacataacatctcacaagaatatcacaaatatacttaaacaaccttaaattaaacctataaatatactctgaactcaaacatcatccacaacccgaattcatatgaaa

SEQ ID NO: 317127 - DNA, 1571 bp, Cannabis indica
tttgttaagaaaatggtgtgaatggttcctttatgaagtaacggttatagttattattactggactagtaattgtgtataactatatatcattatattgacatttgttgtgtttgaaaatttttactgacccagatttaaatatatgagtaatgcacgattatttgtttatgatgatgtgagtttacttgctgatatttatgggatgagttatatgattgttgttattgttttccttgttgagtctttgtgactcacgaatgctttatggtgcaggttagggcaagggaaaactagtacaaccatgagatgaaagtcttctccgacaaatgtacatatcgacttatccgacttgtgtggtcgagttgtcagaagttgttttgggttgtacctgatgtgtattttgacttacttttgtatataaccctttttgtaaaacttttccaatatgggatccctgaaataaatttttagcgatgtcatcttgttcattgttatagttttattttggtgaagttttactaatatcacggttttaattaaataattaatctactattagtaaactatgtttcaagagcaaacacgtggcattcctagggtttaaggcattacaatgacactataatattcatgacccacaattactaaaatgattactttatttgggtcaagcttcaaagagtaatatacactaatacatatgagcccattataatgattttaatcatataattaaactatttgattagtaaaggtcgacacaataattaaaatatcacagtgatgtgcctcaactagtaagacgttataattaattttcaaatattttttttacttaaataaaatatatgttacatatttattttttaaaaatcacatatactaggtattaatgaatttttattgttattagtgttatatttgatgttttagtttttttttcatattaatattcttctatttaattataaccaatgaatagtattaatacattaaggttttattgtagtaaaattagtatattagagaaaatctattggaataaaaaaggatttcaaaatctcattgtataacataaattgttaatgctataaactatcttctaaccgcaaacaaaacgacttttcaatttattgttatatttgttctggattcttttttaaatgaataacaagaaattattgttgatgataaccaaacactacctgtcactgaacaacccacatgggatttgttggaccccaaaatataagcctagctataaccccacatgtcatctataatgaaatcaagtcttcggatagggaagactcaccaatatcattaattttagtattcgtcaattgtgacaacaaaataataatgtgagattcacaattgtttaataaattaaaatcatatgtatgatatatgagaatcaaaacaaaataaagtttacaaaaattacaaacacacttatatatggggacatctgttaatagaagtgcacatatataccataatttttttttttaggagatatatatatatatatctttatatattaaaagtgtctatctaacggcattt

SEQ ID NO: 317128 - DNA, 2336 bp, Cannabis indica
ggtttgatgaacacccctacaaagtccacccttctcctgatggcacttcaaggtcggctcttctgtaataattgccacctcgtcgtttggaaattcgagaatgaaatcaacaagggcttggccttttattgccgattgtggtttgaattttatgtcaaattggcttagctctatcgaccatttaaggagtcgctttgacgcttgtagttttgccaatacttgtcgtaaaagataatttgtcagtactttaatactatgtgcttaaaaatatggtcgtaatatttgagaagaaccaccagtgcaaatcctagtcactccatttatggatagcaagtttcaacatccagtaggcgtttacttacatagtaaaccggatgctgtctatcttggtctttgcggatcattaatgagctaatcgcgtattcggacactaccaggtagattgataacacttctctaggcatcgacttggatagtatcgggggttgccccaggtgcatttttagtgcctaaaaagtctcttcgcatttatcagtctactgaaactttttattaccttttagaatttgaaataattttttacatttgtcaaaagaatgcgatacaaaacaatttagtgcagcgactttacctgttagtctttggacctcttttggtttggtgggagatcgcatctccatcagtgcctttatttttactggattggcctcgattcctcgttggcttacaatgaaatcgagaaattttcctaagcctactccgaaaacacactttagaggattaagtcacattatatagtgtcacgggatcctaaacatggaatctaggtgagcgacatggtcctttgcgtgttgagattttacgagcatatcatcaacatacacttccatggtcttttctagtaaatatgtaaacataatgttagctaatctttgatatgttgctcctgtgtttatcaaatcaaaaggcattaccttataacaatacaaacctcgatcagtaatgaaggaggactgcacacgatcaggctcgtacatcggaatttgattgtatcttgagtatgcatccatgaaactaagaagttcatgacctacgctagcatcaacaagttggtcaatgcttggtaaaggaaagctttccttgggacatgctttatttaaatctgtaaaatcaacgcatttgcgccataagccattgggctttggtacaagaacagggtttgctaatagtttgggtaaaacgattcccttatgaagccccatgccaaaagacggtctacctcttctttgagcgcttggtacctcgggggtccattttgcggcacttttggcgtactcctcgcacttcatgatcaatgttcaaccggtgacacatgacctctggcaatattttgaccatgtatgaatgtttccatgtgaaaacatctaagttctgtttgataaaagtgacaagcttctctcgctactaaaaagttagtttggaacagattttaaaaactttagtattatcaaaagaattaataggtacctcgattgtttcttctgtagcctgcacagtattggtatagccgaggattctgggatctaagttgggtttttcaacatgcgggatctcctcaattttgaaaacttcatgtcgaggaggaggagcttccagtaaatatgtaacatttactcattttttcttttctgttagtttcaacgctatgttataacattcctttgagtccgattggactcctcgcactaatcccacacccgtgggggtagggaattttttggctcctagacatagagttcatttacctaaggaaaagtttcaactattctagaaaagataaaggataagaaaagaatcgcttaagcgtcaacaatgagaggtctcatatatgctctagcatgcattagaccatacacttgatgttgagtgggagttatgagtagttatcagtttgatccaagataggagcatttggatacaatcaagtaaatcttaagattaaggaagacctaaatgttagtctataacgacgatattttcaaaaccttttaggctacgtcgacttagacttctagatttgcattaatgcttgaaagtctaaatccgggatggtgattaccaataatttttggagaagtgtaaaaacctatccggagtctctaactctaccagtgagacagaatgttaaaatggcccaaaaggctactagataattattcagcctatggaaagttctatatagattttggcattactcctttcatggattaactactagtgttacttcttgataacacacacatagtttccaaatagtaaagaatctaataccctaa

SEQ ID NO: 317129 - DNA, 879 bp, Cannabis indica
tctggagagcagcttggcctgaaccccaaactttatcttctattcctttagcgagaactttgtttttacctcgagtcactgttgctttttcaccaggtgacttagattttaaaattatgacttcacaagctcaaaaatcaaagacccctcaagatcccacggtcactttttgaggcagattttattgaatccaagtcagatcaataggagcttacattggcaaagtacttagatcctgtggcatcaagtacgagaaaggatatcgcgttaggtctgtagctctagtggagtttagctatttctctatgaaagagtgattcgagaagagggttgtagcactagtggattgcgattagccgatgttttattgaacgaaatcaatctgaagatctgtagtcttcttcgcagtaaacaatctacctgcgtctttaagaattcaaaatattttaagtggtagcaagtcccagttccaactgatgaggaagacaaagattacgtagctcacattcacttcttgaagaaagtatcacctcagggaagctgaagaagaagcatccgaggtaataattgtggatggtctcctcctgtgcttagggctgaacgtaccttgctagttaagtttaatgatagccagtataacttctatatctgggatcgtttgtgtgtagattgcctagcccataggtttgacaactggtaccccatgtgtcatgtccaattaagtcgtaatagctcctacttcagaattttcgaacagtatgatactaacttggatagggcaagccatctagactcatattgagatatatctccaataaatccttatgacatatatatgatcactggttctagggagtttagtaattactatagttcttc

SEQ ID NO: 317130 - DNA, 1585 bp, Cannabis indica
attccatttacaattgcatgaacaatatacattttaacgtccaataaaaaaaaatatttctaacttctcatagtccgtaaactaccacattaacaacattaatttgtataaatctcttgtcgaaatctagagtgtcaagcacctctttataccatttcaagcttttttccaaatcaaaactatatatgtggctatgggtttcatgactagctagtaagtattacataaaacacaagtatcattgttagtgataataaacatagttaatctactctctagtcactaaaaaaaatctatttttactgagaaattctttagttataacttaattttttttattatatagtcaccataaaaagttacttgtaactgactaaaatataatacttaaatacaagtcgtcactaatttagttttaaatacaacaaagtatatattgtgactgaaaatacatttagttacaataaaattatgatttttgtaattaatatattttcgatcactaagtcttttagtcacaatatagaaattgtaatttataattaattacaattttttacttttagttataattttatgtgactataaaatagatgttgtagtatgttattcttattgtcttatcttatatgtatgccaattcaatcaattgaaaagtctcatgatctattgcttcacattattaataactataattacatagaaaagaataattaaaaaaaaaactagaataatatttagaaagtggatattgtaattagtgttaatttctatttaattattctatcattatcgatcgatcaccttcactattttatatacgttgtgagaaaggaatttgacttggtctctatgcacaaatttattatatgtattttttaatattaattaaataattataatttcttatattgtaatgaataccacacacacttctatcaaccattaatatctcttatcataattgataaatatcttaccctatgtatttggtttttgattgaaagaaagaaaaaataaagaaagaaagaaatagaaattaattagaaagaaagaatttgctaagtaaaaaagaaaagaaaattaattagcgtgaggcacgttatttttgttttagtggttttttttaactatgtgccttataatattgatgaattttctttcgaaaaagaaaacaaaaattaattagagtaaaacctatacgacaacaaatagtactacaacatcaataaagaaaaaaaggacaaacgagctaggtttgaattaggagcatgcataaactgatttaattaattaattataatcaaatgatctaattataaacttactaccaaatattgaatatctaattatgattgaattagatattattttttattcaattagatcatatgagattttagatgacgtgttcaaaaatccaatccaataattaactaaactaattaatattttaattgaattttatgtattgtgttatatttaaaatatatatgtatatataaaaattaagattaaaatttatttatgattggatccaatccaataaaagtattagatttaaaacattgaatggagtagattt

SEQ ID NO: 317131 - DNA, 1581 bp, Cannabis indica
atttctttattctatatttcccaccaattaatctcaatatgcattgtaaatttttacgtgacattaaaataacaattacattattctcagtatattttcttagagatgatgtaattttatttttatatatttatgcgatttattttaaagatatacatacatatagtgattttttttccttttgagaaatgaatgaaaaattttgacttgaatgcataataaattaaaaaaagaaaattcctatttgataatattttctacgtaaaaaaaaaagagacaaacctggatcctcaaaacgtcgtcgtatgtgatcagtataaaaatgagaaagcaaagaccttggcccggaagtccagagcggcacccaagggatccgcctctcaccggccatttctccggcaaaccagaaaaacgcatccgaaaccaaacacccaatcttcaccccaaccaccttctccgcttccaccaatcccctctcaaaattccccggcaccgcattcaggaacgcatccaccgtctctatcgtcggcgccgccgcagacccatcccttgtcccgtcgccgatgtcgtacggcaccaccttggaagtctcctcctcctccgatgatggtgatgagaagagggttttgttggctcgcgatgtgctgaagaaggagaagacggcgtccggtgccgcggcggagaggtcctggacgagagtgagaagaggagcggcgtgggttccgaaggggaatgcgagtactgccacgtgtcgagtagtggggtcagttggggccatttttggttagtgaatggagaagaaatggaaatgtgatgaatgatttttgttttgagtaaagaaaggagggttttgattgtttgtttggccggcgagaaagttgtgagtgagtttaatttacgtaacggaatttgagaaagtaacggtttttaagtttttaaaataagtgtttattatatacgtgcgttgacgtggtaatgtaacttaacctcaaaaaaatgccacgtaggcagtctcctggcttatatgtgattgaaggaaaagccctacttattctttgttaaaagacatcacaatttggacccaattcatctaattcaattatttattggctattaaattttattatccgatccaatttaattgaattgagtcattggatccaacacaatacatgtattgaattggatcgattccaacctttggatgcattgactgattttctatttgattggattggatctatctaatctattttaggtaccatttaagttgatttcattaaaaaatatatatatacaaaaaaaataaaaaaaatacataatttaaaacttaataattcaacccacataataaatattagtttagtccaacctaattctcatgatctaatcataataaaactgctaaaaaattatatttattagcaattagcaattagaaagagaagaattaatattttaggtctaaacttttttttcattaatttcatataaattaatatatattttcaaataaaatatattaattatataaaattataaatatattttaaatatatatatataaatataattggatga

SEQ ID NO: 317132 - DNA, 580 bp, Cannabis indica
ctaagtttctttacaattttctctataccctttaaataatatatttataatacaaaaataataaaatattatataattacataatatttatttatttttatacatataaacaaaatatagtataaaaataataaaaaaaatataactaacaacactcccatcaatgaaggtgaaatacctttgtagctaaaattaattatagcttaaagtgataaaaatgacatacatcatagtagctaaatgctatatctattttccttttgagctatttcaatttaactcttctctacatttaagagcactcaaatgtaaatgtaaaatataaagaagttagtgccaaaaaatgcctccattctttttaggtagagaagcactattcattcttcaaataattttttaatagtctctctctcttcactttccatcttctttttctttaacattttaatctttttatttataggctaattaagatttttgccccctgaactttgacatgtaccaaatcatgccccctgaacttttaaggtcattgaaaatacccactgaactattgagattgttggatttaaggacttgt

SEQ ID NO: 317133 - DNA, 820 bp, Cannabis indica
acttttaagtttaaaagctttcttgaattatgtcttgccaaaatctcaaagccatatgaattttttttgtgaaacaaaactgcattaacattaattttgatgatatctgtatccaattttatccattgctcgatttaccatcattgtttccaagagacaaagatgataaataagttttacctaagctttttacatagaactttatttattttattatattttaatattgtataaaataaaatactaaagttatttttcattatttttataatataaaattataactaacctattgtaaatagatacaaaaatatataattaatttaattaaaacacttctaaattaagttattattaaattttattttgtgttattttgaaaaacacgggattaataaaataaaaaatccaaatactaacttctacaaaatataaagtctaaaatagtatttgccacattcatattattatctcttctatttaactattttaaataaaaatactttaaatatttgtaacatttttctttgtacattattgttcgtggtgttttatcttttaattattattttaataaggctaattagtaattttttctcccaaactttgacatgtactaaatcgtgcccctgaatttttttggccgttaaaaattcccctcgaactattgagattattaaatttaaggacttttgtctaattttagtaaaaaaattctaacatggatgaaagttcaaggggcatgattttgtacaaagtttggatatcaaagtctgaggatcatgatttagtacataaactgaaaaagtaaattgaatga

SEQ ID NO: 317134 - DNA, 2159 bp, Cannabis indica
tattttaatataccaaaaaaaaaaaaaaaacaaaacggagttaacaacatcttggtttgttcaatatctatttggcattttaaatgatatggcaaaacataattggtggggacaggagtggaacaggcaaaatgggacaggtgatttttttcccatttaactggcttctgtgatttttttaattaactgatttttgtgtgtcaatttatctttttattgtttacgtgtctttttttcaatttttttttttcagtttgttgtattaaataattagtttttgtatttaactattgatttttgattttttttacgtaaggttattttaagttttcaatttttgattttattatttgtaggttactggtttttttgtattattaatttctttgtgtcagattattaaatagctgataaacgtaacatttttttttttcaattttcaacatctaactccgaagatgactccaacatctaacttcaatgacttttcgataacaatgacatctccgacgactttgttagcagtgatgaaaagtctgacaactcttctagtaacttttatgtgcaacagtcataaccccaccgacttttttgtcttcaatgaaaatttcggagttttttctacgagaatggctgctcctataacttttctagcgatatttgttcttaaaaatcttaaatttatttatgggatttttttggggttcccatttttgaaaatttatttttctctaaagttactatattttatatcataaatgatacttgaatttgggctaataatgagaagctgatacgtatgaatcagcccaagccgtatatattattaaatgaacactaaataactcgtctcgggaataatagttaatataaatattcaaactcgtcaccgcttaggcaaaagtgagatgtaaatacactactataatttagaattttagcgacactatatagtgaccctcacttttgtgtgggtcactaaatagttaagaataatttttagtgacccgcataaatagacttaacttttagtgttagtttctcataatacgagtcactaaaaatataaaatgtcactaaaaagtattacccataattttctattttttttatatattaaaaatattgaattatagagtcacgtcaggaatgactagcaaagcatatcctgacatacctagcgcgttactataggttttttttaaaaaaaacaaaattgtaaagacacataaggtcctctctctcctttctcaatagatatttcaattttattttttcatttaattttttttttcatttagggtaatagttttaaaactctaaaatagttttcctctctctccttttccaagcgcctctcattttcagattatctctctctagctctcttcttacatctatcttctctcatccctcttctcccttttagatttataattatcaaccctcctccattgaagacgacgacctcccaaagccaaggagagctccaccgacggacgacgggcacttccaaactttgagcccaagctatctccctctgctctaccctaatatgtccacagttgacatcttcgtcgctcaaacgcccactaaattcacccatactgctagcttaatcggtatatttattttttgtacacctaattatctctctctccctctctctgtctttgatctatgcaggtggacggcgtttgaagatcctcgtgggtctcgcttttaatgtttttgtggctctgggtacacgatcgacgttcgtgttcgaagggcttgggttcgacgggctcggtgttcgatgttcgtagttgacagtgtgtgggactttgagttcaaacatggacgagctttagatttgatttttttggttgtttatgtttattttgttcaaagttcacattgtgtaatattttaaaactaatttaggcctatttcattttaaatgaatactggataaataatctgatctgggtattgtttcatgtatttgtatttttttagtagaaattgatatgagtttgtattaagttttatataatttataatttgagtttaaaattttgtgtaaagactgtataattttacttaataatcttaataaaaatatatattttcagtaaaaaaaatattttgtattttgttttttagttttattattt

SEQ ID NO: 317135 - DNA, 670 bp, Cannabis indica
agagagagagagagagtttgtcaaacacttagagtttgagatacggttagcttagagtcaacttaggcaacttaggttttcagtcagatgttaaggcctttacaaaataccttagaaatcgtatagtcaattagatatttacaaaataccaaaatgcccttcattctagatattattcatccactttgttgggctttaagggcccaattcgcaacccattactcttggtcacgtgtagaagtgtctagtgaggcttgtagagcactccttggctggccaggcctctatagttgctaggctagccggccacagtgttgtccttggactgaccggccaactcttgagagggaggttgtctatcacttgatccccgtttgagtgtcagggtcttcactttctcgggtgctgacttggctttccttttagtgagatgtactgccatgtggcactgattttgttcatgtaagcatgccacgtcataaagaaaaaattaggataataataagatgtggtggaatcattatatctgagatagcataatgactattgtggtggcataattattttatgtagtggcgtattgtatataataataatatgtatactattatatttttttgttactgttgttgggccatggctcacaggtgctctattgtgcaagctaagg

SEQ ID NO: 317136 - DNA, 2438 bp, Cannabis indica
tgattcgacatcacattcagacataatattaataaaccaagaagaacgtaaattttccccttacttaccaaaaatttaagaaaaaaataaataaatatataagaagtaaaaaaaaatacttaccagacctccaattttgaagtaatcaaactttactgccacctttcttgagtttaaaggtgttaaatctgccgttacctacaaaatgttaatgaaaatttgaaggaaaaaaatgtgttttaagagtattgtgcatggttctaaatgttaatcctatgctgctaattctgagttgaatgaaaaaaattcactttggagttttgcaatagcatgtggggtaaagtgggtttcccaaggttacaatagtttaatgatttccttacattttcaataaaatagtatatttgagactgaatcctcttgagaaaagcaattaatatccaaagttaatgacctacaatacaatatgttgtaatcaacagaggatttcaagccttttaaacaatgaagctgtcataagtttcttgaactgttcccttaattactaccagttggaggtgattaatgattcattaaaacaaagtaatgctttgatataaggctttacaaacatgctattgagtattgtacagccatggatcatgaagctgtggcaaaaaatacaataattgcttaacaaatataagagagaaaccaatacctgattaaagaaaggccaggattccatattttgcgccctaagtgtctccacattgatagcttggtagtttgcaattgatcttaaaagtttaggtctctgtcataataacattatttatgcgaatgtcatttgatcatgtatgaaacaagtctttttactattggtttgacaagaaactgtagtatcaattgtcatattgatgtcttctgccaaatagaaaatctagtgatgcattaaaaacaaatgatcaaactaactgccaaaaagatggaagtaacataaaatgactaaagtattatccttttaaaaaattcctaaggacaaaagatacctgggaaagacataacaggagttgagactatatagaaatgtgcagaccctttgtgattaaaaagttgaagaaataaagaggagatgtatatgtttttatggagagagtgcattttcctgaggtatgttataatttttcatccccaacacagtgcaacaatatgtggaaaagaacataattactttattattacaaaaagtaagcaaataaaaatcaatatttttctagttttgggtttaagctcaggaccaagcacaaggctagaatattctagtttcttgaaatcagttcataaactgacttatacaagtataaataaggaccttaagttccttcctaattctataataatgcacatatatatattcataattaattaattaattataatgatctactaatttctatgtataattatacagttattatagtagtagtgagcgatgacaatagtgatggtggaggtggcaatggtgatggtggaagtggttgtagtatacagtggcggtgtaagatggtggtcatcgtcaacaattttttttttttttaaattttgttatttattttattaaattttataactttttcaattttaaaataaattttgaaataattatattaaatgtaccaatataaatatatcacgtgtataaaaatatatacataaacaatcacattagctgttaattgtggtaaataaatgacattttaaatttattaaggattcagtagtttgataaatttgaccaccaaaatttgaatttaaaaaattaagtaaaagtaaaatgataattgagagtttaacgggcaaaaattcttaccaaaaaatatgaacaacctttataaaaatcataataagaaaatattaggaaaagaaaaaaataaataaatccacgcaaatacacaaaaagaaaatacggaatattagagataattaattacagtgaaataattatttggttaaatagtcaatttgtataggctaattaagatttttgccccaattttgacatgtaccaaatcatgcccctgaacttttaaggtcgttaaaaatgcccctgaactattgagattgttaaatttaagaatttttgtctaatttcatgcaattttactacttcagtgattgtttatatattaaattatgctccccagactttgatatctaccaaatcatgtcttttgaactttgacatgtactaaatcatggcccctggacttttatccatgttagatttttttactaaaattgaaaaaaaatccttaaatccaacaatctaaataattcaggaagcattttcaacgatcttaaaagtttagagggcataatttggtacatgtcaaagttcagggagcaaaaatcctaattagccatttgtatattatgtaataaaaagtgtccaaaaa

SEQ ID NO: 317137 - DNA, 1025 bp, Cannabis indica
ccaattgaatccaatacgcacaaatgtgtatccacactttgcagattgtgcaaattgaattagattgtatattttataaatatccctaccttaaagttattacctaagatatatagaatctaatatttaattgaaccaatatcgatataacattaaaagtgttatgcactatacatgccttctagcatttttcttataaacacaccaattagttgctcacaattcacaccaaatatctccttaacccaattacaactcatataacaccactcactcatatttggaacttgagtctcattaaatataatatttttggttgtcatagaacaaaatgaacaatagaaacaagtagtttatcacattcacaacttcaaattcatcattcattcccaaagtaacatatattgactggtgcaacaaggacaggtagtgaatccatttggcctttcatgcttttaggttttagggggacccatatttttcgtgttgtgtcttatttgagttgtgtttagaacttcaagaagatatatatcacatgatttttttttccttcttttcttcttttttggtggcctaacttaaaataaatcaaagtggagaaacccaaattatgtatcaaacaaactcatagactttggtgtggaaacagagcaaaaataccaaaaataaaagtgagaaaaaggagtccaccaaaaaaagacatcaaaagtgattagaagcattacaaggaggaacaaataccattctcatgaaaggcataactctctatcaatgcagctataaggaaatttacattccaaggtccccggaacgatgcccatctcgatttttttgaaaaatgttggggaagtaggtaaactgtttatacatcccaaattgattttatgccaataatcagaaaatggttaatttggccaaaacaaagtagatggagttgtaaacttcatttagtatttgctctcatttacctgaatgccaaacaaataatatatagattcactttttcaactgatcaaatatcaaaa

SEQ ID NO: 317138 - DNA, 574 bp, Cannabis indica
ttcatcgttttagaaagttcaaatttaggttgttaatcaacatacttgtaagtaaatctaaaatcctggtaaaataatttgcaatagatgaataaagagagagaataataaaaagtaatattaaataatgtaggtaatatacttatcatccaaattaaattagaaaagagaacaaaaatgctgtcacatgtgacaataccaaatcaaatcaaacttttaaaataacttaaaatataataataataaaaaataaaataaaaaagcatgcaagctaccaagtttgagtcaaaaatgaaacaatttttttttttaaaaaaacagtatattagtataaaatcaaaacagtaaaaatgttataaaaagcgagtaatagtaaaaatataataaaattgaaaaaattagtataaggtgtaaattttccaataacaaccaactctaaaataaatcggagaataaaaagaataaaaaatctatatataatataaaggaaagcacaaaatgagtttaggtggcatcttagatttttttatactatttttaaaatttgtagtttttttctattttgtttagaaaa

SEQ ID NO: 317139 - DNA, 526 bp, Cannabis indica
aacttggaattaaagtttgaaataatgaatgcttacatataattctaaaggcagtaatattgattggatgaagcccgattgtctaaaagaaattgtgattgaacttctttttatttaggagtctaacaataatcttattatcgttagaatgagtacccaaatagtagaagccacctgagcaattcttcctcgtaggacatgcctttaaggcatagaagcacatgatctctaaaggagttgggcactcccatcgtaaagcgacttcaaacaggctaaaatcctatatgtttttaggacaagttgaagaagtccttgaagtactgattgagaggaaggacgacccctgctataatatgcttgacgctccaagcgcctatccttgaagaaccacaagtgctgcaacaatgagttggaggaaaattcgacatccctcctcattcttgatgcctcaagaccttaagaacggacccacatatggggccattgacctaaccctattctcaatcagttgagcctcaaattggac

SEQ ID NO: 317140 - DNA, 2258 bp, Cannabis indica
aatttatcaattttttttttcgaaatcattttgtgttacaaacgtcaaattaacaatagaacaaccctcatttatgtttttgcatcataaattaaagaatatcacatttgtgttttcgtttttttgtttaaaacttcagatctaaatcttgtttttttttattttttatttttttttggtttcttaagaattaaattattttttgggttttgttgtgtttacctctgttattttggggggacagttttctgtacgtcttgttcttcaattctgattccttttcaaaaaactcttcgccggatttaatggttttttcttggtgatttccgtctccggcgtctccccacacacgaacaaggttgtttcccgtgtgttttactgttcacagtataaatgaaatgatgttgggcttgggcagtacaaaagtaatgaaattgggctggggcagtaaaaatgttgtttttgccgtgtcccagtataattgtaaagttttggtccaaaagcagtatttttgtaaaattccctttatttttttttttggtgagaaatttataataatatatatttttttatatttaatttacaatgataacattattattacctactcttcaaccaaatttgatgtttctaaaatattttgatattttttttgtttttagtttttttgttttattttcttgtatttttaaaaataacttttagttactaaatatttttatattagttaagtttatataaaaaaattatttttatcatataatttgagatacattttacttactttttaaaaatttatttgtatctatatttgtagctaattagttatttttaagttatattatagtatattataatttaaaatacgtaactttaaaaatacttttgaaactaattagttgtcatgtaatataagaagctactatttttatatatcgattattttgtatacctttttgttattttaaaagttaattagttatcgtataatataatatagttcaattaataaaattctaaaataagatttaaataaaattataaaacaataactaaccaatatattagtaactaaatagtttctactctgaaaatagaaaaaaaaaatatataattctcacattttgaaatatttacattgaagagtaatcgtaataatatttttttaggctcatccgagtaatgacataatcaaaattatttttaaaatttgagagaaaaaagagaaataagaaagagaaagaaaaatgagagaaaaagagtaatataagagaatggaaaaaagagaaataaaaaaacaagaaattatgaataagactattgaaatgtactcaaataaataaaaatattttaacaattaaattaaaaataagttattttagacaatttttttaatatgtgcttatgagaatgagatccacctataggaaaagaagcacacttataattttacaactcgtaactgtctaatatttcaaaagtaatataataatgcattcttattttctccgcaaaatcttgtttagcataggaagcaacaaagcgcctggacctgacggtatgtttgctttttttttttttcaagcattattggcaaatagtgggggacgacttttgcgcggccatttcggacttcttttgttcaggatacatgcacaggagagtcaatgcgactaatttgattttgatccctaagactcgtaacccgactagaacccaccattatagacccatttctctatgcaatgtggcctataaggttatttcgaagagaattgcaaatagaattaagcctttactccctaactttatatgtcccacacaagctgcctgtgcctgggagggatatctaggataacaatgtgattgtgcaggaaattttccacaactttaaaaggaaaaaaggaaaggagggcttgtttgccatcaagatcgacctcactaaagcctatgacaaactcagctagaattttgcggaccatgtgttgaagtgttttggggtcctggagaagttctgcaattgggtgtcccagtgtattacaatgtcatatcttaatgtctactgtttaacgcccaaaatgtgacttccactagcagtagctatagtatagatcgggcggtcgattccacaaggaggtgattatggacaaaaacgttagtagaaaaataaatacaaaaggttaatataaagagtgacaatagtaaccaatgagtttgaggatttttttttgtgttttggtaataaacattaaaagaaa

SEQ ID NO: 317141 - DNA, 663 bp, Cannabis indica
tttcaacttaccccaaaaaaataagatgttaatatacacaaattatgtgcttataccatttttttgtttggtaaaaattttaaaacatttaaattaaaaaataactcagttagttataaaaaaaataaatcactcaaatctattgaaatataacaaaacattaatttttttaataatttaaagatgaaaaataatgtattcaaacaagtaaaatattaatatattgaaaaatgcaaaagaaatggtaaaaggacaaaagaaacttggaagaataagatagaaaaagaatgaagataaacaattacttttacgatttaattttattttatcttattgaaatccattttagagttcaattttaaattatttctttcatttcaattaaaatagttttttagtatattttattttcaataaattaaaaaaatgtattgtaattattttgttagggaatataatataataatatattattgttattaggtcatgtaattttatcttctccctcttttattaattgtaattttactaatattagtagattctgtaattttgttgcccataatgtagttaagtgggtttacccactatttgtacgactctattccgattttctctttaccagagaacttattttgtaatgaccgtgaggtctaactgttt

SEQ ID NO: 317142 - DNA, 583 bp, Cannabis indica
aaaaaaaaaaaactaaaaagtaaggttaaaaagaaagaaagtgattgaagatgatgcagaagagacctttggtaaaagtgagaaatggctttggtaaagataatgtgtgttgatcttaaaacataaattgatccaatatgattgatgtgacaaccttgcaatttatttaacaattaaaaaattaggtacttataaaagttttagaattataacttaggtattattaccacaaaaaattaaatttaagtatttatttgtaactgaaagttaaacttatgtatttataccgtaaattattctaaatataataatagtgataatttaagtatgaggtgtaaatttctcaaaatattttagagtgtattcataaattctgaacgtattataaattatgtttattttatagagtctgatgataatattatttatatattattatatattaatatggacactcttagaataattctttactatgatagtttacctggaatattttaatattctgctacttgaactaagaaatactaatgtccataatagacaatgagagaattgagattgaatggacttaatgaatgga

SEQ ID NO: 317143 - DNA, 786 bp, Cannabis indica
ctctctctctctctctcactacacacacacacacacacacacacacgctgatagaagggagaatttgtaagattggggcaaaattatgattttttttttcttttgggtgggtggctaactcattgactacctccatcactgcacacacttcacaatttgatgtatatgtcctcaaactcattattttgtccccactttctattttttcttgcggaattctatagagactattctagctgtctgatgtgatccagggattttattttggtaaaagttgtttttaataaacagatctgtgtacttataaaactttttccttgtctgtaggtatctcaaacgaggtgtgaatgaaaagggcagagtagctaatgatgtcgagactgagcagattgtatttgaggatctgcctgatggatttcctgtgcaaataagttctgtcgttcagaatcgcggctcaatccctcttttctggtcacaagaaacttcacgtttgaatatcaaaccagatattatatgtaagtactgattttataagtttaaccattgtacatttttgtggactttatgaatggagatgtctcttttcagtgtcaaagaaggaccagaactatgaggctactagacttcattttgagaatcttgtcaagagatatgggaaccccataattattttgaatctgattaaggtaatcattgtattattactaatattattagttgtttttttcctattgtcttgcttttatgataaaagttgaatacataagttatattgataatctttat

SEQ ID NO: 317144 - DNA, 1161 bp, Cannabis indica
aaccatgcaacataaaaacgatttctaatctttattaattagtaaatctgattatattgaaatgaattttatttagggcacaaaacccaacatgtactacctgagtcgcgtagtggtaataccattgtgcatgagaatggtacgatggatggtgacgtggcgaaatacacttaaggatcctatgaggtcggctaatgtgaatggtggatgtaatgtctcatccacgattgggcctaagggttgtgggttaattgagaacatggaaagcagggtaaatcatttagctatcatttttaaaggggcctttggggtaaatgataagctggcccatagacagtctcagcccaatggcaaggtaaaaggtaagaacttggtgagagaccggcccagacctcatgttgttaatggcctagaatattccactattgtgaagaaaaggaggattgaagaggtggaagctccttcgaaggagctgggttttccgtttggttcaacttgcaaggtgcaagagaagaaaccttgtgtcggaaagggagaagagaagaaggggttggaggacacttggaaccccccaaaggctaatgaggcaaacgctattgaggagaagatttgcttgattgcgagaggctctacgtgatagtgtggctttgtttaagaagaagaagaagaagaagaagaagaagagtggctgaagatgatgttttgtttgattgcgagaggctctacgtgatagtgtggctttgtttaacaataggctatgatgttgcaataaatccaacatgcaattatatgtattatttgtataagtaatactcaggtaagtggtatcgttctcatgaggactgtagctaagtaccaatcaattaaattcttgtttttatttgataattaaaaaatggattgtgaaactaaataacctaagaaagaattaaataacaaaacaataaataagatttaattaagaaataaaatatagggaaattaatttcagtttcttccacttccacttcctatttcaataatgcaaactaatattctttttctatctagtatgataacagattataaaataatatatattctgagtaggacatattaattctaaattatatggcattatcctacttttttgaggtataacacacatataatcaacattaa

SEQ ID NO: 317145 - DNA, 1623 bp, Cannabis indica
ttggttaacaaaaatttgcgttaacactgggcgtgccaaaatttatgttaagcaaaaaaaaaattcacatttagagtattaaaataaatacaaaacataatttcacctatgccaaatttacagcataagagtttattaatttacgttcgacccatctataattataagaataatctcgtaattataatcatttttttaaaaggaaacaccctttgattctaattacgatgatattaaacttcgaggtaaactttgggaaaaattagggggaatttagaattgcagctgaactcagtaattttttgctaaccgagctgcctacatacattctttgtgaagaatcaagctacttgtagttcagaaaatagtatttttgaatttgaatataaggattccggtagataaccactttcaagaatcttttgctatgtaaaaatttagaaaaattatattgtaagtagtttagaaattttgaggtcttctctttgaagatgctctttggttgtaaattggtataatgaatgaatatacttgctgatttctcaaaaaaaattggaaaaattcctaggtgtatgaccttttatggaattttgagatttatgtttcataccattttgtggtatcggcgattgcacttagtcttagcaactaagttgcctacgtatcctcttatataggaatcatgtcaaacgtagttccaaaagtgttaaaagattttgtatcttcgataactttgtggagaattaatgcactttgatattttgaggtaaatgaccacacttgggatttttgaggtgtatgacctcatttagaatttttataaaagttagtgacctcatttgaattttgctgagatgaatgacctctttgagaactttaaaaattgcgattatacttaatcttggcaattatgttgcctacgtatccttttgaaaggaatcaaatcgaacgtatatagttccaaaagtgttaaaagatttttgatatcttgacattaaatttctttgaattaaaactttcttttagtctttcaatcagcattgatacatatattaatatatatatatctagtgttcctttagtggggcataatatatttcttattttgcttcgtacaaggaaagttgtttttaggtacaagatttagattttattggaataagctatatccctcttgtaaaccttattacctgatttatatataattatagcatgaagcgtgatactaaattttcattactgatatataccaaacatatatgcaaaaatataaatatatatttattcattaccgagatcactttgattatacttcttttggatttagattgaaattttctacgacaattaactttggaccatagtacgattttctcaaagttatttaatcgtaacttttcataattagatagctttttttcacaaaggtagtagataatttgttaatttggttttctttaattatgctgatttttaatgagaattttgacaacataacatttttatttatttaagatttttgttttcgtctttaattatgcacccccacattgacttattttctgtagtctaagaaattaaagagaaacataaaaatcatcaataataaatttgacagcataa

SEQ ID NO: 317146 - DNA, 2360 bp, Cannabis indica
aatgattttccaacccccttcacacacttgagaaacgacctggggtacaatttttgtcccaagggataagatgatgttcatgagctacacattacagcttgtggtcttgcaccttgtacctttgtctagtgttaggtagtctcaagttgcatggattgtttgtatgcactcttggtcgataagtcagcacttgcaggtgtggtgcctccactacttgtacctccttaccttcagaggttgcagaagacgtggttgtgcacacctcgcatgcacaccttgtccttgtgattgtactcttgctaccctcttttcccatacttatggagatttcactaagcataactatgttttcgttggagcacacctctatatgcatggtcatggccaagtgacatttctggaaacctgtctgagtgacttccttgaagccttggctgagtgacatttcttgtggtggccatatttgttctagggtatagccaagtggaatttctctttgtcatggctgagtgacttcaaggccgcattagctagagacatttcgttttcagggtcaggttgcgtcttggaaaccttggctgagtgacttccttgaagccttggctgagtgacattccttgaagccttggtcgagtgaaatttccttgtctttgccaagtgacttcttggaaaccttagtcgagtaacttctttgaggccttggccaagtgacattccatgaaccattgcttggtggccatgtttcttctagagtttggttgagggacttcaaggccactttggctgagtgacattctagttttcttgatggccatatttcttctagggtttggccgagtgacatttctcttttccatggccgagtgacatctcaagcgcatggtcgagtgacacctcaaacacatggtcaagtgacaactcaaagctgatggacgagtgacacctcaaggctcatggctaagtgacatctcaaggctcatggttgagtgacatcacaacaacatggttgagtgacacctcaagcacatggccgagtgacatctcaaggctcatggctgagtgacatctcaagcacatggttgagtgacatctcaagcacatggccgagtgacatctcaaggctcatggccgagtagtcttccaccaaaacctttggttgaatggccttttttcaaaccctagccaagtgatcacccaagctaggttttagtcgagtggccttgggacatatgcgtcgactcggtcatatctcagtcaactcttaaagtcgatgtccctccttcctcgagaataattattttctaatcttgagaatcaaccctgtcaatttttagggttaacatcttagtaattataaaattatatttactgagttttactatagtgaacattgatataatcaatttaagtgattagccctccttgtggttgtttgtaattagttttggtaaaattactgttttacccttctatctacttctgtattctttagtacagttaattaactagtgaaaatataatttagatctaatctaaaattgtgcataacattttagttacataattataacttaaagggagccaacattcaatgcattaggaaagttaggattccgcaattgtagatcatgttcccagtcatctatattattagaatcctaaaacagaagttgtatgatacatcttctttgagaaactttaacgtgtgaatcgaataacctaatatgatgaatatgtgttcatgattatttaggattcaggtcaatcttgcaccgaataatgggcatcactgaactgcactagcaactggttattaaagattcctcaactttaatatgttgctgactatatattcatggctatgtgatattaattcttcctataatgcaagtcacagtctcatgtatgaataaaggatttttcaatatttatatataaattatgcaatattaaatatgacaatatatatagatctattttggggaaatttatttgggctctcatgaataagttggacattctttgagttaaatggacaaacaatatatatatatatatgaagggtgcagatttttgggagtatgagttgaaaggggatgtaagttggtattggaggaaaatatgccaactaaggaagagatttcgtaagcacaatctgattgctgctactacaaatgggaagtttagagcatctcggctttataatggtctctcacagcaggatattgattgttattataaggctgtttgatgcaatttatcgctgcccaagcatagattcatcctttggtaggtggttcatggtacccgtctcacaagagacaactttaccaagtttcacattgagttagagattaaag

SEQ ID NO: 317147 - DNA, 1110 bp, Cannabis indica
ttcttcatgtgttttacttttgtttagtattttattcttttttattcttactcttatgataataaatatgcaagcaaagaattctattaatagccaaaagaagaaaaataaaaactgaaggacgtacttttctctcaaaaaataaaagaaaaactgaagtatgttgtagtaatactttaaacttgaagaaatttatttagtagctacactctcttaaaggatcattttggtagatcctttatatatttcggcatgtaaaaaagatttagttcatttttttttttcataacggtgtatgttgtagatatatattatgatcacttataaatatttagaaaattccaaataatttacagtactcaaaattaattttaaacagatacttacaacgcgtataagaaaatatagtcgagcatgcaacaaaatatttaaatctttttcgacattgtaaattacttgaaatttttcaaaaaattacaactgatcctaaataactataacgtacatgatcataaaaaagatttgactaaaagaactcttttgtatgcaaaaagagataggggtatgttaaaacacccctttatggggtgcactgtagaattaccttcaacttttaatgtgaaacgttggtgatgcttgattattgaccatcacctttgttgctatgatgtttaaaatttctttgtaacggtctaaacttgactgctcttgcccccagtgttgatttctttgtgactggggtggaaaactttaaagtttttatattgaagctatttgctgtgagtaagatagactgttgttgaggtgtagtgggttattgcttgtgtgcttggtactcaagcatgagctcactttacgatcataagtgagatgaatcactgtcgatgggtagtgcagaaaaacccgccagatcttctatataggggcgaaatcactagttgttagagaacctggtttgatgatttcaactcatagattcatgtcaaagaaaaaactctaagagaggaaaaggaaaaaaataatattggactaaaccctcgctaagtacaacgcctcatacttaggaggagcttagcctttgaaagaataccacaactggggcagcgtccc

SEQ ID NO: 317148 - DNA, 1361 bp, Cannabis indica
gatgtataacaatacatccaatccaagcttattttaccaatgacttagaaaagacataacactatccagtccgatggaaaaataaattgatgggatcacatacatctgacttttaattctatttttatcaaatggcattagctaatcgagggaaaaattccaaaaatattttgtactgtacaagattgtgaattatatttcaatggagcaacaaaactacacttgtaataattgtgatgaagagaaaaaagaaaaaaagtaatagcatctaaaacttgagtaattatgtaatcaatctaatatattttgctttatcaatgctgaactcaattgatgagtaatgacaagatgcatcagcatggagtgattgatgagtaatttctgtattcttttctttttgaatatattgtcaaaatagtaattatttatttgtaataaataagttattttctaatttattatttaaataaattggataaaagcaaaagtgttgcgtggacaaagacatcactactgtctagttaagacaatggtggcgccacattcactgtattaagccacagtgataggcgcctattagataaggtgaaccctagatttatttttagattaattaattaattcaaaagataaatatttatatgaattcaaatttgaaaagtagttacatatatttattttagttgagatattccctcaaatagttgagagattctctccaagtgattgagatattctcccaagttgttgagagattccctcaatcatttattttggttgagatattccttcaaatagttgagagattctctctaagtgattgagatattctatcaagttgttgatagattccctcaatcggttattagatatttagtttaaattaatatttaaattcaaaataaatatctataacagaaccagttaaagatatttatccaatatttgtatcttatttaattatttatttattattattttattggtttgaattaatatactggtataattctaaatctatatatgcgtataatttaggaaacctaaaaaagttaataacaaccatatcattattcactctagagagaaagaaaagtttttcctcatgcattgagataaacgcaagagcacttgtacaattttatcctattagcccacaaatctttgtttgtgatggaatatctggacgatcacggtgtgagtttttcatcattatcttagggataaaacttacaaaaagattcaaggatatcctaattcgcttcaagaggtaattattttctttcatcttttttttttttcagatttgatatatatatctttatatattaaaagtgcctatctaacgtcatttcttggtt

SEQ ID NO: 317149 - DNA, 1213 bp, Cannabis indica
tttttttttctaaaattttcccatgaaataacgcttttgagaaaccatatttttacaaatgtataccttaaaaactataaaattgaaaattaccttcgcatggccttgaattttggtgggccttaaaaaaattattaagctcttttattgaaaatattggctcctaagtcctaaggtacgtgggccttaggctaaggcctaaggcatagtccgccttagcccaagcctaaccctaaaccttcgactatatggaaacccgagcaaagttgcaataacagtctacaagtcaattaagttattgaaaagactcgaacctccaataatgtgggactcgagaccagaaaactataacaattgttatataggttttcgggaaaactcggacctcccactaactaggtggtaggtccgagtaggttgttatgagtataaacaagacttaagatcaaaaattcaaaaatttgacgtgtaaaaggcactaatggtaacaattgagttgattctaagtaccaactacttaagggagacacaaaatccgtaattaatggcttaaatctacaatgaaaataacacctatcactttcaataaaaccctctaaaatactctaaattttaacataaataccctaaaactaattattttttttaattgtttttaaagcacgttacaactgattaattaatgacatttataactaaaaaaactgctgtaaaagttaatagcaattaaagttaaaaaaaggaaattctatctaataatgataattaatattaaattaaataattacataaaacactatttttttataaaatttttatattattacgttacatttttttataaatactaataatcaaacatcaaaacaacaaaaataaataataaaagattaacaataaattaacaagtatacaatataaaaatacaacaaaataccatatattttttttgaataaaatcataaaaaaaatctaaaaatatttaaaaatctgcataaacataattctttttttaatttcaattaacatcttgaaccgttccaaatgggcccactacattacgctagatttcatgtggagcccacaaaccggcccaaaatcaaataaagaggctacaatgaactggacggactccacacagttactaccatggacatgcgaagcagcaaataaaaaatacaatatatcgtcgagtattactcacctgaaataa

SEQ ID NO: 317150 - DNA, 1528 bp, Cannabis indica
ttagaaaacaccaacttctgatagagaactcaaaaatagggtagaagagtaggaattgataattgttggtgttgatcgagtttttcaaaaaataaaatgttaagaaagattaagctaaagaaaaatggaatacaaaataaaggaacacacaaatttttacgcgattcaagtgttaatgagccttaattcatgatgcagctttatatgcttttacttttagtaatggagtttttacagctctagtatgtattttcaggttgtgaaactctttacatgaaagagataatgtcttatttataggagcatagacaaaataacaattcaaccaagtgtgaatgttttattttaaatttcagatcagtactatacaaaaatcacaacatttttgtccatttctttgtttcaaatttgatcaccttccaaatcatatgtttttcacacttccaccccaattttaccaattttattatgaccttaaattcataataactataaatgatggtgctcctacagctgagtagaatatgatagatttcagtttattaaaaggagatttagtatctacagtagttgaaatttttgtttgttgtaataatatttttctcctattcgttacaacaatttgtcggcaattatttttagggatgagacttgagaagaagattaaaataacagataggaaaaggcaaatgttttacaacgatgaggataggcttaaatcttagtaggcaatcggaaaggagatgagcattctatttcgtattttctttcagggaaggaaataattagtagggcaatctccataggtgtattattttggtgttttgctctaaaaaatagcgtggaattttcgctcttagagaacaccaatttagtgaagagctcggaacttttgtttgttaaaaaaaaaaaaaaggaataattgcggtaaaaattctcaaaaatttaaggttgatcagattagtctttaattttgaaaattgggagtaatagtccaaaagttactatttttgttaatctattggctcctctttctaactgattcttctaactgatccgttaaacatgttatatgttaggttttgactggtcaaaataatagtaactatatactttctttgctttttttaaaaaagcagagtagtattaacaaaccttaaaaaagtaatttgttcagaattgagtgacattgccactttggagtttgcactttggagtttggactgatgatggattctataatattcataatttgtatacttttgtttatgtaacatgtattattataatttgatattagacttatgttacaatttaggatggatttatattagatttatgttataatttaggttggatttatgttggacttatgttacaattaggttggatttatgttgggttgtaatattttgaactaatatattagtagtttaggtgaaaaatcaggtattactcttggattaaaaatattgaatgaatctaatatctgctctaaaaaatattggatcaaaagtattggatggat

SEQ ID NO: 317151 - DNA, 1802 bp, Cannabis indica
tatagctataattatttagtgtgcatatgaaagagaatgtgtcaataaataacaaattaatcacctgctccaaccaaaaatttaacctaatatttatatatatttgacacccagttggatgaggttgaaaggacacctagcttccatgaatgataaatacttgcattttatatctacctgacctgcttttttttccacaaaataaaataaaatatgaccctttaataaagacttggaaatttctcatagagttaatataataatatacatgctctttttggtcttctggtgggaccttcaaaacattccatttctttaactgggtagtgggaaagcgtggattaggatgatcataaactatctctaaccaagtcaatttgtccacatgtatagtccatccactataatatacacttaaaataaactaaagatctgtgtagagaaagaatatttgatgctgtcttcacgataaataaaaccctgtttttcaatttgtatctctataaattaacaaagtaaatgtgacaagtgacaatgtgctaaaatattaaaataattcactatcaatgtttagcaattgaattatatcccccattttaggtacaagtataagaatatgaaggagaaaagaatagctattaagtaaaacgaagagtaaaaattcctataattacttagaggttcctatgaatatgatgaaagaaaacgaaagcaaaagccaaaagggactcactcactaactcacttgatcgtctatctgtacacatgtgacccaaattggtcacttgcttttccgccaactacatttgacttccttctatcacaaatactaatgtctctctaagtggaactggaacctttattattagcttaaatttattgtaatttacacttaattgttttttgtttatttgacatcaattatatttttaatttgttcactttattttttttatattttatatagtttatcaatctattaaattatttttcctattttcaggattacaaaattttatatacttgattggtccaaaatctaaacaaaacaaaacaaaaaatgatatttaaatgtaagtaaaataaaattctgtatattttaactacaaatctcccctcctttttacttttcaaaaaggaaaaagggaccctatttttgtgtctatatatatgtcttgggtcatgtagttttgttaatttagaagccggagaccaagtcagggagactggcccagaaaaaactgacataagttaagaacggcacaaaggtaaaaataccagcaaatataacaaacactagtgagcacctcttgtggtatagataatatagataatatatatatatataattatatataaacagagtattatagggtctaataacattgatactcaagaaacacatacaatttctctactatactgatgaaatttgctacacatttctacacaatttagtctagaaatttctatacacttgtagaaaaattatctaagaacttaagagaattctagattagattaaatctagaatatactagttatgttgtattctagaaatatttagatttgtttggatataattccttctagtaaaagaaggatctagaagaaataattctagccataaagtgtaaggggtgagcaactataaataccccatcaaacttccaaattgtaaccaagcttgagtagccaaagcaagtcttttactactagcctactaccttgtctcctctcttactacacacataaaaattaaaactctacgtaacttttccttgtcccaccaatcatccaac

SEQ ID NO: 317152 - DNA, 1128 bp, Cannabis indica
aaaaaaaaaaattgaagtgtttaattgatttaataaatatttattttactaaattattttaagaattttaattcttattagtagttatgatataatttgtactaattatttcataaattagttattttgagttattaatgtaaataatataaaatgcaaaatcttttaagtgaaatatatttctatatttagtgtgaattattagagttgttatactaaaaaataaaagactacactaaattaatgtagattacacacaaaattagtataaccattaaagatggtcttaataaccatcagtcatgttgtcaaataggattacatattctatttttttaattatatcatatattaatatatagtttgaagttcaggttagcactatgaactacttaattattagtgacaaacaacattatgttgcggctattatctacaccaaagagacttgtgttcctttgtgcttgtttgtatgatattggaacatgttctacatggaaagacaaaattatcctttcttcttcttttcttttttcattttctaaaaataatagacaattttgacgtgaaaaaattagacaatttattgcatcaagaattatttaaaaaaaaaaaaagatgttttttatggtaagatgataaaaattaagataatgatattagttttttgaaaaaaaaaagaagaattttattgatatttaattatgaatgaactgttttacaatggtagcagtagaagtatttatagacagtgtagagttagttagatcaaccaatcagctaactaccactaacacttaactaacttcttataactaacatagtctaataaatgaaggtaattatgttttgtaatgagtaaagaaatttctccatcaacaaaagcctattgtttatcttaaaagcataaaagatatattaagaaaatttaaataataaaactttaaaaaaaaaaaaacttctaatttgtgatagaatatttacaaaataataatataaagtcaagttagttgacaaaatattttttcatttatggtaagattgttttgcattcatacccgatttcttaccttgtatattcgatttttagttgctcttttctttcctaggaaagttgcacttttcagc

SEQ ID NO: 317153 - DNA, 1794 bp, Cannabis indica
aaagcgtaaaaccgctccaaaagataccaataactgagaaaatacttacttattagacccgtaacataggctaaatataacctaacaaagaacaagggaagtaattttatttatcgagtgacgagaagaagctacatggtgaaaataattaatgggtgcttttatcattaagcttgagccaattcattcagggtcattgttgccaatagagttcatccatgtaaaggaggcaatcaagagtgctttgtagatttcagcaagtgtttaagcattgatcattgggttgggagaagctctgagcaagatgcaactgagtttgggtttcatgaatatgttgagtaataggagggccaagggttttcttccaagattggagtgtggattcacacttagtgagcataagggaaatattttcaataggatcgtgaacatgcatgataggagcagagcaccaattaagcattacatatacaatcttcaaagccatcctcagtaagccatgtcttgtcaaaatggaaacgagatggtcactaactgttattctaagtgcgaccacgaagagaaagaatgagggcacggtgattagagccaaagtaatcaccatgataaagatgaacttggggctataaagagtcccatgcaaggttagaaatgccccaaattaattgttcttgcgtgtgagtaagctgagattatatgttggtctaagtgtaaggactaccatatctaggaatagtgtatgtgaagagtaaaagtgtccaagaacaatctaaattgagacgaaggatcagcatcagaagcgcctccaacattatcaaaggttgtaaggaaatcattaaagtcccccatcaggagctagagagtggtaccaacattaacaccaatgtgatgcaacagttgccaagtatgagtgcgatgataatgattaggagcacagtaaaagactgtaaaagaaacaaagtaattattggagaaattgatgtagcagttaaaatgatttatattataggaaaaacaaagttacatcaatgtcattagtccagggaaaaagtaaaccgccactaaagccaactctagagacttcaagaccattattaagaaacttaagtttattcttaaacatttttacaacaccaactaagagtttaatctccataacatacaaaaggattgatttacattgcttcactaagagagagagatttcagaacgctcagttgctccctatttcacaaacattccaattgatgaaactcatgtgtccttgcgggtgcgttgggtatcagccaccttaatagagctagtttcatcaagagagtgggaaacgctgcagttatgtttcaacatcttcaaggttgtctactttattatttagatattatggcaagagaaaatcattttacaaatattatgtttatatgacatatataattaagggtgattctagaatgcacccctttacaagagatgtactgatgcaccctctacttatttcagaatccagaagaatttttttaatttaatttttttttcatattcatgtaccttatagctatttaagatatcctacaaaattttgagaaattcagaataatttacaatatagaaaataaaattcaaacagtctattttacacgcgtataaaataaaatagtcacgcgtgcgacacaatgtttgaactcagttttcggcatgttaaactttttcgaatttcttaaaattttgcaggatgtcttaaataactataatttacatgaccatgaaaaaaaaatttaactaaaaattatttcggat

SEQ ID NO: 317154 - DNA, 1111 bp, Cannabis indica
cttcttgctcttccaccctttgcttcagtgcctcatattcctcttgagtgacagtgggctacccggagggacctgccctaggagttgctctttttgcgtagggtctcggcttctagagtcgagcgagtctctggctcacgggcgtcttccatggggctcgcatctaataaaacttctcgtgcaagaatctgttccgcgatattaggctcttacctttctggagcaaggagaaaggcactttggcagctttaacgatttcttgactttttcttgattaatttccacggtcatgcttgcgaaaatctggataacatttactccccaagctttcgggacatgccattgtccaggagcttgtagtatctttttctaggagatctttcgcgcacgtggattttttgacaagccttttaatgttgtacatcagcaaccgtcaaaccaaagcgtcattatgtgggaggcatgatttctcccattttcttgtcagagttttaaatgctaacttctggactcttttatgcgttctaggcacatatctctggggaactcaaaatggcagcgattggacttaggtagttttttcttcgagtgtttcttacgatgcatgtaatgatgggagccgtctgttgggaagtgaggtatcattgcaacttctcacatccaatcatcggacatctcttggggcaaactgaagcgtctgctttgtgtgaaatgtgctccttctagtcatcccataaatacttacagtagtcaatccatttttaactcttcttacccgtcaagtcataacccttcaagttcccttcttcctagacattcaaacgctgctgtcatcgaacactggttttttgccaaggatgccacaccaaaattgtctacctcatcaactggtaagttattcatgtacttgaatgtttttgagggagccacaatggtgtattcgcttctgggacaccgatttccagtggtgtcattcttgggaatgattgggtgaagtagtgacccttctccttttgttgtgccaatctgtggacacgtacatcatgtcttctcctaaataggtcggtccctccaaggcgacagaaagcagttcctctgccaggaagaggca

SEQ ID NO: 317155 - DNA, 2051 bp, Cannabis indica
aaaatgtctatgacaatgatgttgttaatttaataatatttgtgttttttattatttttttaaaaaaaaaattaaaataacaaaaataacaaaacatttaataaaacaacctaatatataaacaactcaaacatatataaactttcaaatttatatatattaaagagagatttaatccattacatacatatttactataaaaacacaatataagtactcataacattcagcaaacattaaaaaatataaaaacgtaacaacatataaataatgttttcagtcataagaaaaaaaaatataataacaacttaaaaataatatactataaaaaaacaacaaatgatttttttaaatatttcatgtaaacttggactcgctatcaatatttttcacctgcttcttttgaccatagtggaaaaacaaaacagccaaacgatcacggtgcagttcaataataaaatcctcagaaagaatagtcttattgtcaataaaatactctgcaaaagctggaagaaaaatgccgcaatcactgcaataataaccagcaaacaacataaaaatcaaagaaataataaaaataaacaaacatgaaaatacaatttaaaaaaaaataaaaaaaataaaccaaaacaaagaaaaatctaaaaacttacgttgtattctccttagtcaatctaaaaacatgaacaattttaaatgactccattatagaaaaccttgttttgttcctaaaagttttgaaatatagcataaataaataatacggcaaaataacaaaaaagattttacgagcctcctttgcaactctatcaacctactggtcctgagcgagttgtacagaaagttgcgacgctcagatacatttaagcggccacatatccaatgctcttagactttcatattaattgggaaaataacgtgatcaaccaagtgtcatgcaatagtacataattttttttcccataatatattggaccatatgatccaaagacaaaatagaaatatctttttgattatcgacaaaactatcatacagatttgtgatgctagcactaaagagtcaattaattattgtaacttttaattttacttcctttgcatacttaattttcttacacagatagtagaaaatgatacaaaaaagtgagaagatatgaagaaaaaaaaattcaacaactaaaaaataacacaaaataaaggaaaaattaataagcaaacaaccacaaaacaattgtaaaaaaatacttactgaataaactaaaaaattatcaagataaataagcttgtgaaactatatatcttattgtctacttcttcaacaacaaaacgaatgggaggagaaaacttatccttgctcttaagataaaaatttgttgttttccttaaaataataaaaatatatatatagatataataaatctaaaaataatcaaaactaatatatttctctgatcttagaccaggccctagccaaacattgaattcaacctccaaagttgagtcaacaggtctcccaatcttttcatctaacggacataatctagaaatatatttcacaattttgtaataagaaccattaggagaatcagacattgaatctaaattagcatcattagatcctagtttcataaaaagagactttcaaatagttcatttctttctatccttctttccaagaactaaaatcagagtctcctcaaaaataacaatatcacgaacattattttgaaccaaatcaatgcggcaagaatcaccaacaactttgccaaaagattgagcctataataaaataagaaaagtcaagatacacatacaaggaaacaaaaaaatatcaatgaaaaaatattaagaaaaagccaaaaaaacaataaaaaaaatactatatcaaaaaaatatacattctcatccacacattgaataccataaaaaatggtacactgaccagcaacaacaaaaatggaagaacactccatctagaaaaaataactaatgtcaaacataacaaaacaacaaagacaaaatcttaaaaaaaaaaccaaaaacaataataa

SEQ ID NO: 317156 - DNA, 847 bp, Cannabis indica
tttttttaaaaaaaaaatcatctgttcgtttgactttaaatgggaaaaaatagtgatgatgcttgatatttcataagaactggatcgatgtatatatattgcttattgaaaaaagaccttttgaattatctatcgactatgtattatttttaccttgatagctcgctagaatatactgtttcattgagacatgattcacttttattttgaattaatctttttgcatgggaatcaattgttttcttaggcttttggatcaatttatgaagtgtgaaaagtatggggagcattgtggagcaactttttggcttgctggtgtagtcaagggatttggagtctcttccttgaagaaatatcacattgtgacagtacaacgagaaggcctagcagacaggtttgtcttccatcttacttttgaagcatgcatgttaaagaagtagtgttattggtagagatttgtgtagttgttaaactttaaaatgaaattattatataattgaacaagaagtttgacaacttttttgagatttgagaggaaatatggttgggttgatttttcataataactttcccctgaactgtagagattgttagatttaaggacttttgtctaattttagtaaaaaaattataacatagatgaaatttcaggggccatgatttagtaaatatcaaaatttgaggggcgatgatttggtagatatcaaagtctagggagcaggttagtacataaacaattattgaaacagtaaaattgaaatgaaattagagaaaagtccttaaatttaacaatctcaatagttcggggaaaatttttaaacgtcgaaaaaaagttctaagggacgac

SEQ ID NO: 317157 - DNA, 1139 bp, Cannabis indica
aaatttctttgattagcaaagattgcacaattattgaaaaagcactgtagtgtgccttagcattagggcgttacacccagattgtgttgttgcccctgcactgtggaacaaactctggaactcaaaaattttggagaggcataaagtactatgggggcgcattctttctgatgcactgcctattcgtacacttctagctcggagaatgagtattgaggagatctcttgccctctttgtggggcaggtgaggaatcgatggagcatcttttcctatattgtaacttcgtgtaccatctttggagatcttccccttggggagtttatccggtgtttgattctggtgcctgtatttgggattgggttacttttatctggaacatgaagtctaaaggagtgaatactgacaagttgttcttgtatgcttcgattgtagtggatacgatttggatgacccgcaatgaaaaggtacataataattcctcgggtaacataaagcatgttattgattctatctccttttgttgcatagattacgagtcttgcttgtttgaactagcagtggttgtggtgtctcctgttcggtcccctcctctagtgggctggataaagatcaactgtgatgttaaagtcagcgcaattccacgtgtgtgacggctttggcaagggatcatacaaggatagttttatgggtagcagctaattttctagacttcgtggatcctttgattggtgaagcggcggtgtgtcggttggctttggaatcgatagtgttgaagaagcacctttttgttctgattgcgagtgattcgaaaaatgttattaatgctctgagggaaaaatattccatttggaattcaaataattatatttttatttgtaatcaactctctaatcaatttttaagctgtaatttttcctttatttctagatgttgtaattttgcggcacatattgtgactagattgaccttatctcagaacatttcaggtatggttgtgatctcctccatccctgactatctctttttatgagttagatttctccttctaattaaccctaagaaaaaaaaaatcatttttggtcggtttattacaaaaaaaaacgactgtttaatggcggttttaaccgttagcggttt

SEQ ID NO: 317158 - DNA, 748 bp, Cannabis indica
gtcggttattaattattatgctgaaaaaagcgactctaaaggcttgttttgtagtagtgtatataaaataataattaagttattcttgaaggaattaattaataatttatatcagaatttgaggggatgagaaacttataaatttgtgaatcatgttaatattatatatatgtagttcaaactatgttgattaattaattagtaataatatattattctttaattatatatagataattaattatagattaatacaaatggtattcttttctagttagtttaacatttatatatataattaattagatttaattgattagaactatatatatgtataaatatatttgattatatagctatagaaatcatatatgtccaatatcctagttaagccatctacattataatttatgtatattatacaatatcctattatatattaatacaaatatatataatcaattaatgatataatccttttttttttccatatcgtaccattcatattaatattagaaatataaagatagggtataagtatatgttacttttaatgcttggagaacttgtattccaagtttcaataataaccagaggtatatatatacctatatacatgtatgcaagaattaaaatatcacttttaccagcgcagttcgttactgcgttgataaaagtaattttaccagcatatttcgtaaattgcgctggcaaagaggttaaaattttactagcgtatatttgtagt

SEQ ID NO: 317159 - DNA, 1373 bp, Cannabis indica
agaatcctacatgcccccaagaatttataaggctttgatgctaaaaacatgaggttgaaaatgtaaaatacaattctatattcttcatgagataaaaggaatctaatacatagtaaagttcatttgaaggtttgaatattacttgcccacgataatttctcaagttaatatctactcatgtatcagcaacagaaagactatctaagaacatagagcaatacaatcactaccatcccaatgcaaacattcttacatatataatatatttttatatatatttgaagaacaatcatagcagaactacctcatggtgtccctgagctacagagtaatgaagaggggaattatattctaacaaagccttagcttcttgaaggtcttcatctctagcagctgaaactaaacgcttcccagatgctgaaaatccaaagaaattccccacgctacttggagatttcattgacacaacacaacacaagtacctcaaaactgatggttatggttttaaagatttctttttcaaaagagtttaaccaacaaagatagagacattaatgttttgccattacctttctctttctcttcttcacgcatatcctcatttgtcctttacattctttaattttgactctatattttgttcaaccctcaactagttcatcattttctttcttctcctaaacaaaacacattggaaattagtatcaaatatcaaatatagtgaaaaaaaaaagaatgacaacttgattacaaacatccattatattgtcatacggttagttttctttcctctttctcattttcatgcatacaatacaataataatgtattccccactttctttaataatttatacttttgccacttggtgtggttgaaagatcttgattgttgacggcattcatcacacaatcaatttattttatgacaacccaaatgtgtaaataagatttgtacccaaaaaactgaccacaaacaaaacattcaaatgtacctctgtgagcctctgttttatatcccttgccattgaaaataaaacttgttccgcatttaaattggttttgatactcagtaatatttgtaatatttagactctcagtatataacaaataaacctagaattttcatatcagattttcacaagctgtaagtgcttggcctttagcggtgggtataacctacacttacacttagcatgttctaagttgagcatgaatcttcattctcaatttgtaaaatattttccaattctatgattacacctgctcatagcaaattaaagtacatccaagaaagaaagaaaatgaaaaacatacagtaaacttcttagttgtagacgaaaaacttcttagctggaaatgaaagattcagta

SEQ ID NO: 317160 - DNA, 1058 bp, Cannabis indica
aatgagttttatttacggcataaaacccaacaagaatgtcactatcaagcaaagaaggaagagggacaacctcaaatttagacattgcattctgggtaaagagagatttgatgttatccaaatcccattgttagaagaatcagttgtgatatctttgagatgcaacttggtttgaatcaaaggattaagctctccaccactaatatcaatatcatttgataaattctatgagttatgccaaatatcaatgcttgaattggggcaaaccagccaagtgaagttgtcacgtatgaaatctttcttgccatatacccagaccagaggagaagaattagatttcaatgttgactccaaaaaggagcaattcgggaagtattttccttttatcacctatgtccaaagatactaagattacttgcaagtatccaactcagttttgtgagaaggcaaaaattaatatcattaaatcttcaaagtctgagacctccacaatctttcaacttgcataaattatcccaagtaattagtgatagaaattgagttttttctgttgaaccgatccgctagaaatatctaataaccttatccaattcaaaacaaactaaagttgttatattgacgaccgacattgtatatgtagggatcgattgtatcacagtactattgataaggagtgttggagcggattgagacaacagcttggccctccaaccttctaatttgctttagacacgatcaaccaggaatttaaaatcctttatgctttttcttttcacaaacaagggtttccaacaaatttttcacatgcttccataagctaaaaatttaggaaatttataatctctttcttgcaaccaacgacacaattttaagagaaaagaactttcaacttatgcacattgattgttgacctaaccaactacaatacttgtccaacaaaccaataatagtctccatatttaacatattagccttagtgaagatgtaatatccagtttatatacatatattggtatttggtatattaagtgtgatacaattatattgttattattatt

SEQ ID NO: 317161 - DNA, 604 bp, Cannabis indica
tggggggtccgaccatcggactctaggtttttttttcggtttgagagagaggaagagagccgatgggggtccgatgcggggtccgatgggcccaatggggggtccgatgcatatgcgggttgggaaaaaatggggctgagttatgagaggggtatttttggattttagataaaagtgtcatatattttttagtttgaaatgtattggtttaagaataaaatattaaggttttttaagtatagaaaatcaaatttcccttttgtattaaaataactcaaaatttaactagttgaaaagagaacaagatagaggatctgtgtccagcctaaacttcattttataataataataataataataataataataaaaaagtaattagtattaatacctaatatttttatttattaaatttaaatgtgtgaaccgaatattaaaatacactaataattttattttttgtgatgctacaacttagtgcctccttatcatttcaatttgggtaaatatcattttagaccctgtgttttgcaaaagttacagattggaccccgtgttttgttaaatgacaaaatggaccctgtattttctaaaatagtaaaaa

SEQ ID NO: 317162 - DNA, 872 bp, Cannabis indica
taaaaatgaactttacagaacacacttttgttttctgtttttaaaattgcaaaacaaaagtggttacagaacgcatttttgtttttcaaaagcaaaatttttaaaaacaaaaattttacttttattttgtgattaaaaaattaaaaaacaaaagtgttaccaaacgaaacctatattaatacaacaattattaaaaattaggtacttaataacaataaaatgaacaaaattgatatttttctgcaaattttcttaaataaataaataaataaaagagatatttttagcatagtatttaattgtacagctaaacctaatgttactataataaagttttcgctctctttcttggttgtccttcttctcctccgaggtttagtcacggttaataattgagttcgaagttaaaggggacttttgagtttaatttactcgatcctaacttgtttctctttattaagttcgttctcgacgatgatcgttttcgtgttcttaaagtcggattgtggattgtggagtattccttgttggttttggctgaaccaactgggattggtaactacttagatctatattttaattatgtttctttttggatttagttgcataatttaccaatttgatgtatttcaactgaggttgggtacgaagttggtgcgcttattggtcctgtgactgaggtggcggctggttcttttggtgatcatataatgggtcgttttttcgagtgcagattcccattgacattagtgttatactcatattttgagcaataaatatagtaatgacacgtgtgatagggcatgaaaacaaactagcttggatattgaagaaataaatatgttgatttacttgcctcggagaatacagat

SEQ ID NO: 317163 - DNA, 651 bp, Cannabis indica
gaaaaaaaaataagaattgagtttgtataataataattgagcgttatttttcatatatttacttatttagcatatccacaacttttcttaaacgggggtcaactaatgctttgagttgagaaagtgccatttgatattaattattttttaataaaataattataaagtaacatatgtatatgttataggctagccatgtatatttgtgggactagcaattgtttatagtggggtttatggacatacttttgcataactttttttaataacttttaataataataataataataataattgtttaaaataataataataagtatttttcaaggttaaacccttccaaatatcattttatttgtatttaaatttttaagtttaaattttaacggtgaaaccgtccaaactactaaactgttagcaaatgtaaggtgtcatccgattaactgtcatcgtagacggtttacgtgtacattcttgtacacgtagcatatttattcttgtacacgtagcatatttatattagtacacctaatattattatttcaaaatttattttaaaattaaataaaattataaaaataaaaaatagaatattaaaaaaataaaattattataaattttttggaatatttttttataatttttaaa

SEQ ID NO: 317164 - DNA, 695 bp, Cannabis indica
attcaattctaattataatattatattccaaaaccactagagcaagaatttgatacatgcagaatctgtctgatttgttttttatactttttcccagattattggtggttcccaacttcaattaagggaatctacttttgttaattatcataccaaacgtatgtgagataatggaatttattcagattctaagcagcaatataatttcaaactggtatggcataaagaatttgtacctatataagattgttaggttagtgcttactcgaaaattgttcatgatgatgtggacatcaatatttagcaagtgacaagaaagaaaatatttacagagttaactttctcaagtcatagcagtcactttgggaagggtccctagtcctgcgcccaagttcacttcgagagatccataatgggtatttgaatcttgtcaagttgttttcaagtcaccatcctttagtattctgaaccaacaagtcaagaagactttaagttgtaagcctaggagctgaaagatgtcaatttggcatcccgaaagcaaacttgggcacccatggtttcactcgatgctaggggcagagctggccaagacttaattattagcagggccaactattaatttttatttgaaaaaatctagtgtaccctagctaaaaaattctttcaataaattttttttatctattttgacatct

SEQ ID NO: 317165 - DNA, 945 bp, Cannabis indica
aacataaaatgttatttctgatctctattaactagtaaatctgattatattgaaatgggttttatttagggcacaaaacccaacagctactgtaatagtgttggtaggatttgcaccgtacctcgagtaccactaagtgttgtaccacatacactatgtactttgtactagtgttggtaacaccgtattgtactaattaaatatcatacactctactaatacactcaataatgttgtcttactagtattttgtagcatatgaatcacattattagcgtgcatatataacacatatgcatattcatatattaatatattctatgcttgtcttaccttatttctaaatttagctgtggtggtcgacctaaacggaaaatcatgtgatgaatgggtgtcctatgtcacaattacataatgggtaaataatttgctaaaaccattttcggggaactaaaattaaaaccaaaagttttcctattaataactagcatggaaatacccttattatcgagagacagcagaactaaggctctaaaaactcccctataggctaaaccaaatatcctaaacggataaccagcttctggggtcctgcccagtgaaacggttaaccgattctacatcaccaacaaaatcaattaaccagttcatagcgaaaatccccaaaaactttgaatcccactcaaataaaacacaaactccaccaaactttccagaatacctataatgtctcccaacaacagaattcaagaaacaacaacaacaacaaacaatcgcagaaatgaaattcacaattgttgagtcatgtttgagttttttgaactcaaacttgctcaaccaaagaatcaggcaccaaaccacaagaatataagaatccaacgatatcccgataggtgagagtcaaagttattcttattttataaatctctttattgtttcatattg

SEQ ID NO: 317166 - DNA, 562 bp, Cannabis indica
gaaaaaaaaatgtaaaaaaaaaagtgatgttttcaaaaaaaaatgttaaaaaaaagtgatttttttcaaaaaaaaaaaagggtgaaattatgtgcacttttatgtaataatgtaaaaacaaaaaaaaaactgaaagctcagcccaactcaaaacccagtccccaacccactcggacccgtcccagcccacacccaacccacctaaacttgacacccgaaaacctactagtccctcacacggacaggttcagtacctataaaacacaaacccaaacctgaaaacccgaacccaaaaacttaaaacccgagaaaactcacccgatgtgtacccctaagtgaaggtctgtgtccagtaattgaagcagaggaaaggatggcgtgggggacttcgatttgtcatttggcatgtgttaattatgttagttttatagtaccaaatcaggtacgcagtggaataaaagtttctaaatcatcgtaccacatctttaggatcaccatatgtatatatattatatctgaaagtaagtagacgaaaatataatatacctcttgaagcctatca

SEQ ID NO: 317167 - DNA, 561 bp, Cannabis indica
aaattatatgataaattttacaggaacatatattaactaaaagttaaatcaaatataacacaattattttttttatgttaaatatgacaaaattttacatgtcttattaaaatatataggtcttgttaattaaaatgttcaattttacattaaatcttttcaccaaatatcagttataaatgtactgtttttatatttatttttattttattttttaatattttattattaaatatacttattgtgttaaattataacactttacatttatatataaattaataaaagtattaatttttatatttttaataaaagtattaattaaacattaaattttttatcaaattttacaattataaattgaaagataatactaaaaactaatatagatacatgatattttatattaaagataatacaatttttacatcactaattaaaaaaaatcttataaagaataattatatatatatgttcttgttgattaaaatattcaattttacatgtctcactactacaatgttagcctttagaggcagttttttcaaccccatttataaa

SEQ ID NO: 317168 - DNA, 1769 bp, Cannabis indica
tttttttatctattttgacatctaagaaggtattttagtccattttttttatgaccgcgtactttgtaattttctcatactacctgtaattttttaaaaaattctgaataatttatagtgccgaaaataaagtttaaacaattacttaccacacatattagaaaaaatagtcacgtgtgtaacaaaatttttgaatcttattttcggcactgtaaataaattaagatttttcaaaaaatttacagatgattctaaataaatacaacctacataatcatgaaaattatttgaactaaaaaaaatttctaaatgcaaaaatagattaagggtgtactgaaacagtcattttagaagatgtaatatagaattacccagaaataaaattttctctcaagctctctctcttgcagctctctctcgagctggtgctatggcgaaaacaagagctaaagttcaggggaagattcaagtgtctgcgaagaagaagaaaaaaggtcctaactctacagctgatgcaagaaaaataaatctatggaagaaatcctgggggtggaaccaatgaattcactgatgatgaagaagaaggagcaggtgtttatgatgtagcagagtctgcttctcggcgagaggtcatgccagatcctttgtctccgagatcatctctgaaagcaatactttagcaagatattcgatctgatttttctcatttcatggaggcaaataagaattgctctgtccagaggagatacaatgacgcccccaattcttagatctgggaacgtggtgagaaacctagaaaatacttttgagaagtctgagaaagagaaggcagtcaagattactatggaagatgagatagcttactggaagtcatctattgtttgttatgtgctaggagccaatccgccattatcagttttggatggttttgttagacgcatatggagtggaaagatcgacaaggtcggactactgtcatatggggtgttcttaatcagatttgatacaatggagcatcgtgatgaagtgctgaatggtggctacatattctttaataagagacctgtcatcatgaaggcgtgggatccaaatactaacttcaaaaatgaggatattcgtactattccaatttgggttcagcttacagatttggagttgaagtattgggggcaaagagctttgttcaaaatcattggccaagtaggagaacctattatggtggatgatgctaccaaagagagagacaagcttagctatccaagagtcctcattcaagtgtccattcatcaagaattcccaggtactatctattttgaagatgagcatggaaataatatacctgttgaaatcttttatgagtggaaacctataagatgtggaaattgtaaaggaataggccatgccactctggattgtcgtaagaaagaaagtttgaagcaggagtgggtggtcaagaacgataaaagaaaagctgaagaaaaaccaaaaccagcaccaagggagttccaagcagtaaccaaaggctggaaaattaaagcaaaagaaccaattacaggaccctctacatctaattccttccaagctctacagggtaattctcttatagaagaggctgtaacataagtgtcagaaaggtcactccagatgtaaacagtgaagacaggaggagggagagatcctcctcttctcaatggataaaatcatctcctggaacgtccgaggaatcaacagccagcaaaagcaaaatatggtcaagcattttattgcta

SEQ ID NO: 317169 - DNA, 461 bp, Cannabis indica
acccagtctttctaagaaaatcatttgtcaaggttattactggcctactatgaagaaggattacactaaatatgtccaaaaatgtgagcaatgcaaatgttactcgaaagttgcaagagccccgcaaatggagatatcccttatgaacagtccttgacactttgtcatttagggaataaacttagtgggatcacttccaactggaaaatgaggagtcaaattgttgttgtcattgttgactacttcactaaatgggtggaagctaagcacatgaacatagtaaattcaaagaagtccctggacatcataataaaaaacatcgtgtacagataaggacttccacacaagatagtgtctaatgacagaaagcattcgacagtgatcaattgacctgacttttgtgccaagcatggaataatcaaactattttcatctgtggctagtgttggaatatattttac

SEQ ID NO: 317170 - DNA, 808 bp, Cannabis indica
ttttaaaaaaaatatataaaaaactcatcctacaatatacaatatgagatttagagaaaaagaaacagtaaaatatattgccaaacattatatggaaaaaaaaaataaaaaaataaaaaattagaaatttataaagaacacatctataaattaaaattaaaattaaaattaagagaatctagagaaaatttattttgaatcactatatacatacataaatctgtatgatttttttggattattttctgtgtatgatatttaattagcttatgatgatggtgaaagatactactcgtgctaacaatgctaaaaaagaggaccatttatagagagtattaagttggtggatgacatattaatgatttgcaataaaaacttcaagtttattaactcctcttctatgcactcatggcatatagttgggtgccaataaatttcttcattcaggcatgaaagtagaaaaaatagcagtcatttaatatttggaacattagaaaagtgagtaatttccttataaaaacagtgaattgaaaattatggacgaagtacctcaaattattaaaacaataatgatattattaaattattttgagtgtttcttgcacccttttattgaattttccaattatttttatacatattaaaatttataatttactagcagtagtataaggctcagtttgacacagttatgctgtgggaaaaaatagttgtgttatggaaaaaaacagttgtagttgtgctctgaaaaaaaagcaactgcatcaaaactgtggaaaaaataaagttgagtgttcggtaaattata

SEQ ID NO: 317171 - DNA, 1242 bp, Cannabis indica
ctctgtcattttaataaaattattcaaaggcagcaaatcagatgctgtggtgtagtggttatcacgtcagttttacacactgaaggtctccagttcgatcctgggcagcatcattttctactactaaattcaaaattttactttttggttaattagaacgtgaatgtgattatgtgatcataattttattatgtttccatatggaacaaaattagtctgttattacaagaccaaattcaattgttattataaaattatttttgacaatgctcgtagcaaacatagcttataaatcaaccaactgagaagctgtattgtttcttaagcagagcttgatctgttgagttgaatttgtagcagcagacactattgggggtggaaatccaagtacattctataggcatttcgatcagatgaatagtaaccttcaatgagattatcaactttgaaacccagtttcttgtagagattaacagcaggatttctcaatgggtcaacatgaagagatattcgttgcacatgtctcgttctgcttttctcaatcgctgcttttagcagtgcctctccatatcctcgcctccgaaaattctccttaactaacaaatcaagcagtccaaacaaaagtcgaaatcgaaattagagaattaaagaataagctttcattcataaaaactgttaaacactattgggaactttcgtcgagcatgttgtgcgcacgagtagagtgacacactggtagtttactaaatccgtttcccatcatgaaaaaatttgatttttttttttttggaaaactggtgggaatttgaaggcaatggataaagatcataaggagacaataatcgaaagcgaaagagggtttcaaaacctgcgagctttgagatagaagcggaaagagaagaaggccatgagtacattacatagccggcaacatctccatcaaactccacgtaaagcaatccacagttcttttttcttagttcgtcttcaaaggatttggaaagtgattcatgtttggggaagatctttctctcaagttttgtaatgctttctacaattgtagaccacttggaagagtttctttgaagctcaacaatggccccggtcgacatagatgagctcatatgatttgagtttttttcgttgagagattaatttgagtttctttgagtatttgatgcttatttatttagggaaatttgacattttatgctaaaaaaatgcacatggtgttattttata

SEQ ID NO: 317172 - DNA, 706 bp, Cannabis indica
gtaaatttgattaattgatgaataaaagagggtatttttcaacttaccccatattattttgaatggaaagcctcgagatattatcaatgatctaaattcggatctgtttaaggatggggctgcatgggcacacggctaaagccattccatccaaattctagaccttaaaagtcatttaataaaaagactccaaatttattttttaaaaacatcatattttgtatttttattattatttactaaaaaatataaatattttataaaaaaatacttaatttattttttaaaatactgcatttaatattttatgaaaaaaacagtcttattatattttgaaaatactatattttaaatttttacaattatatatacaaaaaaccattaaaattttttcttataaaaaaagcccaattagagtgttcagcctaataggcctaattagcttgagacagagtctgtccaatcaagataggttaaggtataaagcacttatattaagtaacatcttgttcttgaaattatgagaaagattgaagaagtaagaaagaaatctgcaccacccaacacactccacacgtgattcctttttgttcaaaaaacatgtgacaaacactaaacttaatattagctactactactagtactagtgatcaacacgtagtactactcctttcttctttatttgacaaaaacaaaagaaaaaaaa

SEQ ID NO: 317173 - DNA, 1784 bp, Cannabis indica
agtagtttttattttttttatatttacagaaatctacatggcaactcacatagtaactaatggaattgcaatttaaatctatatagcaacttacatagaaactactagagcaattcaaacggtaaaaataaaaataaaaagttaaaaaatggtatatggggtgattttctaaaaatttatttataatataataagtaattacacaatgtaattttatttattaaaaattaaaatacttttttttaattctattaaataaattattaattattattattattaggataactgaaaagttctatcatttactaaattttttattaagaagttcaaaatttatacgattatatatgtatagaattttaaattgctttcttaaaaaaatattaataaaaaaattaatagaaaaattggagtgttatttattttatttattttttttttttgaataaaaccaataaattcattaattaataaaatcgttcataacaatggatcgcacttcaggggaatagttttccaactgaagcacacgacctaaagagaaacaagagtctcttaccaagcaatgagccaacttatttgtagatcgttttacaaaacacaaatcaatataattgtaagatgaaagaaaggtacgaacatcatgtatgagaagaccaaattaaggcgacgttgaaattttactttggatagcttggacacagaccaagctatcagtctccaacaaaacgtgttcccaggaatggcttgcaatccaacttagagcttcttttatgcctataatttctgcaattttgggttggactcgtcctatcttacctgttgtataggcttcaagaaaattaccacagtagtcgcgagccacacaaccaacaccaaactggccctcctgctcaaacaaatctccatcaacattaaccttgatctggtttaacgaaggtgcagtccaacgctcagtgtgtcgtcccccatcactcatcggagacaaagaaagaccctttctttcttgagcgtacttatattgatcaagaagattctttgttgatgcggcaacacttgatgcagaccagctcttattttaccaaacaaagtcattacaagctcgccaaattgcccaactcaccacagtcgcttcctccatctcacaacttcgacccctgctgaataataccagcaaccagttgcaaaaatggacctctgaatcactgccaatgtccaccagacttcggttccaagcagctcgagcaaaggcacatcctaccagtgtgtgataaatagtttcagcagtagagtgacacaagggacagataggagaaatggggacatgtcttctatttaattgggtgcaagtaggtagtgttcctaatgcaactctccataaaaaattactaacttttggtgtaattattaaagaccaaagattcctctaaaaactggtatttccatccacataccaagcacctttagcctcctgtaaatatttgtaagcactcctaactaaatattgcccaaacttttcaaacttccgactccaactatcatttatggctgaatcactaagccgaatagagaaaatcaaatcttgatctctaacatcaaagagatccttaataatgtcttcattccaagcatgagcttccaattgaaagaggcaattaacaaacttgttctctagagcagaatgtcttgaaattacaaagctgttggtgttatgagggagccaagaatcatttagggcgtgtttagaaagccacctgggaattggaattagatgtaattgg

SEQ ID NO: 317174 - DNA, 790 bp, Cannabis indica
gactactgactgtcacatatattatctcattggcaaacataatacatgtacactaaacatgtgcatgtatgcttctattacactaaacatactactaatatattatcctaactaaggagtctcctgaggaaaccgctgccaatgccccaaaaaaatattcaagacagatatgatgctcggattcaatccaacaacaaggccaaatgtttcatgcttgtaagcatggatgatgtttgcgtaagacgcatgaagatatgcatctcaaataatgaattctcgacaggccatgtttgggcagcagtctaatcaaacaagacatgatgctactcgtaactacactgctctagaagtagtttcagaaatagaaaaaccactggcgatctactatgacaacattggagtggtggccaacttcatggaaccaaggagccacaagagaggcaagcatattaagaggaagtatcatctactaagagatatagtagagagaggtgatgtgatgatcttgaaaattgcatcgaaacataacctaacagatccaatcacacagacgctaccagcaaaatctttcatgggtcatatagctactatgggagtagaggagatgcccagtttgcttttagggcaagtgggagatggttagggtttatgccatgaaaatcctgtaaatacattttagattatttataaagagttgaacattttgatatatgcatgaatgtcaaattattaacatttattattgaataatttaaatatctaaaaaattcattattcatatatgaggttg

SEQ ID NO: 317175 - DNA, 1448 bp, Cannabis indica
aaaattatttttaaaattatttttttttctaattttttaattttttaaatatttataattattttttaaaattaatattacgtgggccactaaaaatttaccacgtgtacaagtatgtacacgtgggcagtccactgtggcacttaactgtgatttttggacggaggggtacagaacaaaacaaaatgggagtttaggtagttttgcctcaaaaaaatcaatttttgtagttaagtgttaaaaaatttaaaattcagataatttagctgctaatatcccaaaatttaatcatataatattataatattattataaaatatataaattattataaaatattttatttgaattttacatcatataaaaaaacatataatagtatagtaaaaatatagtatgcacattatatttacaaagcataaaattaaaattatacttacattattataaaaatcacacgaagcgttggcatatttccttatggcaaaacaacataaagaaataaaaggcaatatatttgaagaaataaaagagaaaaactcctaaaaaagtaatcaaaatgtaccataattaataatcttttttgggcattacaatataaatgaaaaaaatcatagtagttataaaacgacatgtcacatttttatgtgtcattacataaacgacatgtaaaaaaatattaatattctcacatgattacaatcgatataaaatgaaatatttaattttttcatcaaagcactttctccccacgtagaagacttatatgttttattggaactctttttggaaccggaagggcggcctgaactggcaaaggcaaaggcaggcagaatgacctgaaccaaccgaagttaattacattcttctactggaacattggccaacgtaaaaagatttgaatactgatcatcaacttcaccttgaacggcttgaatttcttaattttcttcaatatcttcaccttcactaccttgaatttcttggacgatttaattttcaccttcaccaccttaaattttttggacgatcttatttttaccttcaccaccttgaatttcttggacaatgttattttcactttcaccaccttgaatttcttggataatgttatctttaatgttaaactgaagtgtatctcccacttccatacgaccacgtacagactgccaaattcttcttggaatgtgtgtccttagatctccttttcttccccaaataaaaaatgcgactgggactatcacattgcgtactcttatgaacccattgaaacccatgttaatgaagtttgtgtatgaatttcatacatttttagggatgtggagttcccgttttaggttagtgttgaaaacttacttagtgaaatccatggagacagacatgttaggttttatgccctaaataaaactccatttcaatgtaatctattttattcaacatcaataaag

SEQ ID NO: 317176 - DNA, 2464 bp, Cannabis indica
ctagagattggccctctgaagtgcacggccaacaagttatttttgcccaatattttattcctttttaatccatataattcaaccctaaccctattgaagatagtataaaaggaaggctatggtctcttcatccaaactaatgcctccaaagctaaaaacctagatgagacctcttccttcttctttcttcttcaattcgaaacctatagcctttcttcactaaataatttcagccattagtgattgagtaagtgcccacacacatcaagttggtcctcaatcatagtatgtaagactgtgaagaatccaatcaacaagaaggagagaaagagatccaggttcagatcttgataatgctgtgctacagaatggaatcaagggctagacatctaaacggaaggaatcattatattccgctgcaattaatgtaaggtttcttaaactttatatgtgtttattacattgttttagaaattcatattaggatgttaaacaacatacatggtagtaaatctagatcttggtaaaataatttccaacagttcactctcaagggcattaagtatttgtcttccctgttcgtcctctacgccattcaaggatggggtgtgccatctccacacaaggtcaattggtttttcaacttgaagtctacccctaagcagatgaggtcggggtacttctacttctcttagccaaacttcaaatggctgacgaccactgtggacaaggatgttagcaagatcaagggtttgttgacgagtactacttcgtggaaggcatggatgccacctatacttggtttcaatatatcccgatatattgtcgtccacccctcacaatggcacttagggatagggcttagaaaattgtccaactgtcggatgttgctcggaatatcactttgttgacatcggaagacaactttgtgaagtacaagctttatccgacagactttataccccagcctatgaaggggaggaagaagaagtccaaggctggccgggttgagggagctgagcaagagaaggatctcattcaacttaagcgtgaggctaagttgaagggtgatgcaggagccaaggagtatgctcaggaatattctgagcaggagaaggaggctcaagaatattctgagcaggagaggccactcaagaagaagaaaacccacccgaccgggcagaggcccatcaaacatactattcgaattagagagcctgatctacctaatcatcaacccttatagagggaaagggaaaagctgtcctggaggaggaggaagactctttggatgatgatgccccatctgtgcttgttcgagcagatgctcctgcaagcgtgtagagtacttcatcatgcatttatttttcttgattttcatgccttcgtatattttataccttcttctaactatattgtttttattccgtgcagaaatgtcttagaagatgatcgaggcactaaagaagagagtgggggaagctcaggcttatcccctctggcaaagaagtccaagggcggtgagacttcgtccaaagagaaagcaccagctggtgaggtcattgatttttatgaagaacaaaatgctgtggaccatcttacctcgaaagttactaagtccaaaggttcccgaggagggagtttgcacgaacctgagcaggcaaagggtggatccgagctgatcagaagtgggtctgaacaagttaaggctcccgccccacctttggttttgcacacggagaccaaaagaggcagagacatgctcaaccactatgtgagccaatcggtcccagaggtgaacgaacagttggttggggcggataatgacttgtctttggagctggttatgggaggagtgttaaaagagctttcacgggtaagtcttttctgatgtttttcttttattcctctttgactagttcagattttaatgctttttttccgcatagactggtttgaagatggcatatgcctattcccgagctaagtcaactactgctaaaaaccttgccatttccaacacaatgcgaacgaaagtggacttggccaaaaaggatgtcgaggatgcgcaggttaaacttggggctgtgcggatagagctgggagaggtcaataagaaacttttggctgctgagaccaaagttggtgagctgaccagagaactgtaggagacgccatcaacctagaagctcgaggctaatattgcttctctgtctcgggacgttaccagtcttcaagatgaaagagagggtctttagactcttctttgtaggttggaggatgagaagaaggctaaggacgagtaactcgaggctgaggttaagaaccagaaatctgaggtggcgaggctcgaggagaaggtgaatgccttagagacaactagtctagagatattttatgacttttggaaggccaatccaaaggcaaactttgatcatctgggcacttccaaagacatgtttct

SEQ ID NO: 317177 - DNA, 1229 bp, Cannabis indica
ttaatataaataaaaagtcacccataaatttctcataaaccatgttagtcaccatgaatttctcataaaccaacaattctgttatataggcacactttatatagaatagatatagactagtaatttgtttacgtggatgtttaacaaatttttattttaaattagataattttttattaaacaaattattgaaaaataataagaattagtattggtatttcaatactaaactttaatcttaccattttgaatataattattttaataataaaataataaaacaatttaaagaataaataaactcttgtatttttttttatttcttaggtatttatattttatttaaaaaaattatatatatatattataatattgataatttattagtttagttatgaatattttaattttattttttaatgtttggtattaaaaaaatcttatatagttatttggatattttttttaaaaaaaaaataatattataataaagtttagttatggatattttttttaggaaaaaaatgtttaaatataatatatttttaaacttttcttttatcaatatggaaataacttcattaattaaagaacaacaccaatataatcaaacaagataagaaccggtaggtccttatccagaaaaacaatagcaagggtaaattacacttgccaatcaccctaaatttgtattctgtatttaactatatttttaacatcttttacaatatgagtttaagtgttagagtagcccttaaaaacacatttattttggttgatccaaaggtagtaacaagttgctgcagcagtagcaacactaattttttgcacccagttatctatgttcaccgacagccaaccaatccactctttaaagtccaaaggccacatacgattgcccaaccaagtaaacactaattcaacaactctacgggataagtagtagaagaaaaataggtgttcatgtgattcactggtctcatcataaacaaggcacttgttagagtctgttggaaatattgtgaatattttaacaaaatatataagtgtcttagtgtgtgtgagttggaaagagtcccacatgggatatgaaccctcattgacaagggtataaagagtgcaactttggcatttgggtttgggccccaaggggtacccagttttgtgcgaatgggtgaggacacacacacttgacccaccacacacgcgcgcgccgtccgtccgatccg

SEQ ID NO: 317178 - DNA, 1180 bp, Cannabis indica
acgtaaaatataagtatacataaaaattaacattaaaattttactctttttttcttggattggatggatccagtctaatccaatacatattggacctaaaatattggatggatccgatccgatccaaaaaatactagtctaaaatattgaataaattcaaattgaaccaataaatatatatgaaatacatccaatggatagaaccgatcaaatccaacatctaatggatgttggattgattgaatgactgaaatcaattggatcggatcggatggtaaaatctaacatccaatatataattggatcggatctggatggacctaaaaacattggatgcgatccaatgaacatccctactcatatcccatctaccaaacataaccatattattatgtaatatataaacaaatggatgtaaaagcccatattgtaatatttagaaacttaggttgtattgtgataagtttggaattgaggtcaaggttagtgtttgagttaaaattggcactgggattcagggttaggaccaaggtagatgccaagatttgggattggggtttggagtcgaggagtcgagttgtgaagtcaagatcgagaccaaggttcaaggacaagataccagggtttaaggtatgaaccggggctgaggtccagggttgagatcaaggtctaagatcgaatcttagattggacttcgagatcataatttaagataagtaagattcagagtcgacatagaccctagctcatatcatagcaagtaactcttattctattaattggagtgaaaccatatatatgtagaggatattacaatcaacctcatcttaaccaccatctttaaaaatatatgtgtatatttttggtttaattttttcttttagccattttggattgctcgttgtaattataacatctttcaatttttttttttaattttcaaaatagactggccttgatttcaaatagaggacctatggaatttaactgcctttttgaaataaatgttagacatttatatagactaaaacatacatgattatgaataaagtgcggaattaataaatcatatatgcactataatttaaggatcgaaatacctccagccattgattcttgagcttcaaacccacataagctttgatctgcaagggaaactggttgatgtgggtaatcgggc

SEQ ID NO: 317179 - DNA, 1713 bp, Cannabis indica
atatataatatgacattttaatcttcattatatatttgttaaataacaaatatataacaattagtttgtcgcctagtgtttgttacctgagggttatccgaatgcgtgtttggtactcgaggaggacgtcggatcttgacccttccattgactttagcctgcaaagcatgcatttgctcttgtagggccgtatattgggctgtggtaaattgaatgatgccttcagataccacaaccagtgtgacaggtgggaactgtcccactgtagccgccggtgttgatgtttcttcagcaaaaatgatagtttcaggaaataagttgaggggaataatggtggtacgtcccactcctctgttgattgtgtcaacaggtgttgttccattatttgggagtggaacattcattgttccgacattgaacgatacaatgttgttatctctattcgtctgatttctacgaagctatttcttaaattcaagcagtcaagttatcattatctattataggttctaattgtaaaagtattatggacaagattaatagctcttattgtaataattctatttttaatgatattgttaattttatcaagaaactcattgttcagtccaaatttacttatagtttatgtgccgagggatagtaacaagctagcctattgtcatgctaattaagacaagcttagaattagacactgagtgtatttggaatgattatttatcttccatattaacttgactactctatctttcaacttatttcattgatgaaagttttcaggttttaaaaaaacaatcatcaaatataggtacttatagctttgttaaatttgatttattagtgagtgtggtagcataagttaaaaaataataatgttaatttttttaaaaaaatgtattaaataaaagaaatttgaatctgatgaacccaagagagaggagagactggagaggtctccaataataaattaataataaggatggaatctacaattaattgatagtgattgatctatctatctttcatcacacgtacgctagaaaagtaaaagaaaaaaagaaaagaaagcaatgactacgagagacaaacagttaatattatttccctttttagagagagaaacatcataataaaaggtaataagtttatttaagagagagagaaaaataatacaataataattataattaggaaagtgattaattaagagaacaaagcaaatctcattcacactactaatcaccactcactcaatcttcaaaaaagaagaaagaaagaaagaaacagaagaagaaattcaaagctcaatctttagagagacaaaacaaaagaaatcatttttgagtcaaaatttttattttggaaaaagcaagttttttttatataccaaaaaaataaagagagaatgattgtttgtgaatgaaagaaaagaaaagaagagaagattaaaacagaaagtgggttttagagggagaaagtgaaggttttctagagagagaaataaaaggattgagatgagtatatatattaaaatagatcgatagatagatatagaaagagaaagaagagagagaagagagggtcacatggcatgtgagcacagctgtgtgcattgccccctccttccctccgtacgtcagtcctctctctctctctctctctctctctctctactactctactctctctactctctactctctctctctctct

SEQ ID NO: 317180 - DNA, 1994 bp, Cannabis indica
caaaaagaagcccaattttattttttgtgtgaaactttttgcaaaaatgacattgtggtatggattaaaaataagcttggcttttaaggagctcactgcgttgaagctcaaggacataaaggggggcttgctcttctttggagattcaatgatgatgttcacttcttgggttattcgagaaatcatattgatgttgttgtccgatcttctaaccttatcccttggcgtctcactagtttatacggtgaaccaaactgaagtattcgattcaaaacttggcaactcatagaaactcttcctgctacttctgaccttccatggtgtatcattggtgatctcaataatattgggaccaatccgaaaagagagggggcagaccttatccatcttccctcatcaatggcttccaaaatgttcttggcagttgtaatttaattgatttgaagcttcatggccatccttacacttgggaaagagataaaggcacgactaactaggttgaaatcaggctcgataaggctcttgtgactcaactttggtttgaatccttcccacaagcaagtttaaccaattgtgatgtttcttcatcataccatatgcccattttccttcagctagaaccgactgtcacaaccagcactgtgtatcattttcatttcgaaaatgcttggacactcgagcccctttgcagccaaattgttcagtcttgttgggaggaattttgacatgcttcgcttcaagacaagataaagtattgcagcaccttgttagccgattgggggaggaatattacctgcaactttaagcaaaaaatcaaaaaaagcaagaccaaactttctgctataaaaggtaaaaccgactctaattttgtacatcatttttgtcaagagcaaaataattattttgagatccttgctcaacaagaactttattagaagcaaaggtcaaagcaattttggcttcataatggtgacaaaaattccaaatttttttcatgccatggctagctcacgaaaacgaaccaataacatccaacagttgcaaaatgttgctggtttatggactacatgggacaacgggttgaaagatgttattgttgagtattttcatgacatttttactgttgggaatactaattttgatcaagttacagcaggtataaggtgctctatcactgatacacacaatattgagctattgcagccgattggtgatgatgaggttcggcttgctttgtttcaaatgcaccccgataaacctccggagcctgacggaatgggacctagtttttttcaaaaacactggcacattgtaggtccagacattatttcacttgtgaaagatttttttgcttcaggctcttttccagcaagcctcaatgataccaacttggttctcattcctaagaaaaagactcatatcacaatgggtgatctccgccccatagctttgtgcaacgttgtttataaaattgctgcaaaagtgcttgccaacagaatgaaacctctgattgatcaggtaatctctccaactcagagtgcttttattcctggttgcctaatttctgataatatcatgatcacttttgaagttatacactatctgaaacgcaaagttcatggtaagaaaggctatatggatcttaaacttgatatgagcaaggcttatgatcgagtcgagtggggctacttaaggggggttatgcttcaaacggggtttagtcctcgatgggttaatctaataatgacttgtgtgaccagtgttcgttattctattatccatggtggccatgtcatgggacctatccttcctacccatggtataagacagggtgatcccttgtccacatacttgtttattatctgtgctgaagggttctctgctctcatttccaagttcgaacaggaaagattgttgcaaggctgccatgttgctaacggtgctcccaccatcactcatatgatgtttgctgatgacagctatctcttttgcca

SEQ ID NO: 317181 - DNA, 1160 bp, Cannabis indica
ttttctatattaaagcacttttagaaatatgtttagatctgtgatatttatatttcttgagtgttttataaatcctaacatctatctctctctcccccaattcacatgccacacacactacagtgtggtttgagttttgtgatctatcctatctcttcatagtatctcatgagttgagaatatattgtgattacaaaattatactcatccaatagaatctaatagcccactctattcctgagtgttgaggcttgcttggaacattgtagtatgaactctttagtaagttattggattggatgttcgataaaatacgaaaagagagtgaggatcccctaataggctaccagaggtattgtctcccttttcattagtctagattcaatctatatattttgttaagatcatcgggcttatggttcatattagattaaattatttttaatcaactagaacttaaccatcctaggattgagatcaattgatctaatgtcaattaagtgacgttgacttagaaaagacataacaataagtttatgataccttttccactaccaatattggttcagtccaatgtatagtcgatacatccgatgcaagttttctttgctaatgtcttggaaagaacattccacttataaatgtgtaagtaaaccacatcgtttattatcacgtcagtgtaaagtcagtgcacttataaaccgtgagactaagtaatttgaagcatataatctcactatgtagacaatactataatcagaataactatatcttcagagtttaatataatttatttattaaacatataatcatgaaagtaaacatgtgaaccatgcaacataaaataatttttgactttttattaattagtaaataagattattgaattgaattttatttatggcataaaatttcaatacttatgtggcatttaacgaatctagttagcaacataacattcaaaatgactagttgcaacaaaatcataaatagtactgacttttgttgccatttttttttattaagaccatatgtgtaataatttgtgacaaatatccttattttttatagggactatgtaatgaccgctttaataatttggattagtaaaggcaattagcattaaattctgtattttttataattatttatgaatttta

SEQ ID NO: 317182 - DNA, 1355 bp, Cannabis indica
catctttgagaggagacaacgagggtaattaccctttccttgagcatttatccattggtcaagactcaaatttgcaaaagctaccacatcactcacccttctcgcccgctgcttccaaaccaggtcatttctcgctgcccatatagcccagcacaacatgattacccgtcccaaagtctcactgcttacacggctagctgtagcctttagccatggcagcaaagaagagaaagaatctcttgctacagtggctaaaccagcaaaaccgaagcaagaccatgcgaaatcacaagccaccagtacgtgccattctgtttcggcaaagacaccacacaaaggacagttactttccaccaggacctttttaatacaggtttcttttagttgcgaggcaatttgaggccgccctccaaacaagatctttggccttaggaggcactttgagagtccatagattcttccagaacttattaacctatgtgttggccgaatggtgtttaagatcctgaagtaaattatatgcacttcgaactgaatagaacccgttcttctctgcaacccaatactaagaatcgactccaccagtttgatcaatgggaatgccaaggatgatagccgcatcttcgggggagaagaagtccttcacaacatcactatcccagcatcgattgttaacttggaaaagactattgacagtaaagttctcaagaccttggaccatagggacaggtactgagtgatacaaactaggaagctaatgatcatttgtaattagcactgtagtgccagggtcgattctcttcctcaagcctaacttcactatatcttttgcagcaaagatactgctccaaatgaaacttgggttcgatcctaactccggcgagagataatcaccatggggaaaatatctagctttgaacactttgctagcaagagatcagtgttaaataaaagtctccaaccttgtttgccaatcatagctagattaaagtccctcaagcttcggaagcccataccaccatcatatttgtgttttgtcattctgtcccaactcatccaagtgataccgctgccattaccgttggagttgttcgatttccaccaaaaactcgccatcatccgctctaattcgttacatgtgccaatcgggaaaagaaagacgttcatagcatacaaaggaagagattggaccacggtcttgatgagaatctctttccctgcccgagataaaaatcggccctcccaaccattaatcctctttctcattctctctttcaggaaccccaaaacagcgttcttattgcggcccacgatacttgggagccctgttcgaaaattctgtttattacgcaagt

SEQ ID NO: 317183 - DNA, 1008 bp, Cannabis indica
ttaggataaatattatattgttatactgtgagtgataaggaatgatactattgagtgctaaggatagatatagtagactaaaaaaaagagttattgagatttgaacctgtgataaaaaaagttatattgttaagtacttaccaccatgccaaaagactcttattgtataaattagctaccatgattttatttaaatattagaacagataaaaaatgaaattagtattacacatttcattgtagtagaattaacaaacacaacaacatatcccctaattagcggcgtgtgatccgccgctaataactccatattcgaccgcaataggctattagcggtagaaatctcccactaatagtccgttgttaataattagccgctaataatggtatcagcggtagaatgggtctccgccgctaataccattattagcggcggagcattagcggtggagtctcgccactaatgccctctatcagtttcgatcggggtgtcgccgctgatgccctctgccagtttcgaagatagaaagtgacagagggcattagcagcgggaccccgccgctaatgcggtttaaaaataaaaaaattaataatattagtaattatataaataatattatataatgtataaataattatttatagatatataaataataatttaaatataattaatcaaattgcaaatattataatttcactccaataatatttatgaataatttgaaaatgtctcaattaaactactttaacgttaattctattacaatgtctcgattaaactaaattattaaaaaaacataaataaattatttcataaaatcttcattaaggtcacgggttataaagtcttgatccgcattattatcattacgagttcccgacggctgtgacggagaaggaacatatggttgatctgatgataaaccaagtgttaaattcgctagctgagcttggttgagaataggagtcgaaaaaaattgttgctcctgcgatgaacacctaaa

SEQ ID NO: 317184 - DNA, 1087 bp, Cannabis indica
aaatggtaccttatgtaattatttctatatattattgaatagttgagtctggatatgaaaagagatcattttgatgaattaaaaaaaaattatggatcaattttatttgtaatggtttttttaatatagcattaattgggtagaatttttttttaaaatataaatacatgattctaaaattttttagaatatgtttttacagactctaaaatcctttaacatctcttgaaaatggtctctaaaggctaaaatttcaatagtaaaaaggacatagagttttttgttcaacttttttttttttgagggaagttttttgttcaactttgatgattatgactgcagaattttgtaatagtgaagattcatttattcatatattctctttgtgtgttgtgcattggaggggataaaatagaatcaaatgctatggtccctcatgcctcaattattattactctaaaagctataatttcctataaagtgactttagcaacaaatcactttagtcgttgtggagacaaagatacaataatttcatttatttaaaggcctatggcttacgtgccctttgctttaatcttctgatcattattgatggagaatcccaagttaaaatggataggacatttttcggtattataagtggtggggacagctcgccgagttggattagtcttgaacttgccaggacattcggtattataacacaactagaaaacgaatgcacggttgttgaaatatataaaaaaaactaaagaaatttttttaggtaggaatattatttttacttttattataggagccttttctatttccaacatctacaaaaattatatttttattatttttatgagaatgtataatgtagttatatcaaacattcaatttttttaaataatttataatattaaaaaatactaaattacaaacacatatatatatataaaattatacacgtgtaattaatttttagtaccataaattatttaaaattttcaaaagatagaaaagaaacctaatataactataatatatatacattgttatatataacattggaatgtattacaccatatactattttttt

SEQ ID NO: 317185 - DNA, 1365 bp, Cannabis indica
aagcgggctttaccctatggtcgcaactaggctttatgtagtcgggaccaggggcaaaacacgggatttttggccagtttttgactttcaccattcaaagttagaagccttaattcctatataagggttgcgtgttttagaggcgaagggggcagaaattaaaccctagagatgaaggaggaggcaaaggaagcaattgtggcggcccggaggaagatcaccaactagttctttcttcccctttttatgtctttatgttaatttctatttcaatttttatggatgtgaacatgagttttttaaactaaattcccaatttagggatatgattaatgttagatgatatttctttaattcagttaatgtgattattagtttttcttccctatattgtgtgatttgttcttatttgttttaattacatattttagactggccatcttaaatgtgatttatgatcctaatatgaaatttgagaagtgaatattaggaatgctctaataggacaaacataagttttggtgtaaaacgagagtatttagatagcttatgtgatttttagactctgaatttaatacaagttatatgttaatttacttcagagatgcaagcagataatatatgatttaggaccttaatgattagagaagagttagggttaatttgataatttgtcatcaccaaaagggagatgattaataattaacattaacaattgtgaatctgaactaacaggattcatattcctaaatattcatccataattaattatattttttattattattttcctggttttcaatttttacttatttaattattcaaccttattattgattatatcaaatagaaacaagaattcaattgattggtacttagctacagtcctcgtgggaatgatctcacttacctgagtattacttgttaaaacgatacgtatacttgtgggttggatttatcacaacactcgacccaaaatctgtgggtcagagaatgagtaacctcctaggcaataatgatattatcagagaccaacctgttaggtaagaatggactttgagtttgagatgtgattttagaaagaatgggcttaagctgattaacaagagatagagggatgattttatacaatgttgaaaagagagtgatgggacgataatcaagaagacattcagggtgggccttcttcggtataagaacaatgatggtgttattgatggctttgatgatagctatacaattaaagaagctcaggataacacaaattacatcctcacccacaatgtgccaattagacttgtagaagtgttgcgaaaattattaaatactacgcaagtgcacgcaatcaagtagtatactcacgca

SEQ ID NO: 317186 - DNA, 521 bp, Cannabis indica
ataatatattaaaaaaaaattatacaaagaaattgatttataatattcattctattaaagttctgagtttgaagggtatagatctaattttttcaaagcaatgttgaatgtaattggtcctgacatttttgaagttgttcttgaattttttaatgctactattattcttgactctttgaataatgctgtaattttcttaatccttaaagttgacaacccaagaatgtctaaaatgttttgtgtgaaacttgctaaagttttgcatattcttgtcactcataatcagagtgctattattaaggagaggtctattgctcataatattttgatattccaagaccttaccaaagattaaacagaaataatatttctcctcgctatgttataaaaattgatcttaacaaggcctatgatattattgattatgctttctggaagatttgatgaaggccctctgttttccttctcattttatcaggtgagtcatgacttgtttgttagacttttatttgggcttacat

SEQ ID NO: 317187 - DNA, 3195 bp, Cannabis indica
tacaatcaatataatcatggtgtaagtagtaaaattctcttacatcaactacaatgtcatagtttaatctttgtaagtcattatttttttatttattaagctttaatattatatttattttcaaatatatttaaattcttcaatattttttattattaatatggaacaattttatactataataatttaaagtttgttattattgtagtgggaagtctttaatttttcttttctaatgtatattgacaattttattacatatattataatagtaaacaataaaataacacattcaataataataataaaaaaaaaacttataattatataaaattgaataataaattttgtcaaagaaaaaaaatacataataaatagatgaaaaaatgtgaactaaaaaattatctgaatagtctcatctcaatttgatagtgttgacaactttggaaaattatgaggtgctaatttattttattttatttattttaaatttaacttttaaattaatttaataatttaattttttttaaaataataatatatggaaaaattcttatactataaaaatttaaagtttgaaattatcatggtgaaaagtcttatattttttattgttaatatatatattgatggttgtattacataaaatataatattgaacaataaaataacacatccattaacaaataatatccaaataaaaagttattgttctttgtcaaagaaaactatgcataataaatagatgaaaagtttcgcactagaaaagatctgaatgatctcgattaccgttgatctcaagcaaatttgatctcaacctaagggtgatgtgttgtctagtcagtaggagacaacaacctgatagagaaacatgttcgatacttatactgaaggattggtatatgcattactagcatatatattttaacaaggtaaatagttcaacggacagttgtttctttagtttctacaaccccgataatgacatgctcaatccagacccactaaattagtttaggatcccataagatttggtctttataatttagttttaatttgagattaatcttaattaattatacaaatttaaatctttatgatagtatattaattgatcttgttattatgggacaattcatatataaaatattttttctcaaattttgtaattattgtgaacaataaaataagatgtgagataagtcattaatatatcatccaaatgtaatagtttataaaaactttgaatagtaagatatttttcaaacatattcaataatcaaagtgtcaccctaggtatttcaaaagatcaacagttgtattataactaagattatttatgttgagttaaactatcaaaacaatccaatcggtttagaaatcgttgtcaatcaaactcatatgtagtagctttgggtaatgctagtaggtaaaagattctaattagtgtgtggtacaattattttttttttcctatttatacttaattaatttcaaattttggcacgagaccgcaccatgtaaggggtttttcccctacgtcagacccagggagtgcgtgcaccacaaaaagaaaattacatttttgttaataaaactcatatattaactcatctgatgactatttataattttcaattaattatttttcttatttatttacttgatgaatatatataaattttaattaattattttttaattttgaatttatatattaacttttaattaattttattctccacccaacaataattgtagctagaaaaatacaaaatattcaagataaaaacttgtgtgtctttgctctcagtgaaagtatcagtctgatttccccttcgtgttttcaccaccatcctgtgtcatgaaaaagacttaagacaaaaacttgtgtgtctttgctctcagtgaaagtatcaaaatattgatctcgcttttagccaacgacaatgagtcaaattaaagcgattaaaaataattaaataacaaaaaaaataatagcataaagtaaagaaaacactagattttataatggtttgaccccttatagttggtaatagccctatccccctttttgttgtattaacttgtgagcaagaatgaattattctttatcgaaagcttttacaatgatctttaagcaatttactcttagataatagtttctctctagagtgttctctctctgaatatttttatgtccctgaatagtgagatgagactactatttataagaattaattacataaattagtttccctaaatcaataataaataaaataggaaattagtttatttccataattacaatgaagaaatgggaaacttgggttgattacctttattctctaaagataagaattcatcccacaaatgtaaggattgtactgtgattcgcaagcttggagatatacgagatatatcttaaaaatttctaacttgcacccatttgtcggtgcatgcgagctacctacctagtggagctggtaggatgtttgtccatgatctgctcggacatcctaccatctatatatgacttcgagcattataactgtctttacgacctactgggagtagaatcattcgcccaggttatgagatatgctatatatgtcacctagatggatgccacgtcatagtgtagaaatttagataacacttgcgaattcatgagtcagctcggataagcagcgatcaaaattataatctacttaccgcttccatgggaacttaacatactcttattcaactataaatctacgaacatgttccgtatcctacttttctaatcatatataataaattaaaactactaaaatataaaaaagtttactgaaccatgcgtcgagcttatctatgatgatgattatatatatcttgacgatcttcaaagaacaaccgggcaactctgataccgaattgtaatgtcctactagtttaggcatgctatagtattttttaactactgtacactcctttactaattacagggttaattgaaaaatatgatttattaaaattttcttaacaaacttaaactgaaataattatatacaaatgtgtaattctaggatctcgtataaaagtttacaactgttttcaaaatatgtttactacaaaagttgtcgcctagcaactaacaaaatatgagcctacactgtaacaccctaactaacataggcgtattacgtgatt

SEQ ID NO: 317188 - DNA, 874 bp, Cannabis indica
tgtcatgtcgtgccaatttgtagtatcattctttcatgtttgtgtctttcggaatcgtactgattttgtgccgtgtcaaaagactcaattcgcatttacaacactattaattagtactgttatgagtaacacattaaaaatagctaatgatattttattgtaaaatttattatattaaattatgtaagtgttcataataactaatgtaaaatagctataaaggtaaacatatagctaaaaataataataaaaacatatgttgaaaaaggctatggaatagataagctattatagttcaaaattttagggaatgaataaggtttagctaaatgtagcaacaacattcttaatttttagtgcaaaactataatttttttttattattttatagaccttagcgggtttgaaatggggcgggagcaaggttggggacatgatgaggacataaatagaaaatgaaaattgagttagggggtgcatttgcgactcattacccacctaattttcatctaataacaatagaattagtgatgaaaatttgactcgtggggacggataccctccccaaatagggtgggaattactcgccttaatgggtaatagagcaggaatagggtgcaattttatatactcgaaacgggttcaacgcggtgttgtggggctgatactattcactttatatttgacttaaatatataattttttaaatttttatatagttttctaattattaggtattatagttattgattatacttaaaaagtgaactatgaatctttcataatttattgtgtagtaaagactttttaataggtagaatatttatttatttttaggtcactatttgttctttttatttttattttaaattta

SEQ ID NO: 317189 - DNA, 766 bp, Cannabis indica
atatatatatatatataccaagtgattaataatgtgaagaacctagaaaagctcacttcagatccgtcccatcatcatctgatgatcaactcctagttatctttgtctgtttatataatgttggagtatatttatctttaaacaggccagctgatttaagaagcttggggccagtagccattcacatgtgtccttttatgaagaaacaaaccaatgaaaagttaggcggacgatcacgggtcatcatttgttggagaaacttaaacccttgtagttacagcctacaggatatgaaatataaaaagaaaataaaagcgaaatttctagagagagagaagggagaagactctatctaaatgaaactacaccaattttttataatttaacactacaaataataacaaacaatattgaagttttatatatttcatcacagtgagcagtcactatttgttttttttttattatttatttaaagaaatagtgacgattaacttcttataaatttgcggaattgattggtaggtatttatattattatatatatattcaaagtataagttatcctgttttaatttgattttgcgttttaaacttattatatacagtttttagatttatatctacataactgttataaaataatataaaataatataaagtagatgagaagaaagaagtagaagatgaagagagaacgagaaagtgaatgagaatttctgagttgtttattccaatggggtgaacccctatttatacaaataca

SEQ ID NO: 317190 - DNA, 1113 bp, Cannabis indica
taagaaaaaaattaataataaaaatctattcaaaacttgttgtgtaaaattatttaagaaaatttagttatgattgtgagaagttaaaaaaaaagttgttttcatattatataagtcatatataataattgttaatatttttttaggtatattataattttttttagtaaaatcgatattatttgcttagtttagtataaatgtgtaaactctcaaaaataaacaattcaaaataatagattcaatcagtatttttgtagattaaatttgaattaatatataaattagatttgattcaaaatataaaatccgtttagtttggattaaatgcacactaaataaaatattatgaattgaagtagaccaccacaacaatgggaagagcagaaaagttttttaattatggaaattaaatgattaatttgaaatagattttctcgatcaattgaagaagagatatgagaagttaagacatggtgtcgcgaaggctttggtcttaagtttttatttttttagagctgcttgatggaggttgtaatcaagcaatgcattaattttcataagacagatagtttcactctatcataatatctcttgttcttaaaattaaaaatccttctaaggcaattgattataggctaatagtctgatgtaacacagtttataaatgcatttgatattacaaaatttgttgaagaactataagagaaagaatatatctcttagatgtgctataaaaattcacacaagcaaggcttatgacactatgagttgggattttcttgatgatcttcttatagcttataacatgcctgaaaagttaattacttgagtaatgaattgcttaagagctacctcttatttcattcttatgaatggtagagtgcaaggaaattttaaaggtgaaaaggaattgagacaaagagatctcttgtctctcttactgtttgttttaatcatgaaatatctcactaggagacttcagctggctgcctatcaattaggggtgtacgtcgatcggtttagtcggttaatggtacattttattcaacccaatgtaaagattgggttataaaaatctaagtgcagcacacccaattaagaaaaaagaaa

SEQ ID NO: 317191 - DNA, 842 bp, Cannabis indica
tttgtaaaaaaaatagcaaaagttagtataccatgtaaatttccctagcaaaatgatctttgtattttacatgaggtcacgagttcaattcttaatagatttagattcgaacttaagtaatgtaaaaggaaggcattcatatgcgaagaaaaatttcattatagtaaagatactttttgatttattaatttttttttatatattttaaaaatttattccattccatttctatttctatttccattctcattcctatatttttattcctcccaaccaaacgccacctatatgtaactatcacgtgatatctaaccacacattactactaattatgtaattactaccgagtaataacacaatgacctctatacaagtctaatttttttttcaataaattgtgttcttataattgtcattcatatgtttacttcttgtaacgtaatttgttgagagagaattttgacatatttttctctttttatgagaataatcctactacttctagtccacccttttcaagtataatttttatgttatgtatggttgtgtctaaaggcatatcggttaaagtagattcttcttttttatcaatcgaaaccttttcccaaactgtacaagcttcttctaaagcatacgacattttagatgtagatggtgatatatctatacagatagatcttctatctatcgtataattcttatatatacgatataatgaagtaccacatgagtggatatataagaatcaaaatctaccgaatcaatcaaatttcatagttcaagaaaatttagacttaactctgtcaaaccaagaaaaagatattgaagaaaattatgcacta

SEQ ID NO: 317192 - DNA, 1599 bp, Cannabis indica
tttaaaaaataaaaatatgatgacttagattatacaaatatttaactctaatgagttatattggggactaaactatgcatgagcataaatacataataaagacatgtaacttatatttctaacaagtataacatagcagcaacaaggaacaaattattcttattgggtaagctagtaaaggggttaaaataaccaaagtcttgctaacttcatcattaccataagaaataaattagtaaacattaaagaaattattttcaatcacaaatcaagctttttgtcaggtctttagagaggcaagtggtaggtacattatatattatatataattgttattttaatttttgtcctcatgatgtggcatgtttacgtggacaaatcagtaccacgtagcagtacaactcactaaaagaaaggccaagtcagcacccaagcaaacgaagaccccgacattcaaacggggatcaagtggcagaccaactccctctcaggagctggctagccgaaggacagcaccatggtcggccagctagccagcacaagggcctgcccggccaaaggatgttgtgctggccacacaggacactcctccatgtggataacaaagatgggccgcaaattaggtttaaaagcccaacaaaatagctgaataatatctagaattaagggcattttgatcttttgtaaatatctaactaactatacgatttctaaggtatttgaattgtaaacctaaggtttaaggcttcctatataaaggccttaacctcagactgaaaacctaacttgcctaagttgtcactaagcgagagacctgatctcaagtgtttgataaactctctctcttcctcattctctcccccacgccaccttaaggttaggcaacacttgagtttcgctaggcattgattgtaatcttaagggtactatagcagatctgacctgtagcgatctggatagtaattccctcgatataatacaactaaaaggggagtagttcattacccgttatcacaagggaactgaacctctataacaaattctattgtctattaatttttattcttatttgtgcacacacatggcaagcatcagatctacacgatcccgctctcggttgatcactttttgaggtcaataatttggtgctctaattgagagcgtggatatcgtgatctgatcgaacgcaatggcgaacacaagaagaactcctatcgcaccatctacatcttcggctctccctcaagacccacagattgtagatgcagacacttgggttccagtcacaacttgaatccccatgaatactgtagatgtggtgaatcccatcactacaacaggcgcaacaagtctggctaccgcagttggccaacctgacgcgagcatcccagtggatccaagtggcaggctcatgcctctaggagtagatcaaccattggcacctcgcattgaaggaatgacccaggggcgatagcccttagaacaacaactcgacctgctagagagacagacccagaagtgggtgagccaacaattggggagcctcaccttgacctaggagaagaccttgagttggccagactcggggaagctgtaggt

SEQ ID NO: 317193 - DNA, 1008 bp, Cannabis indica
ctcttgatcctcatagattttcagtagttgtcttaaatacacaaatttgagagaaatacaaacatattgagcatacaaattaaagagagcctaaattagacatacctctggagtgagctccatgttttgaagagcagtaacaattgaaggaactcgaaaatgggattcgggatgagattcctgttaacagtactaatgaagattagagttagataggtagatgaatctgcagaggctcaaataaaattgaatcagcattgaatattatgagtaccttattatgacccatggcaggagctacagcataaatgagacgagcatttttcaattcttcatttgaacaaacgatgctcttctcatcagtacgacccaaacaggatacgattaaacggtttcgtttcttgaagaaagagtttgtagttgtaccaacaacaccatgaccattcaacccaagcattgcattccctaaacacaagaatagcagagcgtgtttaatttgagcccatgaataatgtaattattgtaaaataaaaacacacgaatgtatgtatgttgttgtgaattaaattcaaagaaatataatttagaggcaataagacatgattaccgggaagaagagaaggtgaagtgaagaggtccatctgagcaatgagatgatgataggactgtcaatgcctcaaattgaaaccagaaatactatatatcctaaacatcttccacttattattattatatataaataacacaattaataatgattttaactagggaataaagtgtttaaaaatttaatacttccaattaaataaaattaatattaaaatttattttttttagaattgaataaatctaaatgaatctaatagatacttagatttaaaatattaaatgaatctaattcaatttatctataaatattaggaattatttcataaatacacaaaaataacaaaaaaaaaaaattacaaaaatacaaatttcacgaaattttaaatatttttaagattt

SEQ ID NO: 317194 - DNA, 586 bp, Cannabis indica
catataatttttttaaaatattagacatgaatgaaggtatttttataattttcattatttcatttattatatttgactattgatagttggaaacttctcttttgggtcttggacccttgagagttttcgggtctcgtacccttgagagctagagacctctctttggtgtctcggacccttgaaagttaaaaaccactctttaggttctaggaccctagacagttgggaacctctctttgaggtctcagactcgttagagctagagacctttgttgaaggtctcagatcctttagagttggagatctctttttggggtctcgaacccttaagaggtaaatatctcatcttgagatcttggacctctttagttttactcgttcctccttattacattcgcgacatttatagcgaactttggaacctttcagtttttatattgcctttgtactttctgtaaagaccgcttagtttaatttggaaattaacagataattagggtttaattatgaaaactatttatggatatttaaataattatttatgttgatttatttgaattcagaattcatttttatgtcatatagt

SEQ ID NO: 317195 - DNA, 1192 bp, Cannabis indica
atataattgtgtttgtacatttttattatgctatttggggaatgactgctacttttagtattgtttgacaattaaattcgataatatattgtattaactatatctataaactataaataattaactgtttgttagaaacagtttgatcatcaattataacaagctgatggggtaattgctctttgctaaaaatgttatttgtatggtaaattttgtgttatatagtttgattacaatttttttttaatttatgtgtaatgtgtgtatatttattataaaataaaataattttttataatattcaaaaattatttttttaatataatagatattcatgtcgagtattgttggacataaaagaaataataataaataattatattttacattctgattcaacaatgttagacataaaagtagttttcattgttggtctcgttttcacatctagcacggttgaatatgtaagaaaaaaaaataacttatttcatgtccttgtatagcatatccgagcatgaaagctttattaatggttatggaagaaatttttggtagtagtggattaatactttaactatttttttaaataatgtgctaatatatatataattttaaactgaacaaaattcatctcctcataggacaaaacccctgttcatgagaagaaatccaaaaaaaacacacttcgtgctcattgtgttttgtatggttttgcttactgaaaaagccctcatttatgaatgactacaagacaatctagcagtacagtaaggacgattagaaagagtaccaaagtagacctaatataatatattaataaatgtctttgtactcttgtaagatactgaaatatttaccccccctaagctctgtagttttctcttgtttcgactgttattgacacattgatatattaatgtaggtgctccaaaaatcagatttttctccagcagaagaaaagactgaacctctgagacattcatcaatgtactgggccattgggccagtgcaagtggcccaataagtattggtctttagacactgacacggtagggtgtccctttttgtttggtcttttctcaagtgtgtcgtagggtataaatctgaaaaaccgtgtttttgcaaatgtcagttatatataagaaaatataaaaactgtaagcgtttgcagcagcagaaagtaattctgcta

SEQ ID NO: 317196 - DNA, 690 bp, Cannabis indica
tttttatttttttttctttttgcaaattctttcaaattgtgtttttccttccatttaaccaaaacaaaatagaggcatcaattaattaaaatcaattcaagaaggaaaatttggctagtatgcttaaatataaaacatggtgttttaatgtaccacaccctattaaaaatagtatatctatacttctaatatatttttctttcaaaaatccccttacatttaaaaaaacttctctctctaactctttcactctctagtgttgaaccccgacctaggatctctgtcgtcgaacacacagacccagaacttgggttgtaagcccccgttgtcgtcttcactcacgaattttctcattttttacattttcttcttctggtttcctagtttcttgcgatattttttttatatttaataatatttagcgatgtatttgtaatgataaatcaaatatgaggttaggaatgaagtttagtgataaatagcaatatttggcgatgttttgcgtatttagcgatatttagtgatgatattagtgatttatttgtgttatcagactaaaaaatgcatagtacaccgctaaacatcgctagtcatcgtgaaaacttgagtgtgattttgtggtattttgtgatgttgtgaattagagacatttagcgatatttcgcaacatcatcaaaaactagaaaaaaa

SEQ ID NO: 317197 - DNA, 783 bp, Cannabis indica
aaaataatttccaacacatgtatgggagcctatcgtattgaaatttcagccatacccgtcttttttcatgtggaaagagatattctgggaaaatcttggattgaatggagctcctcactttgaatttcaagaatccattaatagtaattcggttaacatccggttcttggatttcgacaatttctcctgccatcgctaccaacctagccatgtttgatttggtaattgccttagtatgtagattatagatgcgccctgagatgatgaaggacgtcaattcgttttcccattcagacggaatccccttcattcgatccagtattagaaaccccgcattaagcacccatggagatcttcccaggatcctttccaacgtgttgttctcagaaaaagaaagaaccaagaacagggccttggttagaatcttctttaattttagatccaattcattatcccccaagctccatagcttacaaagaatattcttgagcaaagaacgactaaaggatttcattgtgcaaagtcgaccaatgaggcaagacttgccaatgtcctcagcccctgattcgtttattttccaaccttcttcgtctgttaccgtaagtttgctggtgcgagccagcagatcttctattggaggtaggcttggagagcacatcttcagggtaggctcttccgaagagagcatggaggaagtcgcagaatcgcagaggtcaccgagaagagccctataatatgtttttttttttttttaggtaattaaagtcttttattgaaaagaaa

SEQ ID NO: 317198 - DNA, 1176 bp, Cannabis indica
ggtttcaatatattaaaaaacttgattcaagactcaaaccccaaacccggactagaaccaaacccgcctgagatccaaacctagacccgggattcaaaccttgacctagattcgcacccaaacttgacccggacccaagaccgagacccgaacctaaatccaaacccggactaagattgggactcgaatcgggatctatgacctagacgcgaacccagacccaaacttgaagcccaaacccgaacacgggaccgggacgcggacccgaacacgggagtgggacacggacccaaactcgagtcgaggaccaggacccgagactcgagacccaaacttggacttggatcggacttggacccagacccagactcgagacttgagacccaaacccgggcctgagacacagactcagactaaggacccaaacctgaactcgggactcgggacccgagactcagatctgaacccagacccagacccagacccaaaaccgagacctagacttggacccaaactcagacacgaacttggatctggactcgaacctgaacctgaacccaagacccagacccgaactcgggacctgaacccagtctcggactcgagaacaaggacctagacctggacccgtacctggacccgagacccagacccagacccaggacctaagacttaggacctaggtttagactcaaacccgagacctgagacccaaacccaggcccaatactcggactacagactcgagcccaaacccagacctagacatgagacttagactcggacctggatccagacctgatctgtagttggtgttagggtcgagtttatttaaaatatatcacaactttacacaatctattaatacaaatatattatttattaaataatactaatataaaattaaaatggatataaaattatataagatataaaattaaaattcttaagaaaaattcgagtcggatctgatccaattcgagtatctaatttagcgggatggggcggggccgagtggatccttacatgatctaaatcaggtcggatcatagctgaatcaaatgtgacccgatctatttacactcttacgtgtacgttttagttattttgcaccgactgtaaatttttgaaaattttgagtaatttataatatcaaaaataagatttatatatttt

SEQ ID NO: 317199 - DNA, 1252 bp, Cannabis indica
aagttctgaatttttactattttaatttcctcattaaaagttgtaactgaacagagtaatatgacaaaagaagttcatagtacagtaaaagaagaagagaagatgctcacatgtccatgagtgacctcttcccgaatttattgaataacttcacttgtggcggaagaataccgtggtaataacaagcaacacagacaacgaaaaataacaaatcccacacaacaaaaacaaaggaaatccacacacaaaccagaaaccaaaaaagaacaaaaatagtactcaacttttacacttgaaatacagaacagataactcaaagacagacaccaacatcaaaagaggattgggcaactaaaaaaacgaaatcgatatgcattcttcatggtaattacattccaactctcaacaaacatccagcagtctcaaaaaaaacttgatactaaccgaaggagcagcacgacactagaccaaagacatcaacaccagcaccatcaaaactcaaaagtcacacaagtccgtccgaaatgacaccaacggctcctcagtcctcacctcatttaagtaactgcaagagagaaaggaaaaataaaaagaaacattatatcacattataccaattctatagtttcattgcagagtatcttttcaatgaaagtatttttatatttgatattatatttgtatgttaggtgatataaattgaaatacaaaatttatgaaaagaaaagtacaattggtagggctgagaaagaaaatttaggtggtgaataaaagagattcaaaagttatgagttatattcattcctacgtcttggaaaatttatttgtattttttttttaaggaaaaaagacaaaggaacatgagagaaaatcttaagggaaaggaaactaagtacaactaaaaataataaagactttcagttaccacttttgtaaacttacatgaccatctatacgtatttgaggtatgtgttgaatgttgagccaatcttctcctgtttctctcttgcaccttggaattaacagacgacaatctttatactcaaataaataagactctgggaagtcctattggcaagcactctaacttttccaacttccaaagatacaactcttcaagtgaggtgaggtggtgaaaaccattggcgtttagagttgtaagcttatcaaagttagcgatgataagatgtctcaaactaggtgggagcagcccttcctcgggaaatgaatccaccactccactataatagtc

SEQ ID NO: 317200 - DNA, 500 bp, Cannabis indica
taaaatctgatgccttttcattgtatttgctactatttatagtgcaagtttgctcctcaaatatggtattttcgtgtaccatttagtgggataaatggcacaaaaagctgaacaaatggtgtcataggcatcaaataaaatcatgctttcatcagcatgtgttggaggagacaatcgtgggcctcgacgtcagtttctgctggagagaggaggactcgaaggacatgtggcgagctgtggaagtgtgcggcttgagtggtcctgctcgttagttattttaatggacgtgggaatgggccatgcataaaacatcattcctccactttgagtttgacccaaacctatacaaatgacttgattcttttaatcaacacaatggcctcacgtgccaactctttgggcttcactttggaccaaatgtatatgaagtttcttttaggaatatgataactctaagaattagagttattttcatatctttaagcttgaatttaatgtga

SEQ ID NO: 317201 - DNA, 1317 bp, Cannabis indica
aatgaatgacagttactaagttcatcaacgcatgcgtcttccataccggcgagttgactgttcatattccgatgtacaactcgcagggttatcactatgtctgtgtctttaagtagtcgcttcttctagacatcgtgtgttgagctgatagaacctagacatgcgagtctacatcgctttataaaaggctgtagggttcctaagatcaactcgtactttacgaggacaaggggaggatgatcgcatatattcgatatatgcgatctactctcttgccttggatgcgattagacttcggtcatgctcgccacctctcactgattataccttaagcaatgtttgaaactacgaggagtccctcaaggacatctcagctttctgtggaaaaactgagtatacgtgtcctttctagtgggggtctggtctcgagtttctaggtgagaggaatctcactataacaatacgcaatgaatatgggtgctcactgctctcaccatcttgtaaatttggcagcccattctaatgtttttggttgtttgaactcttaattaattgggaggtgatccacattgtgatcaccactgctgatggcttttagtttatagattctcttctcaatttttttttttttaaaaaaaaaacgaaagattaaaaaagactatacccacatcaatatagttaaaataagataaagtttcaaaattctgaaaaaatgtgcaaaaatttagatgcatcaaatgagataatcgggaactttttaactttctaaatgtagttacaagttatttaataagcttcaaaattatatttttatatttttatgattttttttctttcatctattaaaatatatagttatcattttattattattactagcgaaaatggtataaggtgtaatataaaaatttgtgataaaataataaaaaaataatgtataatcttcgaccatctctaatgattgtataattttgatgtagaataaacaacgactctaataattcatactaaatatttcattaaattaatatattttacttaaaagatttcacattttatattgtttacattaataactcaaaataactaatttataatataattatatcataagtactagtaaaaatttaaaatattaaaataaatcattaaaataaaatatttattaaatcatttaaaaattacacattttttctaaaaaaagaaaaattaaataaaatcacaacaaatgtttattaaattataatttagttaatatatactttatgttataaatattaataattatgtggatgtccaaatcttttatttgttacc

SEQ ID NO: 317202 - DNA, 609 bp, Cannabis indica
aaacttaatgtgccatattatataaaaacttttaaaatcccataagtctaatttctcttttttgtttttttactataacctttgtagagtttgttctatttattttttcaaagaaaaaaaaacactataactataggcagcattgcaaatgttatgcgtcccttcgattgcattaggttcatattttttttagagtttacgagtactaaagattgaagtggtgctaatctaacccaattcaagagtagttaatgtacaaaattatatattattagatgtagttggataagtaaattagaattatactatttgttgtaatgattttatatgaaaaatgatttaagctggaaagaagtaatctaatttaatcttgttttaaatttcatatttggaggacgaattgataaaagtttgaaaaatggagaaagttgacaaaattcaaaggtcaaatataacaataggcccaagcccaactctcacacgtgttttatacatgtgcattacatagcatgtttttcttctgcaatcaaatacgtggcatattgtttaggagctttttatccaacttcaagcatttttttttttgacgcggtgatccagatcacacat

SEQ ID NO: 317203 - DNA, 1004 bp, Cannabis indica
aagatcctggtaaaataaatatccaacacttatccacttcagatttttgtcaaatagcccacaaattctgttctttttccgccttgaggaagctttttggtggaagtacttggtatttctatctccatgggtcaaccataatgctctacttcgttgtttccaaaatagctcctccttggccaagtgtccattgagatctctttctattgtctttaggcaagaaaagccatgaggggtgtggtctcgggataacttttctataacttttttcagttcttttattttggattgattgtccttcctctgtttgtgattccattgttctagcaagttcccacaaagctgaattttctttccgaactctgttgctgacccactattacatccatattgccaacttgctttgatgatttttttacattcatccatatcagcccaggccttttcgtagtggaaccgtgagctccatctttgtttagtctcttgttcattcggcatggcattaaaagtgaccaaaagcggacagtaatcagaacaccatcttcctaaatgtgtcactttggctactgcgtaaatcttccaccaattgttatttaccattactctgtcaagacgctcgaacaccatatttgctgcccgaccattgcaccaagtataattgctgccttcaacttctaattctcggagagcacatttatcgatggtggtgttaaaatttttcattagataccccggtttccctcctcctccaagtttctcattaatgcctctaatttcgttgaagtcaccctcacacatccacgtccccacatggtttcttgcaagccttttcagaagagtccatgaatgtctcctttgagaaggatctggatctccatagaatcccgtaaagcgccaatttagatcatcctccgtattgatccaagcatcaatatggtaatcattgaacgatcttaactgaaccgagaaaggagccttccaaaggagagccagccccccactct

SEQ ID NO: 317204 - DNA, 2013 bp, Cannabis indica
tcctttcctatcattgcttggagaggtccccaccaaaccctatgtcctgaagtaagattctcaaggaacattgttctaagacaatcaaatcaagaacacaaagaatttattgaaatatcacaaagtatatcatttggaagtataaggatcctgaacaaatgaattaaaattcagccatacttgagcgtcttttgctaacttttgactatataactagaaattcactaatgtctacagatagtatatgtaaaaggtcaatattttaaagggatgttcagaacttccctaaagccttaaatcttattttctaccttctactacatcaaacatgcaatcataaaataagaaaaacaaaactcaaacactattcagaatttcaaaaacttaaagattacttacttgatgaagatgaagaacttgggaaaggtggaggatttgaagtgggaatttgaatgttgtgcttcagtcttaaataaaatcccactgaggaagattgttcgaggtgtacaacggtggtttgaagggagcgagctttattaatgagcgattcaatctctgcctggagatcatgtggtcttaatggtgtcgaagaatcaatggttagaactaggatggcgctcctaggtattcacgtgcacgaatatgaaaaagaagatgaagacactcgttgaagtaatggttcattcaccagagaaataatttttacttttttctctaaatatttgaatgcaaaattcaaaataggtaaaaatggtgaacaaatgatttttgcaatatttatagtaatgaattggcaatctgagtgcccttaaatcaatggctcagattgtatccaaaaaaatacaaaatacgtcaaacatggttcgaaaaaagctgtcagttttacatttaatgcattgcttggaactaagatattcgaatgatgacattcacctcgggacactcactgacatgatcaagtgttatttcgcaaatccacgcttcacgctccttttcagtacgcgtaatttgcacgagccaataaaaaatgccacatgttgctccattccaaaaagcaagaagttgtcaaccacaacttgtttatttggaattcaaaaaggttttcacccttttagcctctacatgtcctcatgccatctagaaagaagaatgcaagccttcaaaactccagagttaggaaggcttgggggtaaatgttatatgtgtttctggatagaagacatgtgtaattctaagatggtttagttcagctacaacaaacccaaatgtaggcccaactaagataatggactggatccattagcgaggtcaagccatcaggatgatggacagagatctcgtccaaacaagataagcatctagcatagtagctctccggataacatcaagtagtgcttcagagagagtggttaagggacgtccagatatccagctccgtatctcactcatttattattaaatcccacaatattaacaatttatttctaggatcccgttcaagaatcaaatattttaaataaggaaatggagtaattatcaatcaactatttatgtgtctttatcatccacaaaggtatgacacattttgataactatcaacataatgtaacatctacgtcaggagaagatcaatatctcatgggtcgggctccatcatatggactgaatgtcaatatgttatttatatttactccattaatgggtaaagtgtacatacaaaaaatctaattctataaatataaaaaaacctatttgggttagaatcttgagaaatttacactaagtgacttaatgtaaaagcgttttatattataagaataaaactcagttagacctcacggtcgttaacaaaaagagtcatccggaatagaagagaccggtagaagacccatacatctgatgggcgaaggcccatctagccactatatgagcggcaaaagttcaaagttctactgacataagagaaatacactataaaagaagagagtattagtacaaaatgagatatagttc

SEQ ID NO: 317205 - DNA, 1078 bp, Cannabis indica
acattttactattttttgaatttttaaatttttacacgtcactcgaaactttttcaggagatcacaaaattatcctaaaacacacttaatgtagaattttttttgtgatgggctaaccataaaataagatacacattgttgatatatagtactaatcaatctattaaactctctttaactatgtaatctcatacctacacaatctcaaaatcatcacacttaacctaattcctcaaatgatatgagattgcatacaaacttacttaatatttttttttacagatcacaagactattgacggtcacatatttcatctctcttgcaaagtatatatatcctagttgcatatttgtgccctcgaatattattgtggactagtaaggggctattctcacttaccactaatctagaaattggttatattaggcgcaaccacaaatttaagtgaatatttcgtgtagatattatattcccacccttttgagtcctattttaatgtacctccaaaaagttttgtttgctcagttttttatttatataatatttttcatatttttatgattttttaataaatatataaaattataaatagtatattaataatacttttttaataacaaattatacattaattaaaaattatatatatatatatttagatttaatcataataaaataatacttattcaattgctaaaattctatcattgaaatttataaaataacttagttgttgttgttaatataatataggtagacttaaacttttaatatgtatttctatatattaatataatatatgtagacttaaaccttcattttcatttaatatgtatttctatatatttttttattaattaatttaatcatgttaattatgaatatatatagaaatataaaagtgaaagtcatgaattactatatatataaattataaagcttactctatatatacatattacaatatatcacccataaggtagattatatatatatatgggtgactattcaatggttatatttttattgtaattatatggttacatttttctttaacctgtaatagcaggttactaat

SEQ ID NO: 317206 - DNA, 1289 bp, Cannabis indica
atgtgaaagagcagtcacagctgcaattatagagcatattcaaaattttcaaatatcttccaatataaataatactttacaaataataatcaaagttctaaatgcacatcaagaaattatctcgtggcaaataaaaattacggtaaaccttccactataacaataataatggatacataatattatactctcaaattttgacaaatacttgaggaatacactcaaaaattctcactcactaatgtggtaatctcaccatctctctacaaaatatttctcacaattttgtaggaactctctttttcttactcttttagatttctctctctaagagatattctcactatttttctctcaagagcctcactcttatttttgaaataacttgtgatgattatgatgggatgggatgaacaaataaaagagggatggatctctattttagatgtatgaagaagacataaaaaatcaatccaaaattaaattacatacttgaaacgtgtagcatatacctcaagttcaaaacatggtttgaaaaaaacacaaccacatttttcacgtgattgaaaaacaagcattacccatcagcatgtggtgacttttgttccctgtgactcaaatcatcactgtaatgggattcacttctttctactattctttaaagaaatttccacatatattaatatatatatatatttatgtggttgatattgattagtactagttaccacttgtttcccaagtagttggactcagtcaataaataagatctcctattcacattatgtcaataaataagattgtaaataaagatgagaaagtgaccatccataatccatgtcttcttcttcatctccttgatcaatattaatcttcttaaattcattatgttttcatgctacaagaacattaagagttgtactaagaaagaagaaaagaatggtttctttattaagaatgggggtgctgtgttagagcaaaccattcgtttgttcaatggaaaatccaatccactccgttcatactcgtctcaacaactcaagaacgcaacaaataactttcatgataacagattcatatacgaaagtggattttacaaattgtacaagggagtaattcatgatgatgatgaagattgtgaaatttgtgtgaaaacgtaccatgattttgtagatttagaaatgattgcaactgaagttgcagtgggatcacagatgagcaaccacaacaatgttttgaagctcttgggatactgtcttgacacagagttgcctatgctggtatatgat

SEQ ID NO: 317207 - DNA, 1397 bp, Cannabis indica
ttctttgatgaccatgacactagtgtgtctcccgggtacacacaataccctactattgatcttctatcatctaggcaataagcccaattcgtatccaagtatccagttgtgcaagtctgtcacatacctttaacatatctcaaaattctcttagtcgcattccaatgactcatggttgatacctttagtaattggctaaacttatttactgcgaagcataagcctgacagagggtgagggaggtattgtaaaccagcaattaagcttctatagagtgtatgattttccagtggttctccatctgatatagataatattttgtaaataatcatagatgtgggacatggttttaggtgtagcatggttttaggtgtagcagttcctctatgtacttcaattgagacaaatgcatcccagtttcatcttagtagacttctatgccaagaaaatagtgtaagagacctaaatctttcaaagcaaaaatctgattgagcttcttggtgaattattactttttctgagttgttgccactgacgaatatatcatccacataaataagaactaggatgagtcgagtactgcttgtagaaagaaaaagaaaaaagaggaatcaatttgaaagcacacaaaattccaaccaagcaatgttgcttttattctgtcaaactaagtatgaggtgcttgtttcaatccgtagagagattttgttaatttgcaaaaataaaatctagtttgatgttgtgatcgaacccctgtggctacttcatgtatacatcctcactcaagtgaccaattaagaatatgttgttaatatacaactgcctaataacccaagcctttgacacagtaatagttaacacgagtctgattatggaagcctttacaacaaggctaaacgtctctaaaaaataaatgtcaggctctgattgaagcccttagccataaggtgtgctttgaacctctaaacagatcggctctgattaaagcccttagccacaaggtgtgctttgaacctttaaaaagatctgtttgcaattatcttcactttaaacacctaattatttccacaatattctgttgggattttatgccctaaataaaacccatttcaatacaacctgatttgttatcaatagaaaattagaaatcatttatgtttatatatagttttcaggtttttagtttaatttatacaatttttgttaagtccagaacatataattattcacaattacagtgatttcaacacagtgaaaggtaattgtgattaaatgcttcaaaagataatatcccatgattcatcagtgcactggatttccactaatgtgatagtcagcgataaagcttacttacaccttgaataagtgttatgttctttccagaacattggcaaagt

SEQ ID NO: 317208 - DNA, 852 bp, Cannabis indica
agagagaaagttattattaattacctctttatattaattggtaatatcatgtttcccccgttgtgcatgtactgcatgttatattatatatatgcatatagttaaaagttaaaaatcaaattgaagatgtacgaattggttgtgtgtacatattaatttatacatgtgtgtatgtgtatgtatatgcgtggcttagctatatgccattattcatgatagagtagagctaatttcgtacatatatatatatatatatacacataataaataagatccaagcaagggcaatgggtgaatcgatgaatatgatcacccgtgaaatattcaatctaatagtaccatatttagatctctctcttccaatattactttctgacaccatcacctattacttacatatgtccaacagacatgtatatatgtatatatacatatcatcagaaagttgggaagacattcaatatttttatgtttacttaatttcaaatttcagagaaatgatgataattattattcaatattcaatatttgtcattaattataaatcagtatttttatgttgtgattaaaaggtctctgactaaaagtattagtcataaaaattataatttgttgtgactaaatttaattttagtaataatgtttattgtgactagaactaaattagtgataatatgtatttaaatattatgttttaatcacaagtaattttttgttattgtgactatgaaatcgtcactaaaagtaatagtttttttagcacttggtatgttattatttgtgtgtgtgaaaaatatcaatctatgcggttgtacctatagtattcttggtcagtggcggacccagaattta

SEQ ID NO: 317209 - DNA, 999 bp, Cannabis indica
tgggtttgttagcctcctagaaactaaagttaagaataagaatatgggtgatttgtatacaagtttatttcaaggttggtgcttcactaacaataacccttggctagataaagggagaataatagttgcttggcaaccaaatgtttattctgtagacattggtatttgcacaagtcaacttgttcattgtactgtttttccaaaactgagagtggggaagtttcatgttacttgtgtatatggcttcaatgatgagaaaagaagagaagagttatggtctgaactggaaagattagcaattaatattgcagaaccatggctggtgtggggtgattttaatgagatcctctatgctaatgagatagttggtaggaaagcccatgctgcaccttctcagagatttaaggattgtattttgcaatgcaaccttgaagatttgaagtattctggggcgtttctcacttggaataacaaacagaagccgggggagagaatttaattaaaaattgattgagcaatgatcaacccttgttggatgaactccttctcaagctcagaagcggttttcttgcgagaaatgtcatttgaccattctcccattctggtatctatttacaaggatagcaacccagggaagaaaccattcaggtatttaatatgtggaaacttgctccccaatttgaaaaagctggtggcagattcttggagttcttgtgtcctggggtcgaaaatgtatcaggtggtcattaagttgagaagattgaaggatgtgttaaagaagttaaatagagagggcttctcagaaattcacaaggaagatatggtagctagttcagcccttgcagaaatacaaaaaagattgagtaatgatccgatgaacatggagttgatagaggaggagatcagagctcatcaacattatacagaggtacataaagccttttctctctttatctctcagaaggctaagcttaattgggctaaatatggagatgagaa

SEQ ID NO: 317210 - DNA, 756 bp, Cannabis indica
acaatgtttaagaaaatgcaattcaaactagacaattacaaattaaactagaacttaattaaattagataagaataaacttaacttcaaaatgaatgaatcgtggatctttattgctcgattagtcactaatacacaatagaatgtgtacatgaataaaactcaaaacagtgaatgaatacaagaaatatcttatattgagagaaataacttcaagagtgatactcctattacatccctccacacacactcactatgatcttggactctctctctctctaaacttgtctctgaatctaaagtatgagtttaggagattagagatcagaactctcttgaaagagtagagacattcctatttatagttattagtgggtttccctttgtattaaagctaactattataactaatagcaactttcttcaaattcatctgatgagtgaatagatcgacctactgagtttgacagattaagtggatttattcccaacaattctacctgattagactcacttaatctcttatccaaaagaaatgagtgaggacagtaaatgtcttgaatgctcaataagtttagacaatgcctaaacttgtctctagttacacttttagtgaaaatatgtgtagggttatcatatgtgattattttcttcacttccacctgcttgacctcacaagaaacattagatttttcatgagatgcaaagcactttgattgtcacagtaaactgtgatattctcagatttgaaacctaa

SEQ ID NO: 317211 - DNA, 801 bp, Cannabis indica
agaaaatgacacgtagataatgacataatatttaacggttatgtatacagaatttcaaaaatattacttaggtattattactgctaaaaattaaacttaaatatttatttacaactaggagttaaacttagatatttatgccgtaaattactctaaatatataaataaaacttacttgggtcagtcagtcaactaatcaaataagagaaacatattgtaaattgataaaagaaaataaaaaaataaacataaagttctttatgttctgttcagattattagcctacagaaattgatatgggctcgcttaaccagcccatcggggctgtatacaaaagaaagaccgattgagaagtttcaaggaaatgaagtggttccaacttttaagacttttttttagggattatttcaaaaatacataaaaataataataaaaaaaaaactacaaaaatacagtttcacataattttaaatatttttacgaattttttaattttatttactagtaaaatacggtactctttatgttgtactcttattaatttgttgttaattttttgttatttgtactttttttgtttgttattttagattattattttctatgttaatttatgtagttttcttgttaattttttgttgtttctatgtaaaaccgtaaaatatataaaaaaaaaattagtatacgtaaaaatgtaattttttttataaaagtaaaatagtgtttaatgtaaattatccctatttttttaatgtaactattacctactttaacttatgtttacctttctacgaattcgaa

SEQ ID NO: 317212 - DNA, 3259 bp, Cannabis indica
ctgtcagaaaacctttgtctgccaaccgccatattgctcgggtagctaccctggccagggcagaataggcccgtcctgtgatcaaggaggaagagattactggagatgttgaagttcaataaatggaggaccagggcgaggtccatcctgcaactccttctgaggtcgagggcaaagaggaaaagggggtatctcgggtgttgccggtggcttcaataagaagggggaagctgtctttaagacaggtgaagtcttggaatttggccaagattatgtcgaggaggtgtatatcgaggctcgtcccataagcagaatatgtccaaagggaggtcgatgggtttctccatcatccgtcctgactttcaagagattgactaatctctttgaagatgatcttctggggcaggtcagatgcttccgtccctctcctgggcagctgtcaacagaccctggagagggttatcgtgcatggtcgggtcctcctgccaaataaggtgcaatgctgcctttgcatctatatttcaaggagatggccaattactacaacattagtctgacccaattcacacctaagggcattaagtacttatctgccttgattgtgttgtacgcctttcaaggatgaggtcagccatccacccatgatactaactgactatttgacttgaagtccagtcccaagcaaaataggtctaggtatctctacttctctcaaatcgaggagagatggctgagtggtaccacaaataccgaggtgacaaaaattggtggctatatggaggattattactttgtcaagggcatggacacaaagcacaccaattttcagcacattccttcttattgctgacctccgttcactttgggactcaaagagagggctcaagaaattctccaacttccctcggatgattagaacatctctctattggccactagctaattttatcaagtataagctttacccatctgattatggacaaggggccgagcaggtagcaggagagcctataccagcctcggaaagagaggttatacccgaataggaagctccgagcaagaagaagaagaggagggctccccaaggtgaccaagtacctattgagtgggccattaggatcaaagacggtgctgagaaggttgctcaatcttctgcccaagtgtcaggaaagggaaaagtcatcgtggttgagcaagaagaggaagactcttcagatgaggattccccttccttgcttgtttgggagggtgcccctgtcacgtatagggtactatattttgttcttaatcttgtttgcacttatttttatgggtgttcatcaaactgctcaaaccgcccgctctacaaaaaaatacgatttgaaattctttgcggtgcgatcgcggtttgagtttttcctaaatcgtgcggtgcggtttgaaattttgaattgttaatatacggttcaaaccacaccgcactgcacattataaaaatactgatttttatatttatttaggtctaatatgtgaatgtccaacccaaagcccactaattattgtattattgaaacttaatttgttttttcatatttattttcaagccttatggtatttttgacaagtgttgctcaaactttgttgtatttgttatagtttaattattggtgatagtccaaaccgaagaaactgtaaaaaccgcaccgcaccattttttgtggtgcggttttttagtttcgtggtgcaggtacggtttggaaaattgttaaaactcatgtgcgggttgatttgaaaaaagggtcaaaaactgcaccacccacaccgtgaacactcttacttatttgaatcatgcttgttttaacattcttgttttacttatgtgcagtaatgtcttagaggatgttgtatgcacttaagaagaggtcgagggatgctctgaccagaagtctccagcaaagtgctcaaaggtggatgatgtgccagccaaaagcataattccaagcatcaagactcctcagccaactttttaggagagctcgattgttccttctgctgatgtttccgaggaggtggtgtcggatataatcccagcgaccaagaagaacttcaaatctcggtcgacgactacgttgtccaaaggttctaagggaggaagtactgatgggcctgggctacccaaaccctcagcgactcctaccgtgctgaactttgagactaagaaggggaaggagatgctttagttttaccaggactgagtgcttcccgaggtgaatgaccgattggccagaggggaggacttgcctatagaggttttcatgggcggtttgctgaaggaatccacccgagtaagtaatttcctttgattttattttccatgcttccatccctagagactttaattttacttcattgtgcagctcaatctaaagatgagatatacgtactcccgaggcaagtctacgaccttaaaagctacaacaaccaccaccaacttgaaaaaggaggtggaggaagctaagaaagaggtcgagcagaagagaacccaactaggcgaggttaataaataactcctagctgccaacacggctgttgagaacttgaggaaggagatcaatgatatgtcattcactgctcagcttgaagcagacaatgaggctttggctaaggatgttaattctttgaaggacgagagggaaggcctttggacccttctttccaatttgaccaaggaaaagaaggttttagaggagactctcaaatcttagtggacagaatttggtgtcgagcgggaggtgcttccaaaggaggtggaaagtttggagatgaccgccctggatgttttctatgaattttagaaggcaaaccttgaagcaaacttttattacctgaatgaaaacaaagaggcatatcttagtttttgtaaagcccaaaaagacaaggaagaattcgaggcagccaacaccaatgctctgaccaaccaaggcaatgagaacccaaccgctaatgacacaccaaacccgtacaaagagtcgaggaatccatctgtttgaagtttctctttttcttattatttttttctcatttcagcccatgggcccttttttagtacaatatggtcgaccaagcgacttttaaacttggaaaatattgcatttggtttcaagacaactggttggcccggtagcttttaatctttggagatatcatgctttgttatctttcaaaatgaatatttttttcttaagtttaaataattacacatgtaaatatgttttgtttt

SEQ ID NO: 317213 - DNA, 737 bp, Cannabis indica
tgttttttcttccatttctaatttcaaagtcactgatgacactgtatggtattatagattgagtcatccctcttgtataaagacttatcctttgaataaagccatttcatgccaattcagattctctattttattgttccatttatcattatgccaaacaaaaaaagttgacattcatttttaatttcaatattgcttaaagttgttttaatcttattcatattcatgttgacatttggaagctatataacaccatgagaactaagggataccacaaatattttatatgtgtacactcataatcttttgattttttatgagttttacatggattccacacactagtgtaattatagtttcaatttagacaggaaaacactgagattaatattgggatgggatttatgattgtgttgttagtttctatatcactcataaaatatgcaacaacaaaattcaattctatagataaacatattacatataattataagtgtataactatagatctaaagaatacctttgttgattcaaagagaagaattcaaatggcggaagcgtaccttaattcatagatagtgatgatcttaatccatcttgtagagataatctttgtggtgattttgggtaatgatcttccaagaaaacaagacttaggttttctaattttctctcttgatgggggaagatgagaatagaaattggcacttgtttcttggggaccactaccaatttat

SEQ ID NO: 317214 - DNA, 827 bp, Cannabis indica
aagcctaacctgaaacttgaccccaacccacccggaacccgaccaacctgaacctaaaactcaaaaaatctggtcttcatacaggtgggttcagttccaagatttgaaaacccaaactcgaaaaactcgaacccaaaaacccagaacacccatcagatgtggacccctaataggaataaaataatccaaaaatatgaagaaaaaaacatacaaattggctatttttgatcatagattataatcaaatggtaaaaattaacttctgagattgatcgtcaatttttagagactgagtcgcgacggcgggacatgctttaggtaagttgtgccttatatttataactcccttatgtgtgaaatttagagtcgataacttcagaaatacaattaaagtgttagacatgacttgatatatcattaaataactttgacacacgagttcaatcacatcaatcagattaatatttagtgagttatggccattttactgaaggttattctgggcccactgcccaagttgacacaaaacgtcgatgtattttttgatgccaaagtgacattttgacatcacttagtccatttttatgttatggcaaagttggttaccaaatcttggagatgttgttgttctacgaatatgggagactcaaaactgcccatttctaagtagtttaccatgttggaaataagaaatgcaaagttatgaattttccttttttgacttcatgactcaattattgtgacaaagtagatggacggacaagacggaatcagaataggataagcagaacccagcactaggccatttgtcaacctgggtgttgggt

SEQ ID NO: 317215 - DNA, 818 bp, Cannabis indica
atcaataattaacgctaattgtctttactaatcaatattctaaaatgtggtcagtacaagcgctttggtgagttgtaacaattctacactaggaaaaaactctagtccaagtggatacaaaagaggtaactcacaaggacatgataatccaacaccatattatgggagcatcatgtgaaactgttttaagatactaggtcacaccaagtttgagtgtaggaagttacagttcataaattaacaaccacactctattgatattgcaagcactagtgatgcatctaacaaatcagtccttatttctacagatgaattttccaagttctcaaggtatcacgaaaaacttaagtcttcatctccctctgtcactgtgattgctaattcaggtaactctaatacattccttctttccaaatcttcaaaatgagtcattgattctagtgccacagatcatataacaggtaattccagtcgcttttccactttttagtctcatagtccgacttctattattatcttaagtaatggatcaccatcttctgttcttagatcttccgttgttgttcgtacacctctgctcactttatcgtcagtcttacatttagctaattcgtcctttaatttgcaatctgttagtcaactcactcttaatcataattattgcatctcattctttctcgatcattgtttgctttaggatcttatgacgaagaagattattggtaaggacatcaatctggttgcttgttcgagtgttgcttatgcttttgaggctcattgtcgtttgggtcatccatcccttcctttgctcaagaaac

SEQ ID NO: 317216 - DNA, 1540 bp, Cannabis indica
taaccaaaattccagtatttttgtaaatttcccaaaacaaaaccgtgaggatttagacccaaagtagacaatatcatactaatgtaggagtcatggtgatgtagtggggcgacaagatggaagaactgggttgcatgtgcgatttatgggaaaagccctcaatgtgatgaccttgcgattgaagatctatgtgatttcttgtatcgaaagtctacctagtattgaggtagtcaagtggcgtgtcccattgatgattatggcagaagatggagatcgatgttaggacctgtgtaaaaaatcttattgacaaagttgatggtcaaggtgtgttccgttcatgattacgatgatacaagatagagatcggtgtgtaagactgtaacgccctgtccaacagggacgccacgtgtgtgcttttgtaaattcttatttatatactatataattataccaaaagtgtaggtaattaaattttgataattaaaatcagatatataaaacttctttgtaacaaaagaaaagtaatattaattacggggtccccctattttcaaaatattatcaaactggtttaatagtgcttttacaacataaactttgcattcccgaaatacattcaaaaagagcatcctgttcactgggccgtgccacttgactgatatgtacattgctgctacgacctcgaactcatggctactcaacctttgccttccctttacctgcaccataaagcacccgtgagtcacaaagactcagcaagaaaagtgaataaaacaataaccaataatgttcagcaattcaatctcaaattaacatgcatacacatttacacaatatcataaacacacaatcctagtactttataaagtacccaaagtacgcctttaccactcgttaaccacgagttgaatatgttactattgtcgcccgatgaagcaaatgataagtaagaaacctatccacagtttcaggagtaattactcataacggtaataatcgtttccaaacctaggtcataaccgaggctcaacaaacatttaatcacaatcttgataataatcaagactataaccattcaaccgctaacatttagccacataccgtgcttaccacttttcttacctcaattcagaactcaagcgtgcgggccaacctgagtggaaaacaagctgggcgatcccggtcatatgtcacgacaattgaaacttaatgaataccgtaatccaaaattctaaaataaaatcctaactcaaaaccaagaataacataactctcaacaactccaaaataggtcaagcatcccataaacaacctaaaacaaatgctacttaactcttggggccaaaaactgaacctgaagaaaactcgagaattctccctgtagggcaaccggtcgaccgttctggcagttctggtgcaccagaaccattcagtcgattggttttggtagaccagaatttcttgggttctctccttcaattttgacccaaaactcctccaaacctaaccaaacttttcaaaatagtataataactataat

SEQ ID NO: 317217 - DNA, 2104 bp, Cannabis indica
atatgtgaaaaattcatataccttgtttttctcacagtgagcaatatcagaaaaccatgtctcatcaatcactacatcaggggttagaggtattcctttctcaaaaacagaggaaatggaagaagttataacaactctttttatagatggaactttagcacatgacctcaaaacgtttagtgttcccttcacagctggatcgatcagttgtacctgaaataaattaatgtaaactcaatccatgttattattattaccactatttctttcttaaaagtaaataagagcatgtctcaaatctctacctgtgggtcaacgatcaaacttgaatcaagtacaggagaagctgtatgaaaaaccccatcacatccaatggtagcagaatcaaaagacccttcttccattaaatctgctttgaacaaatgaagtctttctttggctccatctagagcaaccaagtgttctgttttctcttgatcacctataatagagttcaataaatgagtaaatttcatgaatagagcagttgaaaaataaaaataaaaaagcattcttttagtaatgaaaatcttagaaactgaaacaactaacatgggtcacgaactgttgcattgacagaatatccatggtgtagtaagagcttaacaagccatgaggctatgtagcctgatgcccctgttacacataccaccttccctattccactcattctctctttatctcttccaagtgttcaaagccaattaattctgatcattttgaagtagttgtttaggaaagatgtacatgaactcatttgactattttattagcacgtttgaaagccaatcaattaaaaaacaaatactttaaagtcaatgaggtttctcactggaacatgtaatcgaccaagatatagttaattcatataatcatatatacagtggcaatcttttatgtacagtgattgttggaatttttacctttttatgctaacacaacttcaaaaatacaaaattaatacaatagtgcaaaatgtggtatttttcaaactctgttattttatgcgtccataaaataattagtattattaaaaactcacaaatccaatttactatcttctacaagactcttactccctctccaatccaaaaacaaaattctaaagttagggcttctttaattttctttctcttctccttcttcagatcacggtaggaattagggttctaatgtgttcttgggttttttaagtttctcttcttctcttttctaaatggcagctaggattctaagggttaatgcaaacttcttcttttcttgttctacccgaagcactatccccataaaataaccaaagctttcagcttgatactcaaaaaaccaaacccagtttttacaatggctaggtctctgttacaactttctttctggctaatgaacgaatacctatatttaaatagactatgttctgtgaaaatattgatctagcagagccatgaataataattgcctacccattttggagagccattttaggtgtcatcattttttctattttagtaatttaatatttttattgagtatatgtaagtgtatattaactaatatacactcaaaaatcatatacattgattaagaaaatatttagtataaagaaccaaataaaaatagggaaatttgatatattatgcttaaaagttagaagtggtgtttaattaaactaaaaatttaaacatagtaaatatatgccaatttttcaatattctcccaaaattatccctatcctttcactttccccccattctctctaacagccccctctctctcctccttcactctcaattcgaacccccaacgcttcccctccgtttgaactagcaagctcgaaccccccaatcaacccagctcctccattcgaaccacacggccctgtcgacccctcgctcccacgaccctctcgaccccaagctccgacgaacgacccgagcgaacaacgagacccactcgacggacgccctctcgacccaatcgacccgagcgaacaacgagacccactcgaatcccaccaaccccaatcgcagcaatccaagttattttttttggaatttttctttgaatttct

SEQ ID NO: 317218 - DNA, 1511 bp, Cannabis indica
ttaagtaagttatatagttaataatatagcaaattaggcaagacggtgaggtgagagtagagaaagaagagaagtagttgtaaaaatgagtatctagaaacaaaggtggatatatagtgagctgtggtggtgatctatagaaagacctattcaagcttttgcatatattggaccaaataatcatttgatttgattatttgacaaatggcatccttgtaatgccactacctcttttcttaattaatctcctccaccattgacaataatcactagttccagtttaccaagattaatataacgatttggagttttattatggtaaaaccacagaacagtttatttattaaatattatatcattaaataattctccaaaaaagaaaaaaaaaaaaacatatataattaattaaaatcatttaattgttataggtttcataacaaaaatcttgtgagcatatatagtaactcaggtctctcctaaaaaaaaaaaacaacccttaagcagggccggtcctgagggtgggcgggctaggcgtgcgtctcgggccccgaacgctcagggccctgaaattgtgaaaaaaaaaatattaatatatatagataaagtattaaataagaagaaaatatgacaaaaaattatttagtgtggtggtagaaggtcagtaagaggtcatggaaaatatttaatgtgtagttacgagagattgaaccttagacttctaaagattttttaaaaattttaccaatttcactaagcactacaactaccacatttataataattaaactatatataagggctccaaaatttaatttcgccttaggtcccatatactttaggaccggccctgcccttaaggatgtaattgagatattgtgattaaatctactaaaaaaaggggtgttgagatatccatctcggtcgattttttttttctttttttatgtgtcatcggtcgattcttactactaatacatacggcaaaattaggcaaaaaaaaaaaaaaagaaaattacctcacattcagtttttcagccaaaaaaaaaaaaactcaaataatgtcactatataaatgtggtcaatttttatgggctaaagagcatgtgatttaatttatgtaatattaattgtcgcactcacattcccatgcacgtttgatatctctaaaactagctatactactactactaccagttaaaaaaaaaaaaaaactagctactatactattattgtttatttaattaaaagaatgtaataagaaaactaaaatggaaaaattgatgaagttcaaattagtttaggattaaaaggaaagagtgtaggtttggtttgaatatatctaatctgaatttattttgatattcaaatttgaagcatgcaaaacacgaaacttaatggccgaagtcacagtccaacttgttgtagtaatagtgttcttctctttctcctggcttggttggtgcagccagctgagtccccaccccataggccataggaataggatattgcca

SEQ ID NO: 317219 - DNA, 654 bp, Cannabis indica
ttgttagattttaaagatttttttttaatatatatactaacacaagtcttacattttagattaaagttcaagcacaattttgtaatatcttaaagtttaaagattagatatcaaaatttgaagatatatatgaacaattttcgcattagtaaccatgaatagaatttgacaaaaaatttaaatctaaccatttcagaaatttagttttttttttttttttaatatggcctacgaaaattcaacaaaaatctatatctatatatataaaaaaagaaaatgacaaaagctactttgaaaaatgccgttatgtataggattgcctttgtaatgtattggattggaccttttgatacaaaccttctacccacccaagcttactattattataattcaatttctagctactttccaataatattgtttctcgaaaatataaaaaggaaagtaataactaataatttaattaaaccctttatttatcataatgagataataataaacgcaatgctttcatcaccataaataatatatattccatcagtaggatcagtgttaagatatatcggacaatatttttacatatgtggtattaacttttatggacacttaaatatataatattttagtataaattaaagtttaacatagtattat

SEQ ID NO: 317220 - DNA, 752 bp, Cannabis indica
ggaaagaggtctttcgattatttgtattttcttcatctgattatggttttaatttgtggggtttggtgatttaggcgcaaatcataattaggtgtaataatcattatagattgcaatacttaagtctaaagtctaatctaatctaatctataataaaaatattgaaaatgaaattacactcgcagcacatgaatatttattttttttaagaaaacattcttattaggcacgttgatgtcttgcaaaatgattagcgattgagagtcaatagtgaattgtagtgatatgatactttaggtggtgctagtcttttagtatttttttgaaaaaaatgattgaataaataaccaattgtctatcttggtcgagaacatttttcacgaatgaatgataatctgatttgagtggggctttttgattcgtctgctatttctgaatttttgttcatgtgatttgttgttgtgttagtttttatgcttattaagttatttttgttttgtttattactcttgctttgttggatatttggtgtatgcatgagggcatctttactgataaggtaatcattctcttatatttgtttacttgaattattaaaattaggaaagagagaatttaattaaacaagaagataaaagaaagggaatacttcctccactaattttgtaaggaatgtaatggattttatttatttttattgggaaattttatttacactcaaaatttttatagacaccctattttaataattt

SEQ ID NO: 317221 - DNA, 1574 bp, Cannabis indica
tacatgtcaagacaacacgacctggagtgtttgatctctgcacatcctggatattattttgtagtcactgagcggccagtttataaatgtacttttgataatgtttggaaaggttttaagtatgggatcccggtgtatgtaaataaatatatatatataagttaataaaatttaaagtttatcaaagttgtaatatagcacattatttgaggaaaaaccctttggttagcaaaggtggtatgtaattagaaaatcattgtagcgcgcctaagtattagggcgttacaattttggtattagagccaccaggtttgtctaccaaagattgtcaagacatgtataatcatcatcacagaaaagcttggctcacgtttcagtaagcctttacttgtttagtaatgtatgtatttagtaaagcatgataggaagcatagtagtttataattgttttttaaaatccgttgccttaaaatccataagtccactggtaagattgcaaattaagccgctgcctgagcagattgacttactaattgacaggttagttctatagaatggacacttggtgcaatatggagagtcagaataacatggtcagggctagtaacagttagagagaatagaataaaaattgtccctgtaatcgaggtgactgccattagagggcttctggcaagagtgatgattatccaccacaagctctgttaaatttggaacaaagattcgcggagatggaagctataattcaatgacatgaagagaaaatttagaggttgaaacaacaaagatctcatgctgtacctttacctcatatgccaatcattttcgatccggtattaccagcggaccagaatatggctagtaatcaaggggaaccatttcatgggggaaatcggatgcaagagtcaccagctcttcagggagatttagatctgaaggatgccctttggactaggagccctaaaaaatttattctaaaacctcatgaggacatgacagaaggttgggtcaccactccccttattttcaattatggggaaagtggtaaggcttccttagttgagaaaaagagggaacctgcatcgacattaacaggttcaagacgaaataagcagatccgaaggaattatggtagaggtgaacgtcagggttattcttatctagagtgctcacgttgtaagaaacatcatcttggagaatgcaaccagaaaacatgcttctattgttgcatggttgggcattttaagaaaaaatgtcctcaggcaaagaaagataagcagaagctagaagcaaagcttgtacctgctcagatgtttgttgtcattcaaatcgatgttgtagccaatccttctgtggtaataggtgcttattgtcaataactcctattttactgtgttatttgactctagggctacacattcatatgtggcaacacgggtaattaatattttgggtaggccttgtgactttgttgaaagagggtttggaaccctactgcctagcggggaattggttgtcctcaaaaggaaaattaggtcaatgccagtcagaatggaatgtagggaattgagtgc

SEQ ID NO: 317222 - DNA, 1250 bp, Cannabis indica
gctaagcaagcttggagagttctaaaataccctaattctttgctgagtctcaccctcaaggctcgatattttccttattcctccattcttgaggttatttctggccataggtcctctttctcttggaggagtattctttggggtcgtgacttactcaaacaagggttaatttggaaagtggagaatggtaaggatattaatactgtagatgatcattggctccctggctttcatttcaaaacatttttctcgtcttcccctcctaatcccagcttatcttttttcatttccccttctggcgattgggatttaggtaagcttatttcgataactcactcatccaggaaatcttttgtgttccaatttttggtcataattgtactgataatttgatttggggctcaaatcctactgggaattttaatgtcaaaactgcttaccatttagctcttaaatctagggatatgccttcttcttcctcgtttgatgattgtaagcatttctagtctaagatttatggtcatatggtgccccacctaaggtcaaacacttgatgtggcaggctctctcccattctatacatgttgcctcttctctattcttttgtcatatcattacctctccgatttgtcccatttaccaactgagaacggagactgttgaacacgctatccttgaatgtcgttatgctaaaatagcttagaaacactccatatttttcacttaatacaacacacataaggatagtgaaattagtatgtttattgctagttcttttaacctgtatgaaaagcatagtttggttctactgttttgttttatttgggctatatggaatcaacgtaataatctttttcataacaaaagggtgttttcttccacacaacttttttactatgctgccaataatctggatgattatgttaatgcacattgtgaacaatttaaattgtcagcacacatgcatgttatgagtaaccaggtacatcgacttgctcccaggcaatggatagtccacactgatgttgccattgattttgtttcgaagaggcacagttatggagttgtggctatgggtgttggcgataatctaaaggcagggtttgtaaccccttttacaggtgtgattcctcctgaagtagctgagggaaaagcaatcctagcagctatatcttggattcaagcagccaagttttcggttgttcaattattgcttcatttaattttactatttcagtgattgtttatgt

SEQ ID NO: 317223 - DNA, 517 bp, Cannabis indica
ttgagaattataattgattattattgagaattataattgagaattatgtgtgggttggttcaagtcgagaccctcctactcattttcttgttccctgtgaatacgattattattaagacgttcattttgttgcctactcgcggtagttacccgagggttgcctgaacgcgtgttcaggactcgaggtggatgtcgggtcctggctctcccatcaacttcgacttgcaatgcacgcatttgctcttgcatggctgtatactaggtcgttgtcagttggataataccttcagaaaccacagctggtgtgataggcgggaagttgcctatggtgactgctggtgtcgacatttctccagcatgaccggcaatttcttgaaataaattaaggggagtgatagtggtttatccattaaatgtgtcaaccgaattcactccattgcctgggagtgggacattcatcgttcctattgggttttatgccctaaataaaactccatttcaatgtaatctattttat

SEQ ID NO: 317224 - DNA, 862 bp, Cannabis indica
taaaaccccctgccttataccaccgaagcatcagtcgctagagcaaaggactcaggcgacaatggaatccatcgaataggtcgatttatagctagatgtgcaaggtccgaccccaaatgaaagccccgcctaccgtcttccctaaactctgctaggtgattattggccaattctgaaatatcatctaatcgagattgcttgtgaccaataaaattgagtttgatcataccaaagccaccaatgagttgtcattagtagtgcaaaatcctcacgagatagcttgtcaaagagaaaaaggagaatatcctgcattgatccatgtacacctcgataaagcatcgaccacacccctaactgctgccacaccggaatcaacccagcgtaggaaaaaagagcatgctcagaagtttcaagttccgttccacatcgtgaacaataaagaggtacctgaactttctgggagataagttgtgttgttactggtaatgtggaatggaacatacgccaaacaaacactttcacctttagcagtatagcaagattccatactccatcccaccactaagttagcctagatgaatcggctactccctcctcgaccttgagcgaccacgctaatacgtagccactcttaacattataaaccccatctcgatcatagtgccagcaccatccatcccttgccactcgcctttctaatggaaaggacagaattatgtccacatccattggcaagaaaacttattgaagcttcaccacatcccaaacacccgaggggaggataaattcactcacctaacaatcatcattaatcctcctcgtgattggttgaaaagacgtcggacgcggtagccatgggtcc

SEQ ID NO: 317225 - DNA, 1652 bp, Cannabis indica
gaataaggtgtagtatgagcctcctcaaatatctcctttctgagctcatcactgctcggaacacaaacttgagccttaaaaagtaatattccattattcaagattgagaagtccttaggccgaccctccaatacctcctctcgaatcttaactagcttagaatcttccaactacacctttttgatcctttcgaacaagtctgattgaagtgtcaagttatgaaatttcccaaccaccaactcaattccaactttaatcatatctgaagccaattgaggtactatcattattgtactaaaaacctaccagggaccttttatgctcaaagcgtctgccactatattagctttctcgagattatataaaatctcacagtcataatccttgactagttctaaccactgcctttgtcttatatttaggtctttttgagtgaagaaatacttgagactcttgtggtctgtacaaatctcagacttctccccatacaaataatgttctcatatcttcagggcaaacacaactgtagctgattccaaatcatgtgtcggacaatgttgcttgtaatcctttaactgctagaaagcataagcaatgactttgtcagctttaatcaaaacaaatcccagaccccgtcttgatgcatcacaataaacaacaaacctttcttggtttgatggtaaagctaacactggtgctatgattgatcattgcttcagctcttgaaagctcgtttcacacttgtcagaccatgtaaactgttatttctttttactcaattccatcaatggaattgaaatcttagagaaaccttctacgaaatgtcgataataccctacaatcccgagaaaacttcaaacctaagtaactattctttgccttagccaattcttagctgactcaatgtttcccagatcaaccataattccatcctttctgacaatacgccctaggaaggatacttctaataaatagaattcacactttttaaactttgcatacaacttatgttctctaagtcgttgtaaaacaatccagagatgtttctcatgctccacttccgtctgagagtatacaaggatgccatcgataaatactataacaaaattattgatgaaatccttaaacactctattcatgacatccataaaggctgtcaaagcatttgtcaatccaaattacatcaccaaaaattcatagttaccatacctggtccgaaatgcagtcttctagatgtcttcctcctgatttctcagttgatgataaccctaacgtaggtcaatcgtagagaacactgccttaccccgaagctgatcaaacatgtcatcaattctaggcaatggatacttgtttttgattgacagcttatttaactcatgataatctatacacatccaaagagatccatctttcttctttacgaacaacaccagacctccctaacgcatcagactcaacaaccaccgcatcccaacctttacgctttatccaactaagcgcctccttaatgccaataacctcagctatttctgcagacacacagccccatctactttcagaaatagcttcaagtagcttgccatgattattacgtgcaacacaaccaaaactaaatttttggtgagccttaaaagtcgcaccatcgacattca

SEQ ID NO: 317226 - DNA, 1013 bp, Cannabis indica
agatcctggtaaaataaattccaacatagacatggtgctatacttttccttcttctcagaccaaggctgcactgactgcattttcaaagatgaccaagtataggtaaatatcctctctgtggatcagtttggatagaactggcagcttggccatatgctcattcatcgttccactcaaatttttgacttttctgtaatatgttgaagaatgtgatacatttgtcagtggaacgagagatgaagtgacttagggctgctatcttccctatcaagatttgcacatccttgtgtttcttcagagatggcattttgagcaaggcttgtattttttcagggttaggctctatcccttgttggcttaatatgaatcccaagaattttcctctttactgtaaaagtacacttcttggggttgaacttcatctcgtactctattattaccccaaaacactttcaaagatcatccggatggttcttacttattttggatttgaccaacatatcatccacgtaaacttccatgttccttcccagcaagttcttaaacatccaattgaataatcgttggtaggtagctctcgcatttttgagcctaaaaggcatgactaggtaacagtatactcctttgtcggtctggaagctagtgcattcctaatcagctacatgcatctttatttggttgtagcctgagtaggcatccatgaaagacaataactcatagctagacgtagcgtctaccatttgatcgactcttgggaacgagaagtactccttgcggcaagctttgttcagatctttgaaatctatccacacttgccacgtcctatttggcttaggtaccagtacgagattagccaacaactccgggtaatggatatctacaatttaaatgttggacaacattttgtccacctctcaaagcttcatatttgacggggtcgagaggacgtcttttttgctgcacaactggcatatctttgttgacattcaaaacatgggtaattacgtgtgga

SEQ ID NO: 317227 - DNA, 1019 bp, Cannabis indica
aatatttgagttaactattaattagtagtaaaagtatatatcttatgctatagaatgtcttaattgagtgaaaatataattttactgttggatttcaatcaaacataataagagtaaaagtagaattgatattaataaattatttaatagtatcaaaaattattctttttctgaaattctaatgcttattttggagtgttattaaagtttgtgatgataaatactactttttgcgtgtgtgtgtgcaaatagcacaactattcaactaataaatgtataatctaagattaatattaaataaatttggttaataaaggaaaattttataaaagaaattcgtataaaaatttaggtgagtaaaattatttaaaggatgttgtgatcattgtaactgtatttattatataaattcaattagttatttttaataattattattgtattttgagtatattattgtttttctaacaaatttaaaattatttactcttactagtataaatgtgtaaattttccatttaaaaaaaaataaaattataaatttacattcagaaactaactaaagctaaatatgggcttttaaaaaaccatttcaaatgtatgggctttgaaaacccataaaataactctaattttaaaaaaaaaaaaaaaatcataaaaagtgacgaaacttatatttatgagaaaaaatttaaaaagtattctacttatttttttttccatcttcaatatgcatgtggctaggtcaattgttgttaatgatcatatatggagtcgataaacttattaatcaatcctaagtatataattaccattataagtgtagcatgtttttatagaatatatttctgaagttcgtaaaaataatatactatgtatgtgttcctgtatataaatatatatttttaggtgattgatattacattatgagttttaaaatatctattctatataaagtgtgtctatataactaaaattcttggtttttgagaaatttatgggtgacttttaatttttat

SEQ ID NO: 317228 - DNA, 3179 bp, Cannabis indica
tctgtttttttccctttaaaaaacatcacctcataacaatattaaatactacaatattaaatattattaatagttaataacaatgctatttatatatgtacttctaatttataacttcaattttctatacaaatttttagtcaattttgttgctcaaaaatatatatatatatttttttgatgcggtgattaaaatcacacatgattaacaaagcagcaatcctcaattggcgacgacccctccttgaaccaagatagctcattgtctaactgaagggaatgctttgtcaaaccaaacactgcagaattcttatttcgagccgcatgggacaaaactgtccctagaaatttagacaatacaactataacgaagtcaaacagcaccccatcacattaaaaaataccttcccaatataaattaccgttagagctagcaaaactgaaaaacatcacaacatcatctttataaatgtttgaaaaatttcaaatagttaatagtgcttattgacttcgcttttagccaataatgagtcttaattaaagcaataagaataaataaacaatagaaaacaaagagtaataagtaacgaaaaggttcagttcatagtagtggcaatagtctactcccctctttgttgtattaacttatgagtaaaatgaagtattctctctcgaaatataaagatctttgaacaaattactcttaaattgtgatttcacttttgagtgttttctctctgaataattttgtccccgcaaatagtaagatgagaccactatttataagggctaattacatagtaatagttttccttgatctataaaaaataaaataggaaagtagcatgtttctataattacaatgaaggcactactacaaatttgggatttagaggcaatttttaaggccttttagcgtcagttttggcaaaattctttaccgacgctgatgcaggcaacgttgtagggttgaaaataactggcgctaaatgataccctatggcgtcggttattcacaaataatcgacgctatttgccaaaataactgacgttgtagggataaaaatcgatgttgtagggtttaaattatatatttattcataattattttttcaagttaaaaagcttaaaatttaatttatttaaattttatatttattaatttatattaaatattatttaatttaaatttaaataaaatctacttttaaaaagaactaaattaaatattatttaaattaattttatgattagtcaatatacttaatttcatttcatagaagcaattaaataaattacaattatagattacacaaatattgtaaaattagtccaagtattaacaagttaataaatctaattacaagttaacttaaaaaaaataaggcagggaagaaaaattctaggcttttcagcatcattcctccaagccttcgtaaatcaccgccatcaaccgttctctccactgtcgctgtaatggtaataattcaatttttagattgtatgtctgcttctctccaaactgtaaaaagaagtaaaaatttatattagtttatatatatacattattatttgttaatataataaatattataattaataattaaagcttatagcttacaactttatgatcttatatataacggttgagtttgcacgtgcgacgatgtcagtcatatatttcaaaacataaaaaccacattcttagtttttaggttgtctttgacaatttgctagtgcaattcctgtccacggcccaagatacgcatttcatgcccttataaactggtatgctctgttttaaaaattatattaacatttcaattcattagttaattaaatttttttacataaagagtaattaaattattacctttccaacattttagtaatttgttcgagaactttgtggccacgtatagggtctaaatggacaattttccctagcgcagcgacctctaacatccaatgcgcgctataaattataatataatgtatgtaagatagtataaaaataattttaagttataatatagagtgtttacccgatattccagggaataagaaatatttggtggttgttattcatcgatgataaccaaagggccaatggttgtgatgcattttcaaaagacgcactcttctcttcattgttgacaccattcactacgagaagctctggatcgtaaaacttgaaaattcttctcaaattgttcatgctctcccagatgtgcctgcattaaattgttaaatattagtgttttataataatttcactagaatttgatatataaagttaattagatcaaagaaagtatacatcattccaaacaacattccctggttgccgatgaagtcacacaacaccacctattgcaaatcctctcctgataacatgatctgggtacgaggtgctatgaatcctcgggggtacctgaattgtgattatatcacgtttatctttgactcttaaaaatttatcaaccatccattttagtgagttagggattaaagccatgatctctgctgtgaataattcatcttcttggtcagcaccgccttttcaagaagtcatgggacctttctccttcgacacaccatgtcttgatggtggttgagctagtgaccctatacaaaacactatataatatatcaaatttgatccttattctactgaatttttggcagcataacggatgaaattgaatgcccccaaaaattttaaacatgcttatataataacaaataacacagatttaacagttgtttattcatccatcccaccacagtatattcgtagaacctacttccctatgattgaatatttaagatattcaaactccactaatcattaataattaatttataacaaaagttgccttgggtgttccaattaggtatttaggccaaggaaggaacatgtttactacttccttaacgtatctgcacccgtcaattgagattgagatttcaccatcttgttgcagcatttctgaaattagaacctgagcatgtaaatcatcgtagtctttgcagtgaactttgattggaccctcatgttcgtacaaatacactcaggccacaacgttgtcgatatagtcaaaatagatatatactagctgattaagggcctttgtgttggaaattattttaccaggatctatttactatcatgtatg

SEQ ID NO: 317229 - DNA, 1454 bp, Cannabis indica
gtatagtcccctacataataaacatctaattaaagatcatataacacatgcaacctaacccttatttctctccaaaaacacaaattaataattttgttgatattaatatattataaaatagagagataaagtggtcttaaagaaaaaaaaaatctagaatcacctaaggtgtttaatattattaaatattttaattcaataattactataaaaattaactaattatcacctgacttattaggtaagtaaatcaatgtatcaaataactttatgtaaatgtcttattatatgtaaatcaatgtataaatagctttatgcaaatatatttatataaatgtaaatatattttgagtatattagaaagtgtttattgttattacttgttttttttttttggaaagatattgtcattattgttacttgagagtgttaattcataattttatttatattaatacctctatttatttataattatttttatataaaacttttacagtatatgtggtacaattaatttttagggtttttttttttttttttttttttttttttttttttttctctagtaatatgtataatcatttctaaccatattgatataatctcatggtacacacttcatcaaaattaaaacataattaagtctctcttttcttcttacttaatttctaccacatttaatatttccagctaacaaaactatgcctaaccaatgtcaaaacagagaaaaaaaaattagggaaattacccattgtacggccttttgcaactctttttccatttttacgttctctttttaaaattttccattttataaatttacataaatatttctttattgaatttttaataaattcattttttacattttatttatacttagacaatagttatacctagctagaagttaacacaacatattcaaactttaactaaattaaataaattttataataatcaatttaaacaataaaattgctagtatagttagtaaatgtccttagttaccaatatgtagtctaatcaaatttaatttatttgcaccaaaatgttttgtatttggatcttttactgaatgtgaacatttagtttttaactaattagggttcgtttagtacactgtgtgttgtgttgtgttgtattattttatatgattgtattgagttgtattatataatattatgtttggtaatgacttgcattaataggttgtgtaacattatattatctaccataaatttgacaccaatcacgggccggaccccaaccccagactttgtagcccaaactccgaccctgacccggaccccaacccagacctcagactttggcataagtacccaaagttttataaatattagatttatgccgcttacaaacttaaaactttgagtacttatgttgggttttatgccctaaataaaactccatttcaatgtaatctattttat

SEQ ID NO: 317230 - DNA, 1270 bp, Cannabis indica
gggtataaattttgatataggttgtattattagggtcaaaaattgaaatttccctttgaatattacttgctaaattaaaatataatatatgttacatttgttattagaacaagaaatagaaggagaaaaagaagaaaattaatgtaaattgttaattgttataactcaaaacagtaaaaatacatgtaaatagatctagaacaaaataaattagaaccataaaaggaaatagaagtagtaaaagatgaaacgataatttttaatgtagagtagaagaattaataggtttagaatatttctttgaaaagtgataaggtgattttcagatgacagagagtatattgaacattatatattgaaatccttttttttatagtgttcaagagtatgagcgagtcaagagagaaagaagaagatcagtactttaattaagcaccaactaattctaattaagagagaacatttgtgctattaatttcgacattaatagcaaaagttgcttgataattgagaaggtgaatcaagcacacataataacacgttcaaatacatattactcttgtgaagtaagcaaatttgcttggttataacttataagcttgttaaaatattatatgtggactaatataattaagtgttccttggtttatgtcaatgataactatataattggtaatatatagcagtactattaagttataatgtgatagacatgatgtactaacatatttggggcttagaacaccctctaaaatgtatttggtgggccaaaataactaattctctcacagggttgggctctttattggtatttgtaaagtaaaatgtatatggatatgttgtacagagaaaaataagtgttcattacacttaaggacagacacactaatagtaaaaaaattagtattaaaagaattaaatattcattatttaattaaataattatacaccaaaatagtaaaaaaattacaaaataccataattttttatgtaaattaaatataaatatttttataacaattaagcttccatagatcaaaaatcatgagtcccttattactcattacacttaaactttttttcttcatacggtagatcaaaagagtgtaatatgttagtttctttatcactcataagatatgcaataacaatattcaatttgtagataaacatattacatataattataagtgtataactatagatctaaagaatacatttgctgatcaaagagaagaactcaaatggcggaagcgtaccttaattcata

SEQ ID NO: 317231 - DNA, 654 bp, Cannabis indica
atgtgatcaatgcaagatcaattacctcgcaaacaacacaatacaaagattttgatcaagaacagaacaaaagcaatcgaaattgaacaaaacaactatgaactaaaaacaataaaaccagtaatgagaattaaagtttaacaggaatatgcaatcaattaacatcaatagaagtagagaaagagatcaaacacaatgagtttacgaggttcgaacaagtgattgttaatcacttgcctactcctcggccagaacagcccctgtggcttttatctttattgatgctagttgagaaaatttacaagctgttttacaaggtgttcatgaacacatacactcataaagcaaagcttcaattacaactcatctcaccagaactctctctatgttacaacctaaactagctctcaaaaatctctctcttaaccattgtccaaaatgatgtaacagatggctatttatagcattggccttatgtcttgatcctaactgtcataactgacagttaggtaatacagttggaattagttgccaacatcttagccaatttgagcagtcctctattagtggccaaacacaacacctagggtaccgaaaaattcttttggaaataaacaaaataatgaaataggcaacgaataatgtttttaatgt

SEQ ID NO: 317232 - DNA, 685 bp, Cannabis indica
tagcattcggctcgaaagtaatgttacctgtagaggttaacattgcgacccacaagcgtgaattctacaatccagagcaaaaccaaaaacttctaaatatgtccttggatctgcttgagaaaaaatacaatgagtcacaaataaccaatgcagcttaccaacaccgaataacgaggtactttactaaaagagtctgaaagatgctatttaaagtagaagattcggtatttagacatgtatttgcaaatacgcgagatctagcggcaggagtgttcaacccaaactgggaaggcccgtatatcattgaagttgtggtaggaaccagggtttatagattatcttagcttactggctcgctaataaataatcactggaaatagcgagcatttacagccttattaccagtaattttattatgtaaaaatgttatattaatctttgtaatgattgatcattgttctgaataaaagttgaatttttttcaagtaattataaagtttattttcttaaaaattacttggggacatatatgtgtataataactagagtccacctaaaaatatatactacaatgctcaaaaacctaaaaacttaaaaaaaaaaaataacacaaaagaaaggaattgaaaaacctttactttaagagaaaattaaattaagctattgtaagtgagattctttctca

SEQ ID NO: 317233 - DNA, 955 bp, Cannabis indica
tctccatgaatgcctaaatgagaagaaattagtttacactgtactatttttctcttgaccaagtttttaagcaaggtttttattgaggcaattattatgaacatccaagggggagtattatgaaatattatttatggatgtccaaatcaccaaattagttatcaccattattgattggttgtattttcctttattatatattaatttagtttctcattcctttaatcaatactttttgtataaataagagtttatccgagtagaataaagaactgagaaattctcattcactttctctttctcccttcatcttcttctcatttaatttacattattttataacacttttatatatatatatatataaattattaattagaaattaaagcagtggtttacagattacaatagggctattaaactacaaattaaagtagaggttttcaatagggtatgcatgcgttgtaaggtctgaaacgtatataagtatgtcaatatttatatatgcaacattggggcataaaaaggacacttcgcaatcgcatgcactactatatagtcaattgaaggccaacctaacatatgctggtatgttcttatctttccaaatattttttctattccacgaattaaaaagtcatatagctaagctagctacattataaaatatttaatttaaacaaatatattaattaaaatttagtcgaaaaccgttctgaaataattaattttatatgatttaattggttgataaatgagtacgtgtatcccgccctttcaatatatatttctatacatatatctagggcattttacaaaaatactgaatttgggataatacttttcaattttactgccacacggcagaatttacatttatactgtcctcctttttttttcttttatactgtcaataccaaaacaaaagtatgaggcctccatctttgacaatcac

SEQ ID NO: 317234 - DNA, 1481 bp, Cannabis indica
ccaacagcaagggacaatggtcggacgttgagtgctccaaattgattagcgaggcagcaggaaagagttgaaaccaggcatctgaagcaagggctcgatcaagtcgagcttcgatccaggagcttgtcccccggcttttctcccatgtaaagcgatagcctgtgagttccatatcagtgagccacactcattaaggcaattttgaaagccttcgatcaaccaccttggatacgggtgtcctccttgcttatcctcctaagtcaaaacgttattgagatcacctatgacacaccaagggagggaagaatcgttggtgatcgtgcgaagaagatcccaggtcttgtgtctgttggtcctattcgggtccccataaaccccagtgagtctccatgtttcattaccctctcctttcacacacatatcaatatggtttgtagaaaagcccaataaagttccctcttctttctctttccataaaaaggctaacccaccactaaaaccttgggcctccaccacaaaaatcccttcaaagtccaattgtcttccaatccattccattctcaacttattacatttagtttcacaaagaaaaacaaatttgggtttcttatgagagatagtctctttaaggaattgaaaagcccgttggttcccaagcccacggcaattccagctcaaaacattcataatgcccggcgggcctgagaaccagaacccgccccaaagaagtttttttgattaaccccatcattaaagcccatgtttacatcttcatactcaaccccactaacgtcattgaccattttatcatatggcccaaccaactcatcaacctcctccccattataatcactgtccattattgtttttcttattttcaaatcaaccacctggatactaggcacggcatcattatcctttgatcctgtaatcaattcaatggcttttgacttgccatatatgtctccattgctttcagcggcttgattagtgggattctttccataatctatattcatattcggattgtttgctggcgaattccccatccccggatttttctctgtatcattattgtgttgtcccctctcacctccatgagagcttgacgcaccagcctttgccacgacggccgatcggagccattgagcccccatagtgtagtgtcgtctcctcggggctgcctttaactccaagccatacggcttgtcaatcaaatgaagaggagtctcaaataacctatcacagaaacgttccgaatggccaagtacaccacagatgaagcaaaatgtagggagatcctcatatttgaataggatcttgcaagaaacaccactcttcttttccagtttcatcttttgttcgagaggtttgtccacccgaattgtgactctaactctgaggtagtccctccacacacccgcaaaattgttagggtcggacttaacaaatttgcctatataattgccaacatcccgaac

SEQ ID NO: 317235 - DNA, 1261 bp, Cannabis indica
ttctgctctattttagttttactctatgtttggtaggggagaaaagggagtggaaagaaaagcttagaaggaaaactggagagaaaaaaaaatgcttgtttagttgaaaaaaagtgagaagaagagaaaaaagataaaaaattgggagaataacataaaatacagtttttttcctaaaagaattatatttttaagttttaagatttatttttttatatattttttacgatttttgaaacaataaaaaaacaacaagttaaaaactatataaaagtaacagaaaaaataatatttaaataatatcaaaataacaaaaaaaatatcatacagataataaaaaatcaacaacaaattaacaaaaatacactataaaaagatcgtattttctataaataaaatcaaaaaaatcgtaaaaatatttaaaatttcgtgaaaccgtatttttataatttttttttgttgttttttttgttatttgtgaagtaatcttcaaaaaaaattaaggtgggacccaccaaaatttttattctcatttagagagaaaacgtttacaaaacaacattaatataaaattactagtttgtttattatttaaaaaaacaattttattaataaatttaacgataatatagtaattttataacaaattaattttctttcttttcttttcttctaattactctattttttttccttggtaccaaacatagtgttaaagttgagtttgttgtttgtgttgttaagtttttaagtagaaatatgctatcctttatgaacaatttagctattgcatgattcggttcaacgatagtacgtttaaaatgaatcctacttgttaaattaacttatcacatataagtatgtttcaaatttatgattatatatacacatcactgctctttaatggtgtaatgtttgcttactgttatttattagagttgcactttttcatattttactcctttacatactatttttttgccaagtttttggaagggacatttgtcaaactgtccacattgcacaatcgtttatattgcacaactacctgcactacaacagatcgtataaaaaatatgcagttaaaaatcttttgtggcgttgattgtagtttgtattttagtcaaatcgttatgtgcagtatagttagcaaatctgaatttattaattgtacttcaaattgtatcacattatatattataaaaaatactataattttatttttttaatatataaataactcatgtatttacaaagtaca

SEQ ID NO: 317236 - DNA, 1908 bp, Cannabis indica
ctccacatgaaattcttcaccttgggtggtattttaagatgccatagcttatgccagaaccctgaattatttgcaccgtgacgaccatgtttttgattctgcaacatatcataagcacttttaacagagaactcaccagatctttcgccagtccaagaccagcagtcttcgacaaatgaagagcttaaggggatgccaatgatcaactctgcatcgcgttgtttgaacatatccttgacaagagagatatcccaggcattacaatgcgtttcaaagagagaattgatcatttggttagcaaggccatgcttagaagaagtgacatacgggttatcagggtcaggatgccatggatgcttcaatatggtggttgtccttcctgaaccgatagttcttctaataccaagtttgacaagattttgggcactccagatgcttctccgtacaaagctaggattgttgcctaactccgcattgagaaagtcagtgttggagtaatacttagccttgtacaaacggcttgcaagagaggttggagcgcataacaaccgtcatccttgtttagccaatatcgcaagattgaagtcatgaagatgacgaaatcccataccacctgaatctttgtgtgtagccatgcaatctcaagacatccaaataataccattcccttttggcactcgatgttttccaccagaaattagccataatcttctctatttcttgacaagtttcgagaggaataagaaaaacactcatcacataagttggtagggactggagaacaatttttaggagaatttctttaccagcacgggaaagaaatctgccactccagctgtgatccggttgataactttgtttatgagaaagccaagaatgacagtttttttcctaacaattatgttaggcaggcctagataaagagagccatcagtagcttcaggcatgcccagagttgtacaaatttgatgtcgttgggttacttcggtattggggctgaaaaatatggaagactttgtagcattcaccttttgcccagaggcaatttcaaaagagtgaaggagttgtttcacactgacagccgcgacggtagatgcttggcaaaaaagataactatcatcagcaaaaagcatatgtgtaatagagggagctccattagccacacgacagccacatataatttggtcatcttcaaactttctgatcagagaagagaagccttcagcacaaatgataaacatataagttgatagtgggtcaccttgacgaattcctcgtgatggggtaaccggccccataatatgactattatgtatattggaatagcgtacaaaggtaacacatttcataacaagattaatccatttaccagcaaactccatccggtgcataactgcacgtagataattctactccacacgatcatatgccttgttcatgtcgagcttcatagccatgaacctcttcttccccttagtcttccgtttgaggtagtgcataatttcaaaagcaaccataatattatcagatataagcttaccaggaataaaagcactttgggtaggtgagataacaggatcaatcaagtctctcattctattagcaagaacctttgagagaattttataagcaacattgtagagagcgatgggacgcaaatcacccatagtagagaactgcttcttttttggaattaaaactagatgtgtattattcaggccaggtggtaagctttcggtctcaaagaattcagtgacaagttgcataatattgggaccaacaatgtcccagtatttactttaatcgtcaaaattataaattatactatttagatatacataataataatttcatctaataactaataatattttttttttcaattattaattgtatcacttttaaata

SEQ ID NO: 317237 - DNA, 758 bp, Cannabis indica
ggacaaaggtgtaagacattattcaaatttggtgattcccctcttatacacttgtggtgttgagattgcttttatatttcttatatatatatatatatgctatttatatattatgttttattttgtaacttatttatttgagttgttgttctcatctttatctttatattctctagtttatatgtatattttatttaatattgtaacattattcatggtcggccaaagggtggggcagccggggcctaggccccaggccccaccattttcgagtctcccaaaaattaaaatttttatatttatgtatatataaaaaaataaaaatataatatatattttagtttgataaatttcatgaaagacttatagtacaattggtaaaagtgagtgagtgaattggttttagatgttgggttcaagttccagctatctcaccttttcgactattttaaaaaaatttagaattatatatatatatataaattcattttttataaaagagttttatatttaaatatgtttggttttttttttctaaaaaaaaaaaatgttatgttatatatattttttaaggtagcaaataatatgttttgtacataatttttcagaaattactctaagtgcaattaaaagaataaaaaaaaaattgtaataataaataaaatcaaaatatttttaaaaaataattaacaagaatattatagcttaaacatttaatggcaacattataacaatattataacttaaataaaaagtat

SEQ ID NO: 317238 - DNA, 2849 bp, Cannabis indica
cacaacgaatctggccactacaattggccagggtgacacaaaaatcctgatggatccgaataatcagcccttacctccaagggaggaccctcctctggcgcctcccactaaaggaaggacctttgggaaacagcccccaagaccaacaaccggacctcgtcttcgtactatgctagagatacaggacaaggaattgccaagccctatgtagacttaggagaagattttgaattaaccagacttagagaggccgtctatcaagccgaccaaactgaagaaccacgtgctctgattgcgatgtattcgctcagtagagacgtaaattcatgagatggatggatggccaagagtacatcctccgatctcaccaggcaaagctagatcaccacaataaagaagtcagcgacctcataaggcggttcaatcaaagaactattggaagaggccaggatctcatcagagatccactccaatgaagactagtcggcagattggcgagcgtctatcaataagttgtccaaccgggttcttcaggaaccaggacagattttcccctacttgaaggaggacaagtcttgccacaaaggtctaatggcgagaatagcctatccagtcaaccagcagtctgaggggtcgaccagagatttcaggctcaacaacagcccccatcggccaacctttggccaaccagccacctataggtgcacctctggccggccgggggaatgatctccctcctcgaggcatctaggagcgagaaactcaaaggacaatcttcaatctgttaggcccagtaacgggtggaaacacccaaaataataactcgagaagtgagactgatcactttaggtatctaaatccacctaacttcatcaattggtgcgatctacctcctgtcaacacaccagctacattagccaaccggggcatcacgggcggccaggccctgcccagcacatgtctggccgaccatggatagctgccatgcataggcttggccagccaggatcaacatccctaccgaggagtggccggccaaggccagcaacacaacacaggattgaccgacctccaccatacactctcccagagtatggttgtccagaccctagcgtattcaagcctgtagcccatccaaggatggccagttagtcaagtctctacagtaatgaatccttctgtggaagcacagttggatcaaataagggacatgatcaagggcctagctggtccaaaaccttcagaccttgagctagaccggtcaagaggaaaaccattctcagcatacataaatgccttgccctttctcaagttcaagatgctggtatggaagatgtataccgagcaagaggacccgcttgcacacatcaagtacttcgagatgcagttggatctccagaagattactggtgatgtgcgatgttgcatattcccagcaacttcgtcagatacaactcaacaatggtacttcaagctttccctaggaagattcaattcttggaatgagttttcacgagaattctactttcagttctcatcctcaaggcttataccatcgcaactagaagaccttgttgaagtcaaacaacgagaaggagaacctttgaaggattacattcagaggttcatggctgaggccaccaaggtcaaaggccttacagaagaaggatgatatacgaccatactgggggcattgtccattgagtgacttctggaaagatatccagaggatctcaactaaccacatgaaggagtttctcgacagagctaataactttatcaaactagaagaagctgtccgacaagcccaatcagggtaagtcgacaataggcagtcacagggcattttacagtccattgagtttccaagcgcacattcaggtaccagtaactctgcccaaacctctagtaccaaggacactaggagcaagcacaataacaactctggaagaaatagtagcaaaaaagggaagtttaacacttttcccacgccacaaaaccgaaaggacaaggaggagaagtatacatgcttcaccctcctgacagagaaacctgaggccatcttcatggccactctaagaacagtcccatacagaaagcctcttcccatcaaaagggagttgagcaagagggacatgtcaaagttctgttggcttcacaacgacttcggccatgacaccaacgagtgttaaaatttgaagaggaagcttaaattcctcaaaagaaagaacaatccccatctgcgttgttatgtgcagaatgactagactcaagcacatggtgcccaaaatagagatccaatgccaccaccagtggtgggtcacttaggtgtcatcaatggtggactccatattgcaggcaagaccagcaaatctagggagcactatgctcggatgctccttcattagcccaaaagcgacatcctggctatcgaagaaaagggctcttagcaaccaaagcttggagagcccatgatctctttcacaaaagaagatgctgcccaagtcagttttccggacaatgaccccttggtcatcactgcactaatagagaatatgactgtggcaagatgcatggtgtacaatggagcctcctacaatattctttttagatcaacatacgaaaagatgaggctctaacttactgatttggcacacaacagtcaagtaatgtatgacttctttggcgagggaattgcacccatgggggtatatcagattacccctcgtcacaataggagaaaaaatccgaaccactagaactcttatggcccagctcatcgtaatcaacgttccctcgacttttaacaccatgataggttgatcagccctatacgacctgaaggagat

SEQ ID NO: 317239 - DNA, 2772 bp, Cannabis indica
aatccaatcttctccagtctagtccaatcatttacagtccaatcttgcgtaccaaacggacctaagaattattatttaatttaaaaatattattaaaaataaatttatgaataatctaatacattattaatactaactatttttatacacttaaatttatcaatattaaattaaatatctatgactctaaaaatatacccactataaggacaacactaatgtgcttaccataaacatgtcctatatataatcattttttaaaattatcataaatatattgtcattgtattatatacataaaatggactacaaaatgcatgtcatattattattattattattattatataagcaaatgtatgtgtgatgattgtatttggtcttataaaatgagtatatgtgtataaagtcaattgctaagagcatctccaataggactacatgttggttattagagtggttttttaatattttaaatgtgataggtgggactatagtaggcaatttttggagttgtaaactattgaagtacttttagtagaaaatagtatcaaatcttatgtagatgagagaaaaaaaaaatagatgatgtgttatttttgactagggctgtacataaacttttgtaaaccgccaaacccaaataacttgtctaaaccaaaccgagataactcgacgaaaaatgtaaatgaaaaaacccgacaaaaatataacccgcttaatctttatattggacgacttgaaaataatactaacccgtccaatcaacccgaactaacccgaccaacctgattaagatgtttttttttttatatatatattttcattatatatatttgtatattatatattttatatgactatttaaacaatataaaattcaacctagcattgttttttttttttttttttttatggtggttaatttgaaatttgaatttaatctatatatatttatttcattattataattaactaaaatatagcaattgaatgtaaaaataaaattttttaaaaaaattggacaggttaacccgaccaaaccgactaattttattgggctagttactattttttttttcttaattgaacggattgcacttaattttttgtaatccaatcattatatttgattgaataaaatgtagcataaaccgaccgacgtacactcctacttttgacaattataaatattgtctttcattggagatgctaaaaggtattattagtatctagcaccctcatcagtgtcatactgttattggtgcaattaaatatttagtatcatataatttcaaataatttttaaaaaatatcactaactaaatcgtaaaataccacaaataaaagtaggcactactctacccaatagcaattgcttaggagtaaagaggagagtgtgtggagcgcgtgaagtagctgggggtgcagccaggcagccaaagcgaaattgagtagcttgtgtaagcaaaaaataaattaaaaaagtagcttgtttaagcaaaaaaataaaataaaaaattgagtagcttagtgcattgcacctggactctattatggatcgtcatattattcattgaaatttggttaggacaatctaattaattaattaattaactattctatcagaaaaaaaaaaatcattaactatatttcattttatatatttattccttgaagattgcacaccaaataaataaataaatataaagtgcaaaagaaaaacttcccctcttcttattttatttgatgacttctagtcacagttctatatatttttttatattagcagctaaattatttaaaatacacatttagttacacttaatccaacaaacccattttttaatattaaaactctccaaatttcatttttgttagctatttacttttattgctcaaaaaattatgttaaatgtcacagtatacatgccacaatgtacacaagtatacacataataaattttcattagtctacctcattataaatatttaaaaagtgaagaaaattaaaaactaaatatttcttacacaaaatagagatctaaaacagaaagaatataataaatatatagaaaattcatcatataattttaaaacaactatcattaccgtatctcatttatagtcaccattgtatttaaaattgatgtcatcaccgtatctaatttgtaatcatcactaatattctttctaataagtttgctttgtacataaaataaattaaacaatgatccctaagtacttacttttattatgtgagggaagagaggatgataaatataataagtttagaattttgatatttttggcctattagttaataatttcttttgataaattatattagtgaatattaattatatctctctctataaaaaattatatgtaggttaatttttttgatacatatatatttatttattagttattatatacaaatatatagttttttttttaatttttaattgattaatgatctctaattaaataaaacagaataaaaaaattagaaaaatgagagaattaaggagagaatttaaagtagaacaaaaaaattagaaaaattagagaattcaggaaagaatagatatttagaaattttattttttaattattaattaattatcttaaatttaaaaattataaatagatagtttgactttgctttttaattattaattataaaatagatagtttatttttttcttaaattatttatttaagggtttttaatttttatactttcaaaaattaagttttttttttttt

SEQ ID NO: 317240 - DNA, 673 bp, Cannabis indica
ggtttgtttttgatgaatagctctacagatctcttcattttcatttcgatgttcaaaaggtattatattctttcttcttctctttttcttttctccgaatatttttaaatcgaaattttaataaaaaaaaaaatgcttttgagtttgttcgatctatgctttgcctgaacctttcttttttgtttttctttactattttctctaataatctctacatacatattaacagatttaacagtcaatgaatgaatcagctgagtctacctagattatcctttttatatgtgtattgattgagggatgggtgtgtgttttcttctgtaaaaggaaagaattttgtgaactaagccaaacacaaaccccttgattgaaatgacaattgatctacaccaaacatcaatggcgcaaagtgtaagaaccagtactaggtcctcctttagctctaacaatgccaacgaggatactccccctgctcattctcattcaaatggagatgaatacgatagtgatggttccaatttggcacctccgtaagtctttcttcttcttcgtagtcttctttttcattcattgacttttgttacaaatttcaaatattgtttgtggacacttgcagtacgcctacttctctatcaatggccattccgccagaactcgctggtgccataccctt

SEQ ID NO: 317241 - DNA, 1428 bp, Cannabis indica
gtttacatattaatagagaaagatagagacaacttgaggaagaagagagtgaaaaaaagagagttatttattatttgttcaataggagtatatatataaacacataaatagtttcttggtttgggagatcaagtgggcttgccccaatttttttttttttaaaaagaaaaacaataattattttaaggaaagaaaataaaaaaaaaaaactcacttttacgatagcatagtaacaacatcacttcaaatattcaagcttttgtttatataccgtagcccgaaagtaaaaaaaaaatagtacacaatataagaagaaatagtaaaaaaagtaattttttcctaacaagagtaaaattaaaagaaaataggaaaaaacagtatagagtgtaaatttctattaaataatcaaagtgagatttagaggtttttttttttctttttttttggataattacataaaatactatttttgtaaaattactaaaattttacgtataaaagtttttttttttttttaataattttacgatttttttttatgataacaacacgaaaatgataaaaaaattacacaaaagtaataggaaaataacatcaaaacaataacaaaaaataacatacaaataacaaattaacaagagtacaacataaaagactgtattttttgtaaataaaatcatacaaattataaaaatgtttaaaattccatacaactatatatgtcgctaaaaaaaatcattagatttatgtctcttacaaactcaaaactttaggtaattataccgcaatttacttttaaatttacaaataacctaatgattacgacataagtactcaaaacaattaaattggtatactttttacggtaaattgcagcataagtacccaaaattttaaatttgtaagcggcataaatctaataattttttcagtagcataagtacttaatatttgtaaaactctattttttttttcaattttatcaatatatatataaattctattttgaatttattaaaagaaaatttgcaagtaactgacactatatatttttatccaaatctaatgatatagaacatgagtcttattatacgtgttctattgataatataaaagtatatactaacgaaattgatgaaaaattacagtttgataccatatttttataaattcaaaactttaagtatttaaagatgctaaattttatgagacactacttttatatttggaataattacataagacatcattttttgtaaaatatttacatttttacgttcaaagaatgaacaaaatttcaacataaaagaccatattttatgtaaataaaattaaaaaaatcgtaaaaatgtttaaaatttcgtagaaatcgtatttttattatttttttttttgttatttttgcgcatttgtgaaattatcccttta

SEQ ID NO: 317242 - DNA, 1519 bp, Cannabis indica
gcagccagagtgacgtactcgtgtataagagccatttattctgtgggtgtaagggcctaatggaggcttgaagcggggacgttacaagctgagtgtgatgttttagtggagaagatgattcaaaaaataaagatttgggggacaaggaatatttcttttgcaggaaaggcatccttgattaattcagtcttaataacgctgcatacatactgggcacagattatggtacttccgaagatggtgttgaaaaaagttaattcaatttgtcgcacctttatatggaaaggtagtgtagaattgaattgtcctggatatgtagcatgggaccaacttttcaaaaagaagtcggaaggaggacttggctttagaaatacaatcctttggaatatagcagccataggaaagtatgtattgggtatagcttcgaagaaatataatctttgggtacggtggataaatagtgtttacttgaagaacgaaaactagtgggactataacttctcaacgtcaagtagctagtattggaagcagatagtcaagatcaaagaaaaatacaaaaatgtttctgacttccaactgctcatgggtagaaattatagtatccatctatgttacaaaacactatcggaggagccatttaaaatggcttggtgtagagagatttggagcagatacaatattccaaagcatagcttcattgcttggcttgcagtacagaatcgactccaaacaaagaacaggtgaataaagtttaaaatttgtaatgaggatggctgcttgttatgcaatggtgcatcagaaacaatggagcatctattctttgtatgtgattttagcaggagatgtcttggtctgattaaaagttggctggaatggagaacaggtgaacaatccttgttgaagttgctacgttggatctcaagagcaaagatgtcaagcttttcgaaaaaaaaaaaagtatattcaacggctattacaagcctagtctatcaggtttggatcaatcgaaatgagtgcctataaaatcaaaaaatacaaactattgatatatgtgtaaaagcaattcaatttagtgttaagaatagaattgtatatattagataatggaagatatcaaaagtgaatagagaatagtttgaattgttgtaaagggggttagaaaagagttttacagtctttattgtttggagctgtctaggatgtaattcattgttctgtggaatacaaattatcacctgattcacaaaaaaaaaataacttaaaatatttttggtagattatttgaatagttagtttgtatattattttttagctaaaacttaattttattttgtaatgcatgggatttaattaatgcttacttaaggttttataattctcattcagtttatttttacaaaatgtgtatatttatttttttattttaaaataaatataatttttgacatgataagagtatacaaggtttttttttcaagaaaaagagtatacgaggtttcattttcatttttttaaaaaa

SEQ ID NO: 317243 - DNA, 955 bp, Cannabis indica
tattacaactatatttttgacacgcgaaaacccaagacctccaagacacacacacccacctatgaccacttgagctagcctcaagtggttaggtacctctactacttactctattatagtaattgttttcaatcactttaggtattttgatatttttctgtacatggataagttacacaagaccacttataaattttcaaaaaattcataaaaatttaggataccgaaattataattcaaaatcctatttgttacacgctcgtgaaaatatcaaaacaaaactattctaatcctaatttcattatattctcatttatctaaaattttatgaaaattctttaataatatcgtgtaactgtattatacaccgtcgtgtaaataaataatattaatcataatttatttaaaagtacctataaataatcacttttactacaaatggtaccccatggcccatcccattagttcaataatcatagtaaaatttttgtatattaacaatgacaagttttgtccttacaaaagaaaaaaagaaagtttgtgtgtcctttgtaggactctttttgtggactgattattgttaattaattacccacgaggggaggttattgattaccccaccataactacaatgtttaattaattaatataaagtaatttatttttccttttttttttaagggggtaaaaaagccaacttttttagaagagggtttatttgttttcatgcttttttgtaattgttgttgttgttagtgatgtaccttttagatgttaagtacatactaaactattgtttaattatccaaaaaaaaaaaaaaacttaaacaaacaataagtaaatagtgttgttgtagtgttgttttaagtagttttgtattgttgttagtaacaatatcagctatgtttgtttttttttgtaataaaatttaaaacaggtttaaaacaacaacag

SEQ ID NO: 317244 - DNA, 1425 bp, Cannabis indica
atgtttggatacttgagtactcgacggacacgctgtaagtatgaccttcttagggattaaagtcaaggaagcaaactagcatcatcaaaatcgatagaagaagacattctaatgcaaaggctatttgcaataaaacatgtggcgcgtccgtacgagtggtgtttcacatgcttgtgatgtcatatcttaaaccatcagagagagacttaaagagtcgagaataaatgcaagtcccaaactcaaaaattatgacctggaacttaagagtaaatgttatacatattttttttaccaaaatacatggcttatgaataagaagccacgtggtcaaaggacctgcaaatgcatgagaataacaattattgccacttagtgtgaatcggatgcactatgagtaaaatagtgcggattgaattgaattggatgaatacccctaattgtgatcacactaaaaaattataagcagttcgaattaatcaactcattgacatcaaatttatttgatgtaaattgattaaagtttggaatcatatattacaaattgtatgaataacactaaaataaactttatctttgtgtttcattggattgggaagaaaaataatttggtgtacactttccaaggtattaatttatttgtataccaataatgcttcctaacaagtaagcgcatctggtgtagtggtatcatagtaccctcccacggtactgaccagggttcgattccctggatgcgcattgtcttttaaaataattgttttattattagatatgacgccgattgggtccccccttatggaagaactgtcattttttctttgagagaagaagaaagattaacataaaatatactaaaagattatcatataaaattccaaataaatgctatattttttcctttttaaatgacatataaataatatgaaaatataaatatctgtaccttttttttgataagataaatatctgtaccttttcaattcattttcaacgatagggattcaatgattcgatcagatttggtaatgctagtaaaagaaatgaattttcaacattttttttataagaaaattttcaacaattaaattacgaaaaaacaactgtaacaacaatattgcccaacgaaattgtgaagaaaaaaatttgtttttgggctggttatcggctttttttttttagattaaatttttagattttttttattatttttttattttggagcagagttttttaaaaaaaatacagtgaaaaaaatacagtgtattttttataggagaattatctcatatactattttttttaattttttttttcaaatttgcggtttggtttttataggagaattaccccatatactattttttttaatttttttttttttctaaatttacggtttgagtttctaaagtggttgtagcgctagtt

SEQ ID NO: 317245 - DNA, 1373 bp, Cannabis indica
aatgctctggaaagaacataccatttctccaaatgcaagtaaactctgttgtagattgtcatatcagtaaaacctagtgttctgataaatctagaaatctttattcacatagtcttgattactttccactgtgatgacgacacaataaacaagaatataaatgtgaaaaaggtttggatgaatttataaatcaaattaacaagtaattgataatgtgaaccaaaaattacacaaatgaatgaaaaatacttctgtttctttattgatattgaaaaatacagattacattgattttgagttttatttagggcataaaacccaacaataagcaccaaattagtattgttaagctcatcaggaagagaagcaaaattgaaaaactgtctaataaggctcaccacatctgaacccacaatatcccaacatttttggaaaaaaccaggggtcgtgccatcaggacctagaaatttatcaggatgcatctggaaaagtgtcactctaacttcctcggtagagacaggtgccaacagatcatagttcattttatgagagatggagggggtaacatcatcaataatatcattcctatgaaatcttgaggttgtaaataaatctaaatagaagctaaccataaggtccgccaagcctgaatcccaaccgagccaaacaccatgttcgtcttgtaacttgtggatcgtactacaatgtttatgagcactagcagaggcatgaaagtatttactatttttgtccccttgcttaagcaaaagtttcttcgaacgttgtttccaaaacacttcgcttttagttaatacttcaaataattctttctcggcagtacgataagccaagatagagacactatcacccttcccttttagacgcctaatagtatttttacaatcaacaatttagtgtttaaaatttcctgtaacatcttttccccaaaccgccagcatttcaccacacttagagagttttgattgaattgaaactgtactatgctcattccaacagtcatggaaaatttggaaacaaagtggctccctcaaccaaaaattttcaaactgaaattttttgacaccattgaaaacattttatacaatggggtccaagaagattggacagtgattggatgatgaagcatgaagattaaaaagtttggctgactattaattgtttaaccatgaaagggaagctaaagctctatcaagtctcacctcagtctaattagaggtgcctctacctctttctcaagtgtagggataacctgttagaaatattttaccaggatctagatttactatcatgtatgtttcattaacatcctaatataaattctaaaacaattaaataaacacataagggtttaa

SEQ ID NO: 317246 - DNA, 1471 bp, Cannabis indica
aaaaatacacataaaactataaaaatttacacacatatataacttagaaaactgaacacaattttatacacaaataaactaaaattattatatatagacaaataaaaaataaattaaataaaactaaaatagagaaaaaatagggtactggagcggaggtgcggtggcacgtcctcgtcggagtcccggtagaaatagtttttcggaataaaaaaaaagaagaaaaagagaaaaaaaaagatttggtagtgaaaatggggtttttggatggtgaaaatggtgtttggaggggaaattaaagagggggctaccgccggtggttcaaccaaaacgcagagagagagagaaagagaagaggaaaatggggaagaagggttcgtggatgcttttatttactttcgacttttgccggcgcaattaggtgcaccggcaaaagtctatcctgaataaaaacgcacgaaacactacatttcatttaagctgggacttttgtcggcgcatgcaaaagtttcccacaaaattttcacacacgttttcctttgggtgggaagttgactgccaaaaatttcaggacttttgccggcgcataaaggcgccagcaaaagcaaaaccctgatgcaacgtgtccactggtcaaacggttcccacttttgtcggcgcaattaattgcgccggcaaaatgccccacctatttttgcgcgcacatttttccactgcgagagaaattgaccaccttttttttagacttttgtcggtgctaattaaaataaataaatagttttgtcggcgcaagtaagctcgccggcgaaagtttgctcgaatagccaacaattcccaccttttggaggtttagtgccaacttttgccggcaaaattcgtgtactttgctggcaatattggctattgccggcgatattaggcgcccgtaaaaggttgaggtgggcaaaaattactgacttcctttgccggcgcatttgttgacttgcgccgacaaatgtcaactaatgccggcgcaattaaccaatagtgctggaaaaagttggcattcttgtagtgtattttgtccaaacaattgagttttcatcgttaccgagcaaaaataataaaaatattaattttcacatatagcatacacttagagtttaataaaatttgcagaattaagaaattataaccctatttcctatttcataagaaaggacccatagtaatatagtcacatataatcctatagtataaataattaatgttaattgtctctctaatccatattctaaggatgcagtcatcatagagggagaaggaggaggtgatagtggttgctctccgtttgaacgagagagcgaggagggtgaaagaggaggtggcagtgattgcgccactactacaatgtaagcctttagcttccctttttcaacccaatttataaaaagggaagctaaagggggtgaaaatatctgcattgacattt

SEQ ID NO: 317247 - DNA, 634 bp, Cannabis indica
atatgtataagcaactcatgtatatataatagcttgatatataatagtatgagtaaatattattttcaataatagttattgattagaatttttgtcttgtcaaataataataattagatttatttttttgaaaattataaaaaaaaaataagcattgagcttatataatcaaatttaaaagtgttctgactaaattaattatattttttttatttattcatggtagatactggtttcaaattgattatgttaaatgaaaaaattgataaaaattgagttcaagatctattaattttgtattattttgaaaaacgtctataaattgttatttatcaaaatagatagtttaattagtaatttttacaaaaaaagaatcaaaaatagcatttaccctaatagtaatatgacgaaaaagcaagggaaagtattttaaattactaaataaaattatataaaagccctcactaaaaaattaattgataaataaaccctcacaatagaggaagtaaggaagaaatatgaataaaaggaactatctcttttttcctttgttgtctagacttattcccattattctaaatctctctctttcttttttttcttaggttgatagagttgatctgtggccattcgt

SEQ ID NO: 317248 - DNA, 1177 bp, Cannabis indica
tacatcccttttaagggggtggcattatagaatcaccctaaataataataactcttcataatttgtgaatccatggaatcacttttgagaaggatcttgctagctctgaacaatgagatctttccatggatctcaactatatgatcaaagagcaacaaagaaaaaaaaaattacaattactataaatatcggtaagaagttttgcttcaaaaatcaaccataattgcaactagtgcagggagatctttagcaaaccaacatactgcttccataaacgtcgacgaaagaatcactacaaaggcaaattttgagtagggccgacctagagttgaaatgcccttaagaaaaaaatactcttattataacaataaatgggatttttttaatagatattttttaatttggcctttaaaatgagtaggccctaagtgctacccgccttagcctagggtcgaccctaatcttgagcaaaccaacatatgacttccataaactctgacaagagaaaatcaacaatatgaaatatccatgaacacttaattgcccaaacatatatattgttgggtttcatgccctaactaaaatctaaatttaatttaatattatttttaaatcaataaagttcaaaaccatttatgatgtagtttatttacccagaagctgactctggtgacctgaaaatcaatttttgacacgtggcagaaagaaaacatcctggagttgagtactccagagtcatagcagacgacctggaagggtccctattaactctaggaacttcgcaatgggtgtttgtatcccgccaagttatttccaactcatcttctttcactattctgaatcaagaagacaagaagaattcaagtccaaggtctaaaaactgaaaagagacgaaactgcatcccataagtaaactcaggcgctagggttttcacccagcacttaggttggcattcccaattagggtttcagtttttgggtccgtcttagtgcgaatggctaagacctatcacgaacatgttaaaggcaccaaaacacttttgaaacgccctaaataattaggcacgctacccaaaatgtttatgaaaccctaatcccctaatcgtgattactaataaaaatagcgcagaatttaaacttttatattaaacaaactgaaaataaacttgtaatatat

SEQ ID NO: 317249 - DNA, 832 bp, Cannabis indica
aaaaaaaaaataaaaaaagttagtataccatataaattccccacatataatgatccttcccaaaaatacttctaattttgttcctaatattctttcataccattataatattcttttatataaattatagttacttacaatattagaaattcatcaattaaacttgacaaaagaatcatcaattaaaaaaatataaagtcattataatttttgttataataatgaaaaaatattttttgaacaaaattaaactcaaaactaaatatttttattcttatctattttacaaaatatatagtctaaattgttatttaataaataaatgtaattaaaaaaaaaaacatacaaaccaaattattgtcccaactttttatattaataatattagctacaattaattggatgtattacttaattacaaaattatgatttttttaatggaaatgacaattttataattaatctcttctactatatatgtaagattaaggcaacaaattagttgaaacagattctaaactgttgtgatgatcataatacaaaatagagattgcagtaaaattatgagctattatattaaatgaccatttaataaataaagcatacatattctagcaatatagtctgataattacaaacaagatgtcctggattcaatttatcgtcacacctaatgtataaatataaaaaataaaaaaactgatttctagttttaattaataagaaacatgtattctcgtatatatataaactagatagatgttacgtgtcaagtcacgtatgttaattttattttagtttttaattttttttaatattataattttaaaat

SEQ ID NO: 317250 - DNA, 1639 bp, Cannabis indica
tatatacatatatgagattaatacatactgtgtgtatagtagcactcgctaatactatattataattacttaagaaaatgttaagaacactcccaacatattcttttaaaaataatttatttactctatttaataataaaagcggtatagcaaaggtgttgtcatttgacatggtgagaaagtgatttgtgtgtgtgtgatttattttttttgttttgttgctgtttggagaagatggcttcgtcgagtttggccattcacgatcttgaagaagggtatgcggatatcagtattgaaggtgaagatgatgaggatttgggcgtcgactttcttgtgcctgatgatcaagttggtcatgatcatctctgcattgtaagttgtttccttactgctcggccaattaactttgaagccatgagaaatgttatggcgtctctgtggcagccaggaaaaggagtttacgtcaaagaaattgactctaatcggtatttatttcagttttatcacgagattgatttggaaagggtcgttgagggtagcccatggacattcaatcgtcaaaagtttgtttttcggaggctacaaaggggtgaagatcctaagaaggtggtcatcaataatcttgatatgtgggttcagatacatggcctacaaaccggtttcaaatcggcctctgttgtggaacgcttgggagatttttttgggtcgttcatcaaatcggttccgaagaatttttagcatgtttggcgtgaatatatgcgtgtccgtgtcacaattgatattgctgtgccgctaaaacgaaggaagaaactccggcgaagtgtggatgatccaggtttctgggtagaattcaaatatgagtatgtccctactttttgttttatttgtggtgttattggacatttcgaaaagttttggtccaagctttttgaagtgccgattgaaaatattgtaaaaccttatggagtttggatgagagctcaaccccagaggaggaacaattttgttgggtcacaatggttgcgtgatggcaacgagtcggatgtggcgtttgttggccggagtagcagttcgactgcggtagtggggtggccatcttcgactaggctggtttctgtggagtttgttggaggggatcgtgggattgagcgtgcgactaggaaggaatctgaagatcttttttaagctcctaaaaataaggagcaaactgtgggcatagttggtaaggttgactatattttaaataatgataatttatctatggggaatgagttggaagatgggaatgatagcttgattgttttggactcaaaaagacgccatactgtggaagcccaagtgggccgaactcaaattggaagggttcaatgtgggttgaacccaagtggaagggtccaatgtagtggataatggtagtgagatggaggttagtgaagaagttgttgtgcatgactattcgggctcaaaaaaatggcctttcggtgggtgctggttcccaggcccaccagtcattatgagtatcaaaacctggaatcgccgtgagcttgggaacccgtggcccacggtgggtttatcaattccttgtggaccttgtggtccaaaagaaacccaattttcttttctttgtgaaactttttct

SEQ ID NO: 317251 - DNA, 1228 bp, Cannabis indica
tagtaattgcatatgaatttttatttccccctcaattacctctaataatataaatactgtataattatttagttgaacaaatatgtcaaatctcgttattactttgaattatactcaatttcaattacgaggtaaattttcaaacgcattttaaattttgttaacgtagaaagtaataaagttttaaatattgactttaaaacaattccatttttaacattttatttataatataaactttgatatttattcttttctttttcacataatgttgggcaattttaaatcgtttgaacattaaaattattttgtttctttttttttaaaaaaaaattatgttcattttttttgggttaataattgatgtttacttttcttattttaaatgtaagatagccatgggtcaacaacttttttttaatacaagtaaggtgtttctaatttaataaattcaaatcactagcaatataaataaataataacttttccatatggaattatatttttcacttaaaatatagaatagatttatgtatttaattattttcattttaaattcaaattatgattgatatttggatggtctagatgatctaatctaaacaccatgtttgcaccataagattttcgcatatatatgtaataatataataaaataaatataaattttatgtatgtgttttaaaatttattggttattttctccctttagttaaattataatttaaatattatgttttttaaatatatatataatgatagatttagtttaattgtaatcaaacatttttatgatttaattacactgaaccaatctaatccaatctaattataaaaaattaataaaaaaagtgaaaaagaagaaaaactttctttttgctctaagtatttgaaatttaaaatgggtaaaaactttcttccaaatgatattgttttcagctttccaatcaacctagtaagtcataacaatactacaaaccatattagctacaaaagatttaaaaatgatttccagccaccttctaaaagaaccaccaggatcaaaaacaaaaatagctccaaactttcgccaacaagagtcagtaaatgggcaagagataagagcatggctaatgagaaacacatatacgagacagatagctgtgggcatcattcaatccaatccaattgaaccgaaccgatccaatccaatccaaattaaaaaaagttggatatccaattacaattg

SEQ ID NO: 317252 - DNA, 1968 bp, Cannabis indica
cttggtcatagtagaccaaaagtatgagagcagggtgttggcgaatcaggtcggcaagggtacaaaccaagtggccagcccagttgagggagcattatctggccagttgcacaaggctatggccagctagcctatagaggtagtggccgaccaggttgttgattccatggtcggctaggctactaaggttgtggtcagccagccttttggaagccaggttgatgctacagtctaggacagtttgatcctacctacactctgttggctttacccctagcatgattgacgtagagcctttatgcactcttgtcaatagatgttcaactttttactttgtaacacatcttagaggtggtattgggataccacgtctatgtgttacgctgaacaggattggacacccagcagctattccccttatccctactttttggcaaggtttttgtttggaggtatgctggcatgggtgtcatccatattggatggttgtcaagatgttctatttcttttaatagacttagttctttgaagaactgagcggttaccaagtttgcctctgctgccaaggcattgctggccagtcgagcgattacatcggatattgtatcttctttggggacttgccatttagtacaacctttgagttgacttaacaagtcttgaatctagctcaaataggccatcatctttttacattaagttgtgtattcacctagggcatgacctacgactagttgagagtcttggtgtatgtttaggtattcaacccactctttgtgtgctagcctgatgccaacaattggagtttcatgtttagcctcttttttagaagctttgaaactgacctttattcatcgtgcttctattgcccctaggtgctctgagggccatgcctgcaccgggcaggtggtcaatgtaccttttaggttgagttgtcttgctcttgctctcgcttcttttctacctcatacttttctcctaaatcattggagatttggggagatatacttttaaatttagctgtaaagctagcgatcattgtatgattgtatgatttagatgtgttcatgtcgctttatgtgttcaattgatgattgattgtaaattacgaaattttttataaaaaaataatatgattttggatctggaattattttatttggatagtttgggaaaaattaagcaaattacttttttttttttgcagaacttaatttcgattaaaattgagaatgttctgatcttttgaaaattttaaaaatatcaggctagggttacactcccccacgcgcgtggacgtaggtgaacctcggtcgagacaagctttgggaagaagcgtgtccgacgttcctcatacaagctccttgtctgaacccctctacgtgcgtgtcccaggttgaatgtgcctcctccatcgatcacgagccctccttcccgcgcgtggacaatatgtaatgtatattgtccgtgttgcttgcaaaatttaccaattttcaatcttaatttttttatggattttaatttcgatattttagtgatttttttgtgaagattctttttttttcaaattttcaaaactaattaaaccgcttaaaattaattattatttatttgattaattttagatgttagtatattttgagcctgaaaatagatataataaatttactactatttagattatttattattttatattaattataaggtttaatattttgtatttcatttatttaaataatatatatgatgactttatttgaaaaatatgatattatttaaaagataatttggataattttaaaaaccaacctgatatttattaagttttcaaaaagttagttattttatttaaatttaaattatgagattaaataaataataattatttatcattttcaaaactttttttttaacaacctattatttatttaatctaaattgttatgattaacttgttgatagatc

SEQ ID NO: 317253 - DNA, 1427 bp, Cannabis indica
tcgaataaaatatttttgggcctcgcatgtggaacttgacgggaaggttagaaatgtcacgacaataaaagataaattgaattggaattacaccggactagtttagaattttaagttgtcggtttggcggattatttgcaatgaccaaaatacccctagggtggaatttaggctttaaggttttgaggggcaatttagtcttttcctagagttattatttttgtctttatgtgactttttgggctgaagaaaagaaagaaagaaaaagataaatataatttatattataagcttaggggtttttatttaatttgaaggaaaaaacctagaagttaagataatggcataaccccattccccctcttcttctccccttcgaatctaaggccagcagctgcaagggagggaaactcttcaccaatttttaagctttaacagaatttaacattgtccaaggattctttaagctttaagctaagtcctcacttctttccttgattttctagattagtttaggttaggtttttatggtttagtggctgagtatttagtcaagttcagggtttattttggtgttgattttaagttgcttaggtttcaatgagtttaatttcttgactatatgattgtgaagttaaaaatgttaaattaagagtgaagttttgattttaatttggtgaaatggattggtgattaaattattgtgtattggtgcttgggatatgttgtgattgtgatattgatttgtactagagcagttaggcaggtatggttgggttttggttcgaatttggggaagaaaactcttcaagtttgtgttggaatatgttttaccaggatctagatttactaccatgtatgttaattaacatcctaaatatgaatatctaaaacaatgtaaataaacacatataaagtttaggaaaccttacattgggtgcagcggaatattaatggctccttccactcagatctctaacccttttatcctctctgtagcagagtatcaccaagatctgagcccgaatgtccttctcttgattctggattcttcacagccttacacactatgattgagataccacttgatgtgtgtgaccactcactctatcactcaaggtatgaaattatgaagaagaaggaagagaagtggctggttcgaaaatagaaggagaatggctcaggaaatttttactgaaggcaagaaatttcatcatcttttaagtgtgagcaatcactatctatttatagacaaccacctaggtttaggttaggatttattaggcattaaaataatagaaaaattaagtggaaaatccatccaagtggccagccatagtaatgggccctactttggaatttttccacttttgacaaattattccttattttctcaaaaatgccatttttcaaattctaaccattta

SEQ ID NO: 317254 - DNA, 890 bp, Cannabis indica
gactaaaagtaagatttttagtaatgatactctgataatctacttcaaaaaaaaaataaagatcaatcaattttgtttttgattctatatcttaatgaattaatgagatatattttctatatcactagattattcataaactatatgaattattaaatattaaatactttttagttataattgatttttattttagttggaaaattcgttactatatatccaactattaatttcattggactagattttataagcatattaattggattgtatgagaatttcacaaatagataatatatgcttaacacccatattatttatcctcgaactaatttaattaatacatattatttatttatttatttttaacatagtacttattgtatgaatgagtataaagacatgaggactttgctagggtttttgcttaaactctctgaagttgttgttgcccttattcttccaatcagggttcactgaccatcattggccttgggtgtggccttggtcgggaattttcatgagtgccctaactttctcaaagtgagggtggggtttccttttttatttgattggatttttgttttgggagatttttctttctgggtgaggggttttagggttgtgaatagttgactaatgtttgctttgtgtggtgttcatctgttatgattgggttagtgggtgtgggtttggtggctcctggtaatgggtaggcttctggacttcaacttttggatctagtttgatctctttggggatcaaattgtgtcacaaaggttctaggtctaaggcgaagcagtggtctgggtatggtttggtcgcttttgttgtggtaattttaacacgtaagtatacgtatcatttacaagtattagactcacaaagag

SEQ ID NO: 317255 - DNA, 2848 bp, Cannabis indica
cacagatgaaagaaaattaaaaaattacatgttacaaactttttatttgatttattgacaattaactatgattaatttggatcattgaatccatcaacaacttaatcatagctatttaaatcaaataaattatatgtttgttaaaaaagttaaaattttaataagcgaacaaacatgaaacaattaaggttagttgattaaaggattttattcattttatatttttttttaaaaaaaaataaatcctaatttgaaaattcagggttgttacaaccctaaatatatattcaaaaaaaattaactaactatcaaaatttatgttttttgtaaaagtatatatgattaaaataaatatctaataagataaaatggtaaataattaatatttttctaatattataatttaaattaataaaatatattcaaaaaaactaaattttcaaagcttatatttattgttggaaatttaacaaatttctagattaattttccaaatttattattattttaatgtcaaacaagatcatttcatatttttattaaataaataagtaaatacaatatataaatatcagatcttataattaaaattaataaaataaaataataaataataaaattttgaaataactataatagcaaatttgtagaaaaaatcaatttcaaatttaatgtctcctaatatctaaattcaattttagttaataataaaattagtaaaaattaattttaatttgataattagatttaaatttgaaaaagtaagaatctacataaaaatctaccaaaatttcaattttatttcattaaaaaatgatttttaaaacttcaaaaattaaaaaattggaaaaattccgacagtatgcaatgcatactgtccgcgagcactaggggagacttgatcaaggaaacaccatgcaagcatggtcatttggggcaatcgggctagcgttaggtgatactgactaagttttctcgtacaacttctatctgaatcgagcttgtcatagcgagtggcccaaaatatgaagcctccatgcgtatctagggtctcaccctattcaaaatatcaaaactttaaaaaattatatttttttcaattttaatttaaattaagttctgtaaaaggctaatttacttatttttgaaccaactttccaaataaaataattccaaatcaaaaatcaaattatttttcacaaaacattttgtaatatcacaatcaatgattaaactcacataaccatcatgaagacatccaaatcattcaaaaaattattttaaattcatacttcatgaaaataaattattaccatggttctgagcccaatttctagaaattattttaccaagatctagatttactaacatgtatatttgattataattgtataatctaatattctaaatacgaaattcctaaaacaatgaaataaacatgtaaaagttataaaaaactgtacaatgatggcaacagaataatatgaatccttatattaaaatctctcactgttgatcctttctgttacaaagtatgatcgagatctgaacatagattctccttcagttgacaatttgaactacataatctttcttactatcctgagtatttctttgaactgtgtgggcaatttctcaatactaaggaccacaaattttgagtgagaaatacaaagagaatttaaaaataatggatagaatatattaggttttctttttgatggaatatgtcagacaaaaaagagtcttaggttatcatttgaataaaaaacactatgttctatttatagagattcattaggtttagggttagagctaaattggcttattttaaagatccaatagcttaaaataaacctcatggctaaaccccttatgaaagcccatgaattaaatttttgccattattgtgcttccttaacgaagcaaatttatcgttcttcagtaatactattttcttgctctagttatttaaatattaattctatctctttaacaattgtaaataattatcaaataaaattactatttaaatatatttattaattagaccttacaatgtctcttaattaataaataaacctcaaattctcttttcttcttaattatgcctttccttagtaaaatttacaaataagatatagtctttatttggaatccaaattgataaaataaatcaattaattgagactacaaaacaatattatctcaattagtgtggtagccataggcctatgtaactaaactctcaataagtagttcaaatttaccaagtaaattctctatcttattaattcctcctgactccattataaattcagaattacacttctgattatatagaatgctctattcaccaagaatagatacgttataaattatttattgtttcaatctaaataatcaaagatcatcaatagatgttttacatgaagtagggacaaatttaccgttctaccctctaatgtattttatccttaaaacacttagcttcttataaaagatattttcagtaaactaatataattactgaaataagagctcttctatttatgtatgttaaaccaggctctaagaaagtcatcatttcacttctagatagttatagaagctatagattccatatctatgattagcgctcccactcaattgtactacggtatttccaagatgtatgtattgagttgatcctctcttaaggttgtaatgaacaagttaaagaacacatgcattacaattaagcaagaacctaaacatataaggattaagatcattgatctaagatcaactaagtgacattaacttagaaaagatattacggtaagtttatagccaatacatctgatac

SEQ ID NO: 317256 - DNA, 936 bp, Cannabis indica
cttgcgtgagatactacttgatacgtacacttgcgtaataaacagaattttcgtaacactctcaatcaagatctaagttcagagagaaggatacaagaaagtgttacttctatggaaagtccagacacttgcaaagattttgcaagaagtacaaggagcaacaaagctttaacaaaactcacaataaagataggaaggacttctgacaccatcatcatgggaaatactttgctacaatcgcagagataatgaagactgctccatggacggagagttattctctatctcatagtcttcaatgaacagggagtggattcttaattcaggatgcacttattacatatgttcaaatcaagagtcatttttaattacaagtcagttgatgtaggtaaatttctaatgggtaatgatcattcatgtagggtcattggaaccgggaggttaccatcaaatattatgatggtggaatcaaggtgctgacaaacgtaaggcacatcccaaaacttagacaaaaccttatttccctggatgcgcttgaggatgaaggatactaatacaagtccatacatggaagcttggggatcagtaaaggttcttagtaatgaaaggtgaaaagaacaatggtttatatgttctccaaagagaaactgtcccagctagagaggcaagtatggtgaaaggattagaatcagatatgaaattgtggcatcacagacttagacatattagtgaataaggcctcaaagaattgcacaaataaggtatcattgaaaatttaaattcttgtgtcttaccattttgtgaagcttgtgttttagggaaacaacataagctgaagttcactttggcaaggcacacaactaaaaagatactcaaatatgtgcacgctgatctttagggaccatacaaggtgcctactcactccagtaagcaata

SEQ ID NO: 317257 - DNA, 2151 bp, Cannabis indica
tagtttataaaatcacacacatggcatccctatagattagggcattacaactccaggcctaagcgtctcgatatatcttcatcttacgcaagacgcagtcctgctcaatatttgtcttgccttacctacatatggaaagtatatttgtgactcaaaagacttgataagaaaagcataaaatataacattcaactaactcgtgactgggtgcccatacacccaatcgtaaagtcaaaaactatgtctcgaatgttcttgacaaaagcctaaaatatatatgtctatatcttacggcaactctatgtacacctcacaaataccataatatgcttgttgaccgaggtttttggcaactaattaaatgatataatgatgagagctttggaacaataaatgtagggggtttttacgtagttcgggcattaatgagccatagtccacgagtctttgttattaatgagagttcttatacagagaatgttcttggtgaattctctctctctgtcttgttttcttttttcgatcgatcctctttcccatttttttcaagggtatttatagagttttgcaaggatcactaaaaggggatcacttgtctttgagtgccagccatctaggtggacaagttcctaagagatataaaatagggcatacatgacctatgccgtaggtatcatagggattaggtgaaagtaatctttatccttcctcgattgatgtgatttttcataatggactcgtcactagactctttgattatcgtgtaatcgctgtaaataaggcttacgccatctgtcatgtccttttatgggcgttctaagacgtttcccccatgccccattaaatgtgaaatgattgttcaaataggttctccttctcccggagatgctttgttgtatttctagctcccacagaggagagacatgctttatgtttctctccaggggctcactccctgaattgcacatgcccgtctatatatgacttacttaattttgtgggtgaggtgtccttgaaatccacgtgccacacgcagccgctgccacgtattttgggaaacatccgaggcaacttttaccccccaagtctcatttagttactggtaaacgaggcttgtatacggccttcggtctcttaataaatgtagtggcacatgctctaggcgcgtgggtcgcatttatgatgatcatcattgatttttatttccttttccatgaaacgattcacttcccgtttattgatagaactttgcattaatgctggggtcagagaggtactcaaacgttttaactgtcctttctcctcgttacatctgttcaccctatttgttggatcacataatgcgaatcaatacaaattccaactgtacgacggtgcctgatcacagctgcttggtacctcttctggcctataatagccagcacctttcctttgctgggttacttccaccacttcgccactttcgacctaaccaacacatctgaaaaaattccagaaatctttgacttcctaatgttgttcctctgtcgttgccagtccaaattttaccgtcagacgacatcaacttctcgcctataacccttctgtatgtttctgtgcacactttctctaatttattttctgtatgttagagaaaaaattagaaacataaccttatcattttagtcacatttgatttcagtggtacggtggtcatggcgaggaccgttgtacaacgtagctttttttcatgcttactgtcgtttatcttttggggctggaaaatgatttcctcgcatcggtgtcatcgagagtttgaagtaactttcacactcctatctttttcttcccttttctcttttttttttattttttttttatttttgtctttcagatatttgcacctgatgcttgcctaggagaatctataaatttacttatctttggtcaggcatctggagggttaggggtacccccgacttgccctccttttattcttaggtttggtttgggggtcgtaactgctggatttctttctcaaatgagtaaggttcttcaacatcttcacgaccacggttttttggtctttgaccatgaaatcttagaacttcaccaagtccctcctcaaccggagcaaaatcttcagacaaggtgcccaagaaactggccatc

SEQ ID NO: 317258 - DNA, 1681 bp, Cannabis indica
gaatgggggttaggacgatacccagaggaacagtatactcgtccacctcggacgaaatccttgagtcaaagcaaggagctggagggtctactcagcttagcttcttagcaacctcagtctccaccatctttcctttgccctttcggtccaagggagggagaatctcgccttcttcttccccttcttcctcatcgatcagaacgacttgggggatgctagaagaagaccttccaggagtcactgttgggtcgcgagtttgaggcacgccgacctcaggactgtatgttagggcgagcgcatccaagagctcatccatcggctgggctacttaaagaaataaacaagtaaagacattagagcattatcaaaaagtgatacattcaggaataatgtaatgaaactaatcctaccctggcgatctaattcttccctagcaaaagtatgtattaaaaggctggtgtcgtcgccccctagaaacatgtccgaggggaggaaccaattggaagataaataggtagaatgatccaaagggataggtgcgggaggaccggaccccatccgggaccggcctaagaagtgaccaaggttggaaaaaaaataaactgttggcatgatcaccccatcgaaaagggggcatcctaaacctctgaagctgttcatcaaactctactggcctacagccagaatagtcctgaacggaagggacacgatgaatagttagtggggacttacaagcttcggaagtgctggtgtttggagccccagtgttagggaccgagaatggaagcttgggccgggaggtcgtctgctccgttatagcctcaattcgaagggctctccccgcggctgcctgggccttaatgctggccaactcctattccctcttaaagaggtacttcttgtatcggtcctcagcagacgtgatgatgtcatcccggagcgccttctccgattcagggttacgaacgttggggcagagaaccttcgacaggttaaagtcatccactgactggctctctgaaattaacttggccttcctgcagtgtggagtcgtaaccaagtcccccacattcagtccgtccttatcataggtggaaaagaccttggcgtgccgaaggaaaagttgagtaggcgctcaatggccttgaagccggaggagaagaaaaatcgatggcgatactccttaacatttttttgaaaattatgaggaaccgagccctcgttggcaggatgggcctaaagtttgaaaaaaccgtctttaagtttgtctcccttcttggagacagatgataattcataaaaaataaagaatttcaaccgggctgggcttggcaacatagaaaatgtacgtacaagcctgagagcagacggtaagcttgggggataagtttgtaaggtgcaaggccaataaaaactaaaatatctataaaatagtcataaaggggtaacatcgccccggacatgaggtggctttgactccaagacccaaagccaccgtagttacggttggtgtaatcgtctctgggaagacgatggaagactccggaagcagagggcttgattccggcaactgtgacaatcttctccagttggtgggcacaagtcagagttgagtgcaactcgtctgcctcccaaccaatggatcggcaagtgtacttctcctggaccacaggtcccttca

SEQ ID NO: 317259 - DNA, 721 bp, Cannabis indica
aaaattacttcttacttctcttgtggattatcttaatggctcttgttcttaaacatgttgagtttgttcttctagaacaattacctcatgttcaaatggggggtttgtttaacatatattgtgttgttgaggtttcatatttatttccttatataaatgatatgtggagaagcttgaaaaatttcaaaatgatagttgcaatcgcgttttaattcaattactcaaaataaatgtgtctaatcttatttatcccgaaactccacatcttcaaataatgttgcagttcccgtctcaaaaatatttcaaattgtggcttatacccctaagatcattaagaataggcaataaaatagttgctcacaatttttgagtcaaatttcttttcatgtggcttatatgctctttcttgaagtggacatccctaaatgtcaaaactgttttaggctaggattttgacctgtcaaaagcacataaggtgttttgtaactgtcttagttggtatcctattaagaatgttagttgttgtctttaacacatctccccaaagagtaacatatcctaaagagtcccattttgtcattaatgtaaaacactcaagcaactaataatatctcaacaactaatcatgctactaaaagtgcttcattatgaaaacttaaatcatatttctataaattaaaccttttgttgcgaaaattattaattactacgcaagtgcacg

SEQ ID NO: 317260 - DNA, 650 bp, Cannabis indica
tattatttaataatatattcattgactttttttttaaaaaaaaaaaataaacatgtaaacaaacaattataaattaattaaacaaaataaattctaccactttagtattgatatatatgaatgaaaattacaaaagaaaacataaaactcatcagaacatatgagcgcatgtgaaattaaaagagaagagtgatgaactcatttttattggtaataatgaattggaaagaagtaagaagttgtagtgatggatctactacatatctacttgaaaaattccatgacccaaaagccgctaacacaacattcaagtctgatgccactgaatccagcaccacttgccaaggcttggaactcttgtttgctcctctcttttcctccctggcattgggtcatcataagcacatccgatttggtcatcaacttatcattataactatcttcaggcaccattggaagaaggccatccatcactataacctttccattctctggtatagctttgtaacaattcttcaatattctcacacagtgttcatcactccaatcatgaagtatacactaaaatacatacataaacattaatgttttagttaaactactatataggtaggtagctgctatatatatatatataataattaattgga

SEQ ID NO: 317261 - DNA, 1019 bp, Cannabis indica
agtcttagcttagctgcttttcgtccgatccattgccccgtattttttaacactactagtatttgatcatgttgctttttatcatggattgtgtgactggctaggcaatctttagtcatggctatctttttatggccttgacaagtaagggtatggatttacttttccaagctgaagtatgcctacacgacttagaggcaggtttagtagcttatagtaagcgttgaaatttctctgcataagttctttgtgctagtttgatgcgttgtacaatatgggtgccccccaagtgaccatgcagacaagtctctttgtcactcgatattcaccaagtttcataaactttgcttgggtactgtcttgtgagggtatcatagtacgcatgtagaactaataaaataactttaaaaagttaatctgtgagcaagtggttcatagacaatacacaaaataaaaatattataattattcaataattggtgtttgttgctatgcaacttacataaattgaatctacaagcctatattacagaaatttagcttctaagatgtcaagtggctactctcgctcgcctacgaagctgacgccaaattaaaaaacagtgggagaccaagcctaagaaggttcatgggtgctagcgctttttgttctctaatgttatgcagatagaactgctactttggagtagagttctataacctagttattggtagtatttgtgaaggttttctccaatccagtattctggtaggagaacgagctccatgttcttgttgtaccttcctagattgtaggctcccttactagttatttctatatctttataagggccttcccaattaggtccaaacactcgtactggtgagtatttagtgtttaagaacactcttcggagcaccatgtctcttacgaagaattttctattggaaatgttttaccaggatctagatttactaccaagtatgtttcattaacaccctatatgaattctaaaacaatgaaataaacacataagagt

SEQ ID NO: 317262 - DNA, 851 bp, Cannabis indica
tctctctctctcctctctctctctctctctctctctctctctctctctctctcaaaaatcctaaggcagctagggtttctttttgttcttcaatttgctgaggtttctatcatattttagaggatctaagccaaggtaacctttttacaattcttttctttagttttcttgaattgtaagaaattggaaaatgcatgtttcatggttcttgctactattgtggctgttcttgtgtgtggttgatttctaagttaaaatatgtttatatgtgttgaattgaagtggttgtaagggatgtggtgttgattgagcaagctttgagttttagaactcaagcttggctcattaatggtgtttttgaattctgagcttggtaattgttttattgcttcgaaatagtttattggggtataatatgcaggtctggaaggtttgagttggtttggaattgatttggtggagctttgaaattttttgggttttttgaaaaaatcgggtagccgattttacaagagcctgtaaaaccgagtaaccggtttttgcagcaggattccccaaaaattttagctcgtcgattcgtcctagtttcaggtttctggttggttggttccctgctagtttagagtattgctatattaagttgttgtagataggggtttggttttaaacctaagtctcaggtgtgatttagcgtgtaacttattcgtgttattaccgatgtgattttggagcctttaactcgccgagtagttgttccactcaggttgaccggcacacctgaatttggaattgaggtaagattagtataatatcatgcatatgttattgtatgtttagcgtacatgttgttt

SEQ ID NO: 317263 - DNA, 513 bp, Cannabis indica
tttctaataatccaactgcccccaaaaagacaaaaaagcccttatggccactaagcacacccatgcacaatcaagggtaaaaaggtaattttcttcataaacatttccaaatgaaattcagatcaatcaccaatagataaaattccaataattcaatccacattacattttggacccgaacccagttcggcccgaaatacagggttgtgactataccgcaaaaacttgtcggaacatacctgaaaaagacaacacagacatactatatgtaatgaccgctttagtaagtttgattagtaaaggctattaacactaattactattaatttttataatgattcacaaatacaattatttatgcaccccaatattagaaatgagcattagagttataatttctcaatttcagagattttattaaactctaggggtattatttgacttatatgtgaaatatattatttttgtaatatgtgtaagtttagaaccttatttcttagtgggaaatatttt

SEQ ID NO: 317264 - DNA, 1340 bp, Cannabis indica
ttttttccagattttaaattttcccattaaatgtccatatttttcaaaatacatttaaaaaattccatatttataaaaaaagcctttttttttgcttccagatttggtattcatgttgatacttatattgaagatatcaacttcttactagggccggtagttttactcaaaaatctgtgggtaacatatacccgatgtagattgtagatgtgtaggatacgaagatagggggtgtgtccttccaagttatttgctccattatatatttttaattattatatatgtaattgacatttaaaaaaataattaaaaaattataagtttattttttttaataaatagtgtaattttactattaatgatcccaaattaatattgtttgctttaagactttacagttttgtttgtggatactttttcaaacgctttatactaatagagtaggtggaacactcgtatttaaaataatttttgcttattctttcgatgtgagatttaagttgataccctataagaaccaacaaaataaattaaaatcatgttacactatataagactaaaatacttaaaattatgtcacacagacaagactaaaatacttaaaataatgttatagtatagagacaaaactaaaatactgaaaactatgctagtagcaacaattaagttgcaatagcaaaacacacaaccccgatcaagctgcacttatgctaagggaaggccggtggacctgcctggagaaaaaagacaacctcctgtaactataaatttaagaacgagaaactctaattttttaatttagttaatttttttttgcacatcatttttatgttaattagtatacaaatataatatcatttactatctctaatactatattattattattattattattattattattattattttgatcaagaaaaaaaagcttcattaatcaacagagtaaaatacatcagatagcaagagcaaacacagcccttacaactcagccaagaccaacaagacacctacctattttgtaatctcagtaggtagtctctctcctgcttagacacgtttttcctatttacaagttgtaatctatacttagcagaattttttacaccatcaactaaactaccaacagaactagaataattactgaaaatacatctattcctgttgagccaaatgttgtagattacatccgccaaaacagtaatgttgagccgatgtagcctagcttgacctgtcaaaattacccaatcataccatccattgtaatctgtcggccaagccctgaatcccaaccacgaaaaagttgcatccaggactttttgagacaacagacatct

SEQ ID NO: 317265 - DNA, 1185 bp, Cannabis indica
gttttgtaatcttttcattgcaaattgtttgattgtttaaagtttagatgatttaattttgtattattagttgtaatcctagaaatgcaatatcaatatttggaaacgatttatatgcattatagttactgtcttacccatcaatgtattttatccttaaaagcttagttctttgtaaataatatttcagtaaactaatgcaattaatgaaatgagcactctatcatttaacgttgttaatcaagttcaaagaaaaatattgtttcacttctaacatataaaagctatagattttaatatctatgactaacacccccactcaattatactactgagttttcaacatgtatggctagtccgtggagtaagatggtaacgaacaagtcgaagaactcaatgttggttttgtggcactaaatcaggtatgcagcgaaagtatttatttagattatcatcgtactacacccaaggatctccatatgtacatatatcaactcttaaaaaaaaaaaagatcaaaggaaatttttacctcttgaagcgaatcaatgtatctttgaatattttcgtaagttgcatccaagacggtgacattaaactcacaccatgatctttcaaatataccactacacacaaggattagtgtgagctaataggatataactatataatgtgttcttatgtttatctcaacatatgagcaataatttttctttctttgagtaaataataatgtgattcttaaccattttaggaatcctaaattaaatgtatagaaagatttaagattatactaatatattaatttaaaccaataaaacaaaaataaaaatttaattaaataagatatttattattttaaatattaaaataataatatttaaatatttgaacaaatatcggtgaccgattctattatagatatttattttgagttagatatttaagttcgaattgaatattagtgttgaccgaggttttcggcaactaataaaataatattagattagagaactgtaagaaaattagagaaggatttttacgtggttggggcgttaatgagccttagtctacgagtttgtgttatttatggatgtattaaatacagagaatgttcttggtgagtatttactcttcttgcacttatgcaacccaagatttttcgaccctatttaatgagctttgag

SEQ ID NO: 317266 - DNA, 2237 bp, Cannabis indica
atccgcacaagtgcaattttttcaatccaatccaattcgcgcaagtgcggatatccgcattttacggattggattggatcggataatgcggattgaattggatcagatacttagtgaacacccctacttctgcccaggtagaaaaatataggacacgtgtcatccagctcattgccacgtcaatgtgccaaaaataggataacccttgcccccaaatctgcgtatggccttcttggtcgcacgtggacttaactcggtcaagagtcttgtcttgatgggtgacacatgttttcgatggttgatattgatctgatgtaactctgactagaggtctctttaatatctgatcatttaatgccttttgaaaggtgtacctcgaatcacagttcgatgtttgagcacacttgacggttttacatcttgcaatgaatactaacacctacttttggggggaaaaccaaatattcgaattttgaaaataatttttcctttttctgattgcttataaatagaacccaaaacttttggtgatctttttagccatttcaactcttaaagaaccagagcaaaaatttctacgcaagttttatcttagattctttgaagaaatcataggaaaacttttgacaataccatccgagcatgtcaataaagcttcgaatcagtgagtaagttctttattcctttcttttatataattgcaatgaaatgcatgcattattttaaattctttgctatggattttgcctattcttgaactgttcttggttaattgtagaataaccaggtttacggtttggaaatttaactaatgtttaaccataacgcctaatgatatgactgcgctttgattttgaccttaaatcgttcattcccattcgtccataatcaattgacaaaaaatcaggttccaattgaagtttgaacttctgggactagaaattccaattctgggtgaaatcttttcttttgattcttaatcaggcttggtcagcatatacaatctattttcatttgttagcctgaccaactcttattctcttgtctcccactttttgtagatgaaccctggtgatttttggggaggcaagcatcatattgactaggacttgctccaaattttgtatgaagatcatcctcatctccgtgctagtccatcttcgtctagtgacgatctttcgaattccaattttgaagattggaaagtgagcagtgaacacacaccttccccgaagcccgagctgcaacaccatttgtatcctgaccagatttgtggcaaaggatacagtcgtttcatctgggaatcggagaaaggttggagacactatcttcctgctagctagacatacagggtccatctgagcgtagtcgacactctgcccgagggccgtccaagcccagctgctaaaggaaactctattgctaaatttgatggactattgcaaggcacacttctgataaaactccgtccaatagtaaaatgatggcacaaaccaagtagactgtcataaaaccttcgtctgctgaccctcatatcgctcgtttggctactatggctagggcaaagcaggctcgtcttgtggttgaggaggaggggattgctggagatgttgaagtctaggaatggaggaccagggcaaggtctatcctgcaactccttctaaggccaaaggtgatgaagaagagggggtagctcgggtgcttccttttggtggctacaacaaaaaagggggaccatttctaagacaggtgaagtcttggaagctagccagaactatgtccaggaggagtatacgaaggctcgtcctattagtagaataagtctaaaaagagctcaatgggtctctctgccatctgcccttactataaagagattgactaatctcttttaagatggtcttctggggcaatttgaatgcttccttccctctcatgggtagatggtagaccctggagagggttactgtgcttgttcaggtcctcacgccaaacaatgttacctttgcatctgtacttcaaggagatggccaactattaccatatcagtctgacccaattcactcctaagggcattaaatacttattcgccctgtttgtattgtatgcctctcaaggatggggtcagtcgttcgcccacgataccaattggttgttcaacttgaagttaagtcccaagaaaaataggtttgggtatttctacttctcacagattgaggggtctgttggaaattatttta

SEQ ID NO: 317267 - DNA, 619 bp, Cannabis indica
gatcttgggttaattgttaatttatataacatatatataatctcaattcccacaaatccactttaacacctcacataacaagctcttgacaactgtacaagatattttaactaaacaagctgagttatcaaagataaacataaaacccatgtaaaacatgctcagatgaaactaaagtgttcagaccacacaaacaaaaataatttggcatatacaaaactatgactcttacatattattaccatattattctcattaaaataacaaatcaatatatactaccctaaaaaagtgatcatcaaagtagaccaacaaagaatgacacacgttttttgaaatattatacaaacgccaaagtatttgaaatattaggccaaaaactaaatctaaaggacttatactatcaatccaatatatatagagcaagatctgaatccaagtaaaacaaagacaaaatcatatagctatagcctatatatatatagaacaacaagaaaccaaactaaaacttaaataaaatagagaaatttagagtgaaacttcgctatgttgtaatttttatacacttaactcttttatttttttttttggcaaaactatcttatgttttaatttttat

SEQ ID NO: 317268 - DNA, 1004 bp, Cannabis indica
agagtacacaaggatgtcgtcgataaatattataacacatatattgaggaaatccttgaataccctattcatcagatccataaaagttaccgaagcgttggttagtccaaaagacattaccaaaaattcatagtgctcatacctagtgcaaaaaacagtctttggaatgtcctcctctcagattctccactgatgatagcccgatcggagatcaatcttagagaagactgttttcccctgaagctagctgatcgaacaaatctttaattctaggtaaagggtattattcttgatagtcaatttattagttcccggtagttaatacacatgcgtaaggatccatctttcttcttaacaaacaacacgggagctccctagggtgatacactaggtcgtgaaatccctaggtcaagcatcccctgaacctaaatctttaattctttaagctctaccagacccattctataaggtgctttagagtatggctccgctataggtgctgaatcaataacaaaatctatttctctttgcactggtaaacctaaaagttcatctggaaatacatctaaaaatccatgaacaactttgatttcttctggccaaattgaatcaggccgcgtggtatctaataccactgccaaaaccctagacacctatcttgtaacaaatctctagctttcaacactgagatcactggaactcgggatcctcaaacagatcctacaaccacaaatagttcctcaccctagttggaagatcaccatttttcgttcatagtcaatagtagcaaaatacttggacaagaaattcattccaagtatgatgtcgaaatctactaagtcaaattctactaaatcaggactcaactctctatcctcaattctaatcagaatagacctaccattttttgaagaaaactaattctctaccaggaagtagggttccaaatcctttatcaaaactatcaaacggtctacctgttggaatttattttaccaggatct

SEQ ID NO: 317269 - DNA, 1282 bp, Cannabis indica
actagtaacactttcattttctaacacctcctcttaaactaagtggggtgtgaaccacacctagtttgtcaacaagaaaatgaaatctggaattcgataggctcttggtgaaacagtcagcaatttgatcgtgtgagggaacatatctaatgtcgagatgcttggccaaaaccttgtccctgacgaagtgaacatccaactctatgtgttttgttcgagcatggtatacaggattagatgcaagagcacttgcccccatgttgtcgcaccaagttataggaacatcttttagaggaaactgaagttcttggagaagtgactgaatccatgttagttcagcagacacttgggctagtgccctatactcggattcagtactcgaacgggacacaacggattgtttcttagatgaccatgatactaaggtatcaccaaagaaaacacagtatccagccacggatcttctatcatcggggcagcatgcccaatcggcatctgagaaccctgtcaaagtgagcctttcacagaacttgatgtgcaaaccatgatcaaccgtgcccttcaagtacctaaggattctctttgctgcattccaatgttgatcagttggagctttcaaaaattgactcagtttgttcacagcgaagctgagatcgggtctggtgtgagtcaaatattgaagtccaccgattaaacttctgtactctgttggatttttgagtggagttccatcttcaatagacagtgtttttcccactgtcattggagtgggacatgacttcaaatgagtcatattattcttccttagtagctctgtgatgtatttggcttgagatagatacataccagtatcatccctatacacttcgataccaagaaaataatttagaggaccaaggtctttcaaagcaaattcccgatttaacttctctgtgaactgtttcagcattttcgaattgttcccagtaacaattatatcatcaacatagatgagaacaagcattacctcagtggctgttttgtagaaaaacagtgatgaatcagcccttgaatttgtaaatttccagcctaggagagtttgtttgagcttgtcaaaccaagctctaggtgcttgtctcagtccatacaaactcttagttaacttgcatacataatcggggtgtgtcttgtcttcaaaaccaggtggctgattcatatagacatcctcactcagagttccattaaggaatgcattgttgatgtcgagttgtctaacttcccaagattttgagacagcaattgt

SEQ ID NO: 317270 - DNA, 2856 bp, Cannabis indica
gtagcgtgccttagcattagggcgttacacattctataagcatattacaggtcgtgtgacctgtagaggtagtggtatttttagcaagtttatcaaaccaaaatttgataaacacggttttactgatagggcaaaggcaagcccttttggtcaattttgacaggctggtgctctatccttctctttatactattccaccaactgatgctgcataaaatgatggtgaatgttgagaaggatgacgaaatgcaattttacattgcacgaaacgagatgaaatttggtgtggtcgagcttgctctaattacaggcctcaacttcacaaaggggcctacaaacgatgagaaagaagccatgttagggtcaaaccaattaataaatctctatttcaaccggttagataatgtgaagacagaactacttcagaataagttcctagcctgcgaggtcccaaaagacgcgtacaagctagggttgtgcttgtttatggagactctcttactaggccttgagaaaaatgcatgtattacgactaacatactaaaatatgttgaagatcttgatttttttcaagattccatgggggaactactcatttgccaaactgatgcacaccctacaaaaaaacttattgaaacagaaggcaaattataagaaaaagctaaagatggatgttcagcacgaatacaagtacacaccctatggcttcacacctgcattatagtattggccctatgaggccattctagaggatggaaagaagtatggttcgtgtcaggggactcattttctcaggttgctaagctggaccagcagggctaagaatagaaagaaggtactcagttcattattttcaaaagggtatgatcatttaatttttttaagtcttatgtttatccatagtttacgtataagatatcgataatttgcttggttttaatttggagaagaatcttatttttgtcgacataatgtcgatgctttgtcaattatttagttttctgtttaattttttaaagtatcatgagtttctcgatatgttatcaacatattatagacaattttgtcaataaattaattagggtttatactattttaattttttaaaattttttatttatctacatgaaatcaacataatgttgatgatttgttgattatttgctttttcgtgtaattttttaaagtatcgtgagtttatcgatatgttattgacattttctcgacaattttgtcaataattgctttaggtttatactattttaatttttttagattttttctttatcgacatgatatcgacatattgccgacattttgtgtattttatgttatggttaagtttgtcgatatcttatcgacgtattatcgatatttgtcgatagttgttgttgtcgttaatatttttttgacatattatcgacattttgtcgataatttttgatgtttttaaatatttttttatcgacttttttattactattaacacttattttcatttctttgttaaacagacattggtagtcatgaaggggctacatcctcgcccggatgaagagtcgtatgcccggaccatcacatacaacgatgctgaggtcctggttgagatgggtgctgatgagacgcaggctgaagacaatacccaagaccctcaattttttgctagcctagctaaaagagccatagagcatgtaaaatttgctgctactctcgagactcaacctactgcatcatcttaaggcgtcgatcatgttgacaatagtgctgtggttgagaggttgaataggatagaggaagatgtaaattcttttcgcttatgagacagagttgaaagttgcatatacgcgtagccacctaaaattagaggctggccaataccttatgatggagcaactaagatctatcattactacactacataataggccaacagacccagcaccagaaccttccatggaagaagttgctgatgtgtaccccgacgattatgatccttttgttgatgatggaccttgtactcttgtggatgccgctattattcccatatatgatagccagtcacaagggtgatatccaattatcgagttatggctagtcacaggatgatgtagatgtattgcccttaaagaagccaccagtggggatacaatttgggaagaggaagagagtccctcctacttggttcaaggattataccgagatgaagaaaaatcctaggccttcttctgtgtcatttgatcccctcagtctaccagatgagaggctgttggatagcttcgtaggtggttgtgtggggccatccccaaccaacgtctccgagacgtcaagactggtgattacggtcctacttggttttttagattgctatcactacgagaatggattcaagattgtgtaagttaacttacaatattttattacaactacatatttgttgctaatttaatttaatttcttgacagctttcttttaccattatctgcaacatgtagatgcttgtgcccatatgattaggaggcgacaccacttcttttcaaacacattctgccaaagaggtattattctgtccacatatgtagctgatataatgcacaatatttgaaatgcacacaagggtccaaggaatgatttcatttggagtgatgatatcctcatgtagtgcaagggtgcagtggtacaaatgttttcaaaaaaattagattaagatcctttttttgtaacttgtgattttgttgatagtctattaaatatttatgttgatgttttatttgcaaagatcgagttctatccaagatgagcaaggaatgacttcttgtactttgttttgtgtaacgccctaatgctaaggcacgctac

SEQ ID NO: 317271 - DNA, 945 bp, Cannabis indica
gtctatgaaacttggtgaattacaagtgaccagtggaccgtaagtatgcgtgctcacttgggggcacccacaccatacaatgcatcaaactagaacggagaacttatgcagagaaattttaaagcttagtataagttacttaatctgcctctaagtcaagtgcatacatacttcagcttggcataaagaaaagtaaatctaaatacttacatgtcaaggcaataagagtatagctgggattgccatataaggctaaataatagtagtgtttgaaaacagagtgcctataggccaatagcaagaacatgaaagcctcaaggccaaatatgaataaaaagttggttcaaatgcataaggccaaggccctacaagaattgtacatacaaagaagagccagaaatagttcctataggaaccacgtaccaggctaaatatctaagacaaggcagagttcctagcaggttccaagtcaaaagttccttgtaggttccaagccatagataaaaatctaggcaactgtccccaacggtgcttgccagatattatcattgtacaaggttgggtattagtaaagtaaagtctcaagtgtaacaacttggacaaatgttaagtcttaagttgagcatttgactataatagactcaccattaagtttcatacagagtttctaaggaaaccatgtatgagaccaaggttgtatatgcctacagggccatgacaagattcttgccgaggtcaaaaaaggatagaaaattggccaccttctttgaaccaagggctaggctggctagggttcccaagccttgagagggtcagctaaggtcccatgactcagcaaagaactagccagagtcaccaaacgcaggaatgaaccggctagcttcctagggtaggttggccaactcccatgattgaatcccagggccagccaggtcttaaacaaga

SEQ ID NO: 317272 - DNA, 554 bp, Cannabis indica
tatatatatatatatgaatttgtatattatccattttctacgattttgccatacatatttcaacatgcgaagaatgggcaagtgcatgccggggggggcctgggggtgaagtactgaatgcttcactatattcatcatttataatatgatttaataattacaaaaatttatataatttgatgattaaaaaaaattgaaataaatttgttagttagcaaaatttatatattatgtaaaaaaagtaatgtcatggcctcattcacatttggctgcccaatcaaatattataattttttattacattatttgtatttttaaataatttctggatgagtggtattagtttttatggaagaaatggaagtacaaatttgatggatgagctgcgccattgtttatggctttggtgcctttcaaggttttcgcgcctgatttatggctggcccctaattatttaggataatttgggtaaaattacaagatatcattaattataaaaaatattataaaatttaatagctaacaattatgatatgtaattatgagattattgc

SEQ ID NO: 317273 - DNA, 1115 bp, Cannabis indica
ggaattaacctttcgaacatataaacatgatatattccactgtgactgacaacactataatcatgaacaaataacatatgttcttgacttaatagaatttatacattaaatataaacatgaaataaatcatgtgaaccatgcaacataaaatgtgatatctgatctttattaattagtaaatttgattatattgaaatgagttttatttaggacataaaacctaacagaaggtggtggtggattttggattttatgtctctagtaaggaccctttgggccatggtttgatctcgggggtttctcggattctatccgaagattatgttgttattttcagtgagacatgggttgtagaggaggattcttcaatgattaggtccattgcattttattgtcatgtgtgtcttgttttacgggtcaatagtttttgtttcgttataataattgtgagtttttactcctgtttaatctctagtcttttttggatttggttgcacacgttattccagacttttttccagtgttgtttgacactttgttttatggttcttcgatatttaatatcaaaaattttgaatatggtttgccatatttttctcctttattttattttgatgttttattgttcgcaatttatgagtcatttaattgaagatatcaactcagttagtatattttaattgattctggaaatattatgtgcatgtaatggattatgtaaaatttttaggagaattaccccatatactattttcttaactttcttttttcaaatttacagtttgagtttctaaagtggttgtagcgctagttgcaataagggtttctatacagttttttgttgcaatttaggatgtagcgctagttgcaataggagtttctatgtagaatttcataaaaatacagaaaaaaactatttcgaagtgtaaaaatgaaaaagccccaaatttttatttaccttttaaaaaagttaagaatatttttttttaaaggatttcgtagttgtacactatatagtacaagccactacgggaaaatgaatattctagaactatgttttctattttcaaataataataaggctaggctaattagtaatttttccccctgaact

SEQ ID NO: 317274 - DNA, 1474 bp, Cannabis indica
gcacgtgtacaacaaactttttgtaatcctatttttggtcaccattattattctgaattttttgaaaatgtgtagaatgcctattataactataatgtacttcttcatataaacaaaactgagttatgctttctctaggtgccaaaaagaaaaactaccccctacggtaggggcaaaagtgatgcctacttatgaattttcatatatatatatatataaataaatataggaggcactgtagtaggggtgtcatttttcccctatctgtctatattttttgcatttgaagaaattataacttaattttttcatatgacagtctacattatagttatagagtagtagacatccatccgttttcaaaaattttgattattttcgatactgaaaatagagttcaaaatattcaattgcacgcgtataaagaaaataagtatgcatgcaactaaatgtccaagccttgttatcggcattgtagaatattttaaatttttcgaaaacagatggaatgtctactataacaacaatgtataaagtcatataaaaaaaacattgctatgaggctcccatagtgcctggtactacgatgaaatgtcaccatataattagttagcagttttctataatatttattaaaataaaatagctaggactcgatattaagttgcgccaataacaatattacacctcacaagagtgctaggcaccatgagtaccctttaacattttttaaatttcagttttaatttttttctctactaaaatagagatatccctaaacatgcaaaagaaaaaaataaaaataaaatagagatgtccctactgctaaagacaaaagtggcatcttctaccgtagaattttcctataaatatatatgatttatactcccctatgtttatattcctatttcaattgtagctcttcattcttattattctgtacatttgtcttcacatctatttctataaccttacagtcgataaaaatctctgttcatttactttctgggataaataaaaaaacaattccaggttgacatcactttttctcttatctaatgtcgatgaaatgaccaatttggtaattatacgtgacatatctctttcaaaatatgagctcaatcaacttgaactttaaagtggtaatagttttctttaacactgtaatttgcactttacatttacttttgatgtacatcttagttaaaaactcattatgtttatgctaggtctttgctcgatggtatagagcacctgagttgttgtttggcaccaagcaatatggttcaggggtggatgtttgggcggcagcttgcatttttgctgaactccttctacgtcgaccttttctgcaggtgaattattgaagacatgctaattcttcatgtgtcgtgatctgattttgctttttagcaaaactaaataaataaaatgatctgattttgtcataatactctgtttctgtttctttttt

SEQ ID NO: 317275 - DNA, 1866 bp, Cannabis indica
gtagatggatgtgttaggtttgtgtgaaatttagggtaaaattttgattagagaaaaataaaaactatcgttcaagtgataaaagtaaaatcggtagaataattgaaaaatgaggtaagcataggctttgaaagaaagggtaaaaattaaaagcatcaagtcaaaagaggtatgtagtgtaatttcctcaaataataccaacatacctatccttttattaaaattagagaaacttacaaaaatactagaatttgagttaattttttcaaaaatattatcacacaaaaaaaaaatcaaaaatactgtgttattataaaattaggtggaaggaataaactacattgaaatcttcttacctgtagtaaattataagacgataagattgatgttgtctttggaaatcggaagttcaattagagtttgaagttgaacaacttgatgttaagactacctttcttaatgaattcttggatgaaaagatctacatgaagcaaccacctaggtttcaagtagaataaaaaatgagttgaattagtgtgcaagctcattatgtccttatatggtttgaaatagtccacaagacaataaaataaaagatttgatacttgtatgtaacaaatcgggttcaaacgatccacatatgatcattgtttatatttcgagaattttgagcaatctatatagctgtgtttttattgctctatgtggacgataagctcatcatgagcaaaggtaaattcgtgatcaaaagtatcaaaacaaagcttaaaagagaatttgagatgaaggggcttggatcagttcaaaagatacttgatattgaagttttaaggaatagtaaggaaggaacagccaacttaaagtaatttgtgtatattaagaaatttatttagaagtcaacatcaaagatgcaaagagcgcattccatctgttaggcagatagtttgttttgtcgaaggaatagtgcccgagtagagcaaaagagaaagaagaaataaaggatgtaccctatgtagggctaaatattaagcgagtttgtcggttttcaggttcaaaaaattgtacctgaacctagcccgtcaatttaaaaagttccaaactatattatataatatattatatactgtttttaaatatattatatatgtaataaaaataaaggtttagattttagggttttttaatttttgatatattatatatgtaataaaaaattaaattttggtcgggttggcaggccagtttgggtccaactgaaatgcgatggctatagaaaatcaatccatgaacccacccaaaagtgtaccgcgttaaaccctatccgcccgaacataattagtttttaaattttacgggttaaccaggtcgaatctggacgggttggacgggtttgggtcaaacctggtcaaaatgttcaatcctaacctatgcagtgattttaggagatgcttatgtatgtgatggtgagcaccagaccaaacatagctcatactctaagcatcctaggtcaattcatgtctaatctgggcattgaacattagaaaactcttaaatggttattaaggtaattaaatggcacttgggactatggtctaatctatgaaaaagtaaaaggagaactagaattgaaaggattcgtaggcattgactatactttgaatagagatacgagaaaattaatcatttcttacactttcatgacaaaccggaactgtatatattagaaggcccaattataatctgtggttaccctttccactacagaagcagaattcatggctactacagaagcattgaaggaagcattatggcttcggggaattctatttgaattgaaacaaataaaggtggagtgattgtgtactc

SEQ ID NO: 317276 - DNA, 1334 bp, Cannabis indica
ttttaactttttaatttttaattgagaattaaaattttaaaaacaaaaaaaaatcactttcaatatttttttaaatagttttttctttcttaatcaatatcttggacttcaatgagacccggacccgaatccccccacggccctggcgctgaacccgacctctgacttgaacccaaatccgaccccagacctagaccccacgtaaataaaatcaaaaaaatgaaaatgaaagtgaattttacagaacacacttttattttatgtttttaaaattaaaaaacaaaagtggttatagaacgcatttttatttttcaaaagtaaaatttttaaaaacaaaaaatttacattcattttgtgattaaaaaattagaaaacaaaattattatcaaacggcacctaaataaacaaaacaaaacaaatctaccggccgtgaacaaatttgatggggtgaataaaaagtgaactatattggcgtatattgtacacatggattaaatgtgaaagtattgagccatatataagaacatgggttactccactcatcaccaattggttttgagatggaaccccatgttcttatatatatagaacaatactttcacatttaaactatgtgggacaatatataatatcccccctcaagatggtggccaatcttaaatcatcttatcataagtagccaatttcctcgcttatttttttgttctgcagctgggagttccatttgctcacttattcttgttcgcggctgggagtaccattttgcttgcttgcggctaactaactctttgataggtgtggatcgaaagcccgcttgggatatggctctgataccatgttgggaatcgtggggttcaatctcaaaactaattggtgatgggtggagtagctcatattcttatgtatggctcaatacttttacatttaatctatgtgggacaatatactccaataaactatagtattgttagggattagtgttcttcaattatgaaatgatagtttttttttagtctgaaatggttttttagtctgaaatggaatgatattttattattaaataacaaaaattaataatatgtttttatccatatattgtagttgttttagaaaatttttaattgagtactaaaaaaagtagtatatggttatatttagcatattgaagaaaacttacaattctattgttgttctaaacagggtgctaaatttggcgcatgtaaatttgtgttaaatttgaattcgcaataaatgtgactttttttatttattatattatcactaattattatgattaatagactattaccaaatattattttttatttatcatg

SEQ ID NO: 317277 - DNA, 570 bp, Cannabis indica
atattgaattaatgaatttttaagtaaaaaaaatattataataaaaaattaaaaaaagagaaaaaatgtcttgtgtccattgtatatgttgaccgcattacatatacacatgtggcaaaaccactcaaatagacaaccccattagagattagagatgctctaagccattacctttcaggattaaaaagaggaaagacaattaaatggttaccattattaagttgtttgtttttttgttcctgatgaatttagccaaaatcatctgcttgactacatattgagcagaaaatgatcattgcctttattcaagaaggttcaaacattgacagctctgttagacatttatatgtataatataaaatatatgtatgtgtatataacatgcggaataaataaacatatacactatatgaatataaggatcgaaatacctccagccattgattctttgagcattaatcccacataagcttgatctgcaaaagaaaccgattgatgtgggtaatcgggcttcctcgctctctcaactctctttagatggattttgctgttatgaacagaatgagtgag

SEQ ID NO: 317278 - DNA, 700 bp, Cannabis indica
aaaaataattataattattagaacttgaatatctagataaaaaatatttattattgttattatcattaaattatagcgatattttaccttctatactttttaacataccattttaattattgggctttttaatgtaacatactttcgtgcttaaactcatattttttgtatcgtatcatgcttaagtttatatttttttatatcgagtcgtgctcgtaccgtataaaaaagcctgatccgtatttacaagactgaggttgtatttccctccctttccttatgatgtccatgtatggttttaattggtggatatagtctacactcgtgtagcggacttggccttggtttgtcattatttcatcatctatgttatcctatatgaatgataattcatttttaacacactagtctatttatggtaactaagacagagttgatcactcacgtgcaaagtacagaaaaatacaatgaataaaataataaaaaatgcaaaaaatcaattagaaagtggtacaaaataaaaaagtgatataaatcgttagattataaatataggaagggcttttttcagttttaaccaaaaaataactatattacaaaaatactttcagctccaaataaacaaatatacaacacagataaatttttttacacaaataccacttacacacacattcaactcaagatctatgcttcctgg

SEQ ID NO: 317279 - DNA, 726 bp, Cannabis indica
catgattttttcccatatttgtaagtaagttttttttttttaaaaatgccatatttaaggtaattaaatttttatgtcatatatatcaaaacatatctttattttcccatatttttgtaaatatttttcttttttgttttattaaaaagaaagtctcattatgtttacaaatttttgtattgatttcagtatatatttggttacttggtaacatacatagataccgtatatatatatacaaatatatatatatataatatatttattgatatttacaaccaattaaaattcatactattaaaaattcatgccatacttattattattgggaaaaaaatcataacaaaaagtataagagttaggccaatttagtacagctgtgctgtagaaaaaaatagttataactgtgttgtaaaaaaaaaaaaacagctgcaacagaattatgcaaaaaaaattgagcagtgttaagtaaattataaattttaaagtgctgtgagttgttaaggttctcagagtatttaataaattataaattttaaagtattgtgtgttgttaagattttattataatgataatgataatgttataatctagttcattgtaaccacaaatatacaaaaacttatgttatataattttcttttatatatttttaattattttcttctaaaagtataaatttatatgtttttgataaaaataaattataatacttttaaattata

SEQ ID NO: 317280 - DNA, 3705 bp, Cannabis indica
tccgaaaaacaaccctaaactcaaaccctaatttttttttattttttattatttttttttaagaaccctagtttcgaatttcgaatcacaatgctctgataccatgtagaaaatagtgattcgaattgtgtatcgatttcatagaataatacacatttatatacaaagctaagagactaaatatctactaaatatctaattcttttacagctaatatacatctaatatctaacactgttcatgatcaaataatattttggcattatagacttggccatcttagtttttcgtatttaaaacatatgtttatagtattatttaagaaattgatttctttatcttttcaatgtgaaacttgtttatttgctaagagccaacaaaaatcttatgctagaaattcttatcgatcttccaaacttttttatttgtttcatagtgatgtttagggaccttcaaaggttactacaagtttggaaaaaaaatagtttgttaattttatagacaaccatactcatgtttgttgggtttatttaatgtgtgagaaatttgaagttgaacaaattttcatagattttttagaataattgaaaactaatttcaaactagaatcaatattttatgaactgattatggggctgagtattttaataatatcttggggacatttgtaaaagaaaatgatattttacatcaatctacttgtctgaattttcctgaacaaaatggagtggctgaatgaaaaaaataaacacttattagaagcttctcgtgctatgatgttttatatgaatataccaaaatatttgattgggggtgccattcttactgcatcatatttagttaagggataattacataaggtaccattttttttgtaaaaaaatatatatttttacgtttaaagatttttttttacatttttacggtttttcatagaaataacacgaaaacaacaaaaaactacatgaaagtaacacgaaaataacatctaaataacaacaaaatataacatacaaataataaaaaatcaacaacaaattaacaagagtacaacataaaaaaaaaatcgtatcttttgtaaataaaataaaaaaaatacgtaaaaatatttaaaattccgtgaaaccttattattgtaatttttttgttgtttttgtgtatttgtgaaataatccctttaattaatggagtttccactacggttttaaattacatcactcctttggcatatttgaaattttttttccttcatctagaattaattctgtcttgcttctaatttttttttgttgtacagcttatgtccatcttcctaagagatctagatcaaaattagatccaagacttgaaaagtgtattttgtgctattctcctaacaaaaaaaggtaataaatattttaatcctattactaaacgggtttacactactatggatgtttatttcttagaaaatacctatatttttccaaaaatttgatttttggaagttatgtagccattaccaaaaataattactgatgtttcagtaagggaaactcaaccccaccctataaatatcaaatctgagcttggtttgtcagaaaaagaaatactacgattaattaaaagcgtaataaccttgagcttatggtttattcaaggaaaaatatctttgaaaaaaataaagatcatcaaatcatcccggcacacgatcaattgaatgccctcaatgatggttcaacaagtactgaaggtaattatgttcccactgctcattcatctaccattaatactattctgacagttgtttctgaaccaattccagtcacatctgacttagatgatctttccattgcacttagaaaaggaactcgtaattatactatatatcctactaccaaacacatatcatatgatcatttatctaaaacttatagagcatttaccactaacattttagagcttgttgtgcctagaaacatacatgaagcattaggtgaactgaggtagaacatggatgtgtgaggatatgagtactttgaaaaagaatgggacttgggtagcagttaaattaccaaagggaaagaaaattgtaggttgtaaatgggtgtttacaataaagattaattctgatggtagtattgagaggtacaaagctagattcgtggcaaaaggttacactcaaacctatggaatagactatcaagagatgtttgctcctgctgcaaaaatcaattctattcggctgttgttgtcattagtcaattccaattggcaattacatcagcttgatgtgaagaatacatttctcaatggagatcttgaagaagaagtatatatgagtcctccatcgggtttacaaaaacactttggctttggcaatgtttgtaagttaaaaaaattattgtatgatctcaagcagtccactagagcttggtttgaatgatttggtaaggtagtaaagcttcatgggtgcgtacaaagtcaagccagtcacactatgttttacaaacactcaacagaaggaaaggtagccattcttatattatatggtgatgatattgtacttactggtgatgattctcatgagttagagagactaaaagagaagcttagtgaagactttgaaatcaaagatttaggtgttctaaaatactttcttggaatgatttcgcttgatccaaggctgatatttttgtaattcagtgaatgtatgttctggatttattaagtgagataggtatgctaggttgcaaacctactaagactcctattaaacccaacgtcaaattatagcctacagaattagttaatgtgaaggttttaaaaaatttgttggaagacttatctatttatcccacactcgtcttgatatagcattttctgtgagtatggttagtcaatttatgcattcatcaggttcagaacactttgatgttgtctacagaattctaagatatctcaaagggacactaagaagaggccccttatttaagacatagggacatttgaaaattgaatcttatattgatgctaattaggctagaagcataatagatcgtaggtctaccacatgctactggacatttgtaggtggtaatatagtcacatggtgcaacaagaagcaaaatgttgtaggaagaattaatgttaaagctgatttggaaacaaatttactgagtgttgcaatccttccagtcaaattttgaacatccttgtgttttctaagtgatggaatatctagaagagctttgatcttctctagcttcgtctcaatgtctcgagagctaactatgaaacccatgaatttccctgaagaaactccaaaagtgcatttctttggatttagtttcattccatattcctcgataatggaaaaagcttcttctaaatcttcgtgatggctcatggaagtctttgatttcacaagcatatcatcaacgtagactttcatgttcttccctagtaaattcttgaacatttttttaaccattcattggtaggtagctccgacgttcttcaattcaaagggcatgaccttgtagcaatatatacctttgtcagtttgaaagcttgtatgctcttagtcaatcacgtacattttgattttattgtaaccagagtatgcatccatgaagcttaagagttcataccccaaagttgcattgaccatttgatcaattaacaaaagtggaaagcagtcctttggacaagctttgtttagat

SEQ ID NO: 317281 - DNA, 1383 bp, Cannabis indica
ccaaacccgaaggagagaaagagatccaggttcagattttgataatgctttgctacaaaaaggaatcaagggctagagatcttgaacggaaggattcatattattccgctgtaatcaatgtaaagttttcttaaactcttatgtgtttattttattgttttagagaattcatatttaggatgttaattcgtacatacttgttagtaaatctagatcctggtaaaatattcccaacaggtttcaatctatcccatagcatggcattctcatatcactgctgtctatacctaatgagatacaccaccaagtacatcacctatcaaggtgagcccgtatatcatatttatggaatcatcacattatcattgattagtcaatcaatctttttattatataacattaataaccatattttgatctcaatatcaatcaattctcaataacattaattgtattgcaatataacatgctatgcagtacaatagacatttcttacctttgatctagatccatacatatcggccaacctaagtggagaaatatccccgatgatctcggccctatgtcacaacggtaaactaataagtgtttatcccaaaacattacttattagttgcaaaggataacttagggtttcctacaaaaccccatcgtaaaaatacactaaaataaaattatattttggctctaaaacatacaccatatggtagatctaatcacaagcttcgaaacggtatatagaacttccaaaacaaacaccggagtaaaaagttatggcaaaaatacgattctcgatttcttgagactgcctggaaacagtgaaccggttgggaaacggttaaccgcttccaccagaactggttaactggctcacaactagtagagcggttgggcaggggacaaaaagtggcaatttccaaattttgcactcactgaaacttgtccaaattactccaaacttcatatggtacatatatataacctaaagatataacctagctgacccatttgttagactttgtgccctaaataaaactctatatttcaaatgtaatcatttctattcaattatcaataaagaaaaagttttactttcataacttacttaatgtgttatttggttcatgtgattatttatttatttatttgatttataaattcatccaaatccttatattattgtttattgtgttgtcaacacagtgaaaagtaatcaagattgtgtgattaaatgtatttctatgatttatcagtacacatgatttaattgataggataatctacgatgtagtttacttgcaccttggataagtgttatgtctttccagggtattggttaaagtacgtttgggttggatgtatgtagtatgcatcagaagggac

SEQ ID NO: 317282 - DNA, 2048 bp, Cannabis indica
tgaggctagctcaagtggacatagaaaggtgcatgtgtgttggagtctttgagttcgagtcgcaagttatacattgtaatatataaacacttaattcacaaaaaaaaaaagtacttaaaagtctaagtatagtaaaaatttagaacacaaaataagtatttatctaaaattaaaagtctaagtctagaatctagctagtacaaatattatgtcaatttcgctagtcgttgatgttgcaatggtcgcaagtacctctcctcattgtaagtaacttacttttcaaactgcaaaattaaaatacatattattacttaattacaagttagtgtaatttattagttacgtacatacataaataaattaattatccactaattcatttaaaatagcatatctaagttggaggagtgctaattacaacctcctattacaatctcttagtcaacctccacgtccgaagtcacatgccgaaacttcaaacgtattttcggtactgtaaactattcgaaaattttcaatttttttttcatagcggtattcattgtgaaagtactttaattttttttattattattattttctttcttaattcccattataaaagtaattttcttccattgtaaaagtaaccttaatcctttttaaaagtttgactcttaactttttaattacctcatgatcgtagaaaaatatatctagcaagttactaattaggagagttcttgatctttataacaaacttaataaacatattattaatcatgtcaattaatcaagtcttagattcatctcaattaggtgataaaattcttacttgaccaaattatacaaaatattataccatttagagaaattcaaagacaagaaaggtaactataatgaaataacttaaatcaaaaaatttatcttaattctaccgaaattttagtaacataacggcaataaattggacattcttgaaaaaattacacatacatatataacaatctagaacaacaaaaatgaatttatatccattcaatcgcaatgcatatatttacagaacttactttattacggatgaatatttaagttattcaaattcctctaacatgcatatatattacactcatctgactgcagtatatttattcacaaaacctacttcactataaatgaatatttaagatattcaaactcatctaatatgcttattcataataaattcaaacaaattaaaagttagaaaaggtatacctctagctagctagctagaaacccaatcaacacttgccaaaaatcatgttctccccccaattaaaatcattgatgcttaactttaaaacctacaaacaattctaattatttaaaaatttcaaagaaagaaaattgttacttgtacttaccaaattcatgtaactactagtcactagttatttaataaatgattactagttacaaagtttatgtaactagttagttactagttctttaataaagtttatattaacattcatattccattctaactaataaaaattatatatcttctaaaatcaagcaaaaaagagaaatattttaaactctttttactaatgtttgttttacatagacaaaattatttcatttctttatttttattttcctttgattttggatttctaagtttaggatatacaatattagtttgcccttaaagttaatttcataaattaataggaattattattcgtatttctaagtacgcatgtgacacatggtatataatggaagagattagcttaataataccctaattaaagtcttccactacgatcctgtcatgaagaagcctcctggaatcgagaggaggtcaagattaaaaagtacacaaaagtatacttggctctatcttggcttcccagacgcagagggtatattacttctctcagacccagaggagtctaaacatggaagcctgcccaactgatacccgagtggatactcgaagagcctaatgaggatgtcaaccgccttggagtgtcgcggatatctaccttttttgcacgccagatcaccaagtgatggtt

SEQ ID NO: 317283 - DNA, 1018 bp, Cannabis indica
cataggtagtcccaggcctacattatctaaaaattactacacaattgctgccttcaattcacttgggattctagacaatactcataagttgttcaacctttgctaacgctagatcacttctaaacaaaagcatttttttattttaatcaataagatcaatgcctctattaactactcaagccctatattctacttaggaatactaacaaatttaattgatgttgtaatttttctaatctttttaccgtgttagatgaactacgactacataacatatatacacagtccatttagatcttttgatgttcccctattgagagtacaatatttaataccaatggaacttataatattgcccataaattctaacttgagtcgaccgaaggatcgatatttgggtccccttgaatcataactggcacttgggaaggacccgtacacttttctcctttaacatcagtctttcttaactacaggtcggttcttttcacatgactcactaccccacaataaaacaagatttggctctacattaactcaaatagctccttttttcatcttgaacactaagaataaggtcgccatctcttattgtcacattgatcactattttgttaaccttggaacgtttttgttcttccctataattagtggttcatttagtttttgctccctgatttgctcgtaagttagttctataagttttaccacatctagttgcacaacaagacgtattggtggtacaggaatagacacaagatgggcctgttattctctcagatttcagatctgcttccccttgttgtctaatcatatcatgcacaaaaaaatttaaatgcttctattattactgcaaaaaaggattatcttccttaccatttaccccgagctgaaatagctcgctaatcagactattcgattgcccttactacataacttctcacacatttagtcaacatcttctaaccatttagaactcagacggatatcaatatcaatatgcatataccatacacat

SEQ ID NO: 317284 - DNA, 569 bp, Cannabis indica
aattttttgtaagtcaaaataattgagattcatacccaatcagcgccgaccaatgtaatgtcccccaacagtacaatgttaatcccatccaatttttcataaacacgcatgttatgacacaggtattgggtgagtggtcacaccacttgagagagaggaatagaccggttaccgagatttagggtcggggccaagagggcaactcctagggaaggtccctctggacaacctattgtcacccaagagggagatgaggctctgaagcgaagggtggaagagcagaaagcacgaaacaagtggcagcaacaaatgattaacttagaatcaaatcatgagcaagtttcaacaacaaatgatgcatctgaccgacgccgttccaagattcaacatgcacctgatgccttcggttccacagattccaccatttcagcttcctagcgttgtgttttcttcacagactgtccctcttgatgatgacgatggcgacgatgacgctgtggacttatagttttatttattagtttgcaatgtaaacactactacaatattagcctttagaggcagttttt

SEQ ID NO: 317285 - DNA, 918 bp, Cannabis indica
aaaaaaaaaattgagtttttatattatgtgcaaatttattaacttcctttttgagatataactcaatctattcaaagaaacttatccattttcaaaaaaaaaaaaaaaactcacgataactttagaaaattgatttgaaagatcaactaataaagaattagtaattgaaaactcgacaaaacgatgtgttaatctcataatttaaatatatatggtcaatatagatccatgctttacggaaaaaatattgtcatattagtcttctacaaaaatataaagatgtctattttcttcttaattttcaaaatattagtatatttttttattatcattttataaattattctacctcagaaaatgaattaaagtccaaatattatgggcaatgtttagagatcaaactttcaaatttaaaaggaaaagaaagagtttttctaaagaaaaaaattagaattgaaaagtttgagattcaactattatgcttgttgcatttttctgatttagaaggaatagacaatattattccatcgaaatttattaatttagtctcattatatcaaaataggaagtatttaataattatataatgtaattataactcaattcaagttccatggagagttgtaaaaattataattgagactttttaattagtacaattacagtgtaattacatagccaaacatataaaattgtggattgtattcaattttaattctctcttggtatttcaaatgtgtcttttgtatttatacaaaaagtattattatattttatattaacgggtattatgtacccatgaatatgtaatattagaaaaatttaaggttttatacttaatttttttttttatttcaatagaaaaatttctcatttttacattatatgggctatggttgttccatcacttaaaaaaaa

SEQ ID NO: 317286 - DNA, 614 bp, Cannabis indica
ttttttttcttaattttttatttctttaataaatattaatattaactaattaagaaactttttaattaaactactttaaattttgattaaatcttttatttatatatttaaatcatttttatttttatatatgcattgtatctatttattcatttttttttttataattttaccatcatttattattgataaatgaaggaaaaaaaaaatctaccgaacacttagtaacataataccttataagattaataaatagttaaaaataaacaaatatataaaaaaacgaatatccataactaactcacaataataataataaaataaaactctaatcctataaatatatcttacctaatatataaaatgattatgtaacattttttgttatgtctttttaaacagtttgttgtctatttaatagaatatactcaaaaataagttaactttaacaaacatttacatacacaactaaaaaaaaattcaattcatgttataaaataatataaagtagatgaaaagaaagaagtagaagatgaagagagaaagagaaaagtgaatgaaaaatttttgagttatttattctaatggggtgaacccctatttatacaaataca

SEQ ID NO: 317287 - DNA, 519 bp, Cannabis indica
gaccattttacccctaggcttgtaggttacttaagttgtaagtaagaacattttgggtattttattattggttttaggtagctggtttgttgtttgacgctagccactaagtttttcttcagcttaagtttagtattgattaattagattaatcaaaaataaaagaaaaaagaaagaaattaaaagccaaactttgcttctctaccttcaccattttcgaacccagcagaaaaccaacaacaaacctaaaacttttgagtaatcttgaggagttctaactgaaatcaagtagaataatcctaaggtaagagccctaatttcttcttgttagttttcaagttgttttgttagttcaagcatgtaaaatttgttgttttgctagtgttcgaattagggttagtgcttgatggttttttagtgtttagagatgatgttttaggcatgattcttgtggttttggtgcctaattcttgggttgagcaagtttgagttcaaagaactcaaacttggctcaataat

SEQ ID NO: 317288 - DNA, 1819 bp, Cannabis indica
ctataccctaggtatcttagggggttaggtgaatataatcctttatcccttcttgactgatgtgatccctcataaagtagctgtcactaggcttattaatcatagcgtaatagctgcagaaaggggagttatgccgtcagacttaatacttatggcagttccaatacgccttctctcatgcggcattaaatgcaaggtgactgttcagatggggtctgatacctcctggaggtgctttgctatagctttgccctccgggagtacgcggacccctcataccttctccgggaggtatttttcttgctgatcctcttggtttaaaaagacttagtcaaattatctcaaaaccatattcctcaaatccacgtgtcgtagtcgcattggcccacgtattttgggcaaaattaagggcaacactaataaatatttaaattattattatttttattatcaaatatatgatttttaacatggtgtgctttcataatagattattcatgcttacgtgtgatgccttttagacttgtcatgacatgtcgtgcttaagactatattttcgtaccatatcgtgcttaagcccatattttttgtgtcgtgtcgtgtccaggtccatatttttttcgtgcctagtcgtgctcgtgcctcttgggctcgtatcctacattgaagtgcagaccaatctgtaaggtgtgagagacgatgtcaggtgcagaatcttccctactacacaaacaggtctagcccaacggtggtaccttaagctttcgcttggatcaatcgactcatgggaagatctagtagatgcttttggcaaccagttcactccttttcgacaatgccagattgagcctaatgatttggtggatgtcaagaaataagaagacgggcccctcaaggactatatccaacagttcttagaggaagtcgttgagaccaaaagtcttagcgaggacgcaaaggttgtggcactcgtagccaggctcaaagagatgagtcctttgtggtttgactttcgtctcaaggtggtatacaaaatgaatgacttcttaaatagagaagatgacttaatcaaacttgaagaagtcatcacccgagccaaaggctcaaagggtggtaagaaaaagtcaccagactctgaagcccctgttactgaggcccagagcaatgggaaaaaaggaggttcaacataggaaagagagccaacaatggtggcaaacaaagtaactcgagaatatgagccttgtttcaccacctaatccattctcttggcttcaagagaggagatctatataactacacagtcaacagtgtcatatcgcaaacctcttcccttcaatgagtcagagaagagggacatgaacaaatttgttgctaccacaataattatggtcatgatgctaatgagtgtaatcagttgcaagacaagatagaatttttcatcatacagaagcatgatgctcttcaccggtatgtacgacttgaagctccaactgggggcaatgcacctcttcagcctgtgctaattgcaggtaggctagaaattgggattggaggccctcacatagctagaaattcaaggaaggccttagaaaagtattcaagatcactccaacatgaaccaagagtcgaagtcttggaggtggtagattgccctccaaagtctcaacgctacggatgtgaacctatcactctcaaagaatcggacttatatcatgtcagctaccttcacatcgatcttttagttgttgaggttcatatagataatatgatggtggccagggtgatgatcgatgtgttgggaattattttaccaggatct

SEQ ID NO: 317289 - DNA, 700 bp, Cannabis indica
tagatcatttggtagaggcaggatattcccctcgtaaatatatatcagtgacgacattatcatcactgatgttggacattaattaattactaaactataattcttgccttccccattaactattctcactctgaaaaacactcaatttctcattaaaaattgacagttagaccaccacctcaccctatcgacttctcctccatagccttccattttgattctcgactccatggtaaacaccacgaccttctttgtcgaaaaaaactaaggcaaggttacgataaggtaacttctttcatctctatatatattttttactttctctttcttggaaggctactcgttctcattctcagctctcacacactttaattattttctagttttgcttgaataattttagcgaagccaagtgttagaataatatgaatctaaattcatataaacaattctatatatatgctgaataaatttatagattgaacatatacaaaataaggatcgaatatgtgtacctccaaccattgataaatgtcactctatttcttcataccattgagaatttctcctagtttaccaaactcacccaaaaactcacgtctctaactaaaaattaccatctataatttatttttgtacactctttgatagaattcacttcttgtaacaccctaactaatttaggcgtattacgtgattt

SEQ ID NO: 317290 - DNA, 1147 bp, Cannabis indica
attgatttgattctacacatttattcaaaacttcacacaaatcaaagcttcgtaatcgatcaagatcgcacaataatgattctttccacttcaatcttgaagaaattttaaaggtcattattagcaagatttgaattggagaagttcgatggaactggggactttgcgctatggagagaaagtctgaaaggaatcctagtgcactagaaagtctctaaggttcttggagacgagaagttattggcagaaaaaaactagaggaaaacattgaaatagaggagatgacgtactacactatcatcatgtatctatcaaacagtgtttaaaaaaaactcattgcagagaaaatgacaaaaggagtttgagataaatttgaagaatagtacttaaagccttcaattgctagcaaggttaatttgctagaaaggttatacagttttagaatgatttcgtccctttttttatatgagagtattgatagatttaatgagattattgtaggtttggctaacataaatcacaaggttgatgaagaaagccaggccatcatcttgttgagatcacttccaattgcatatcaagaaattaaggtagccatcaagtatggtagggatgttattgcattggaagatgttcttgtcgcacttaagtcaaaagattttgaattatagttggagaaggaatccaagaaagaagaagtatattcgacaagaggaagatcaaccaagaaagcaagttcgaagagtaaacaccataactctcaatcaagatcgaagtaaagaaagtgttacttgtgtggaaagtctaaacccttgtaaagattttgtaagaagtacaaggagtaacaaggcttcaacaaatctcacaaagaaaataggaagtacttccgaaaccatcatcataggcaagactctgttgcaatcactaaagatcatgacgactgctctacgaacaaagaattcttctctatctccgagtcctcaatgaacagggagtggcttctctattccgaaggcacttatcacatgtatccaaattgagagttattttttgattataagtcagttgatggaggtaaagttctaatggaaaatatgttgggttttatgccctaaataaaactccatttcaatgtaatctattttat

SEQ ID NO: 317291 - DNA, 1037 bp, Cannabis indica
attattcttcatcaaactctagagtatactgagccaaactgtgtgcatctatattggcactacgtttgatatgagcaatggtaactctaagaaaaaagaataaaaaacttgaaatgtctacaattaaatcatgaaaagatgaaactaaagtgtgtgacttattcaaagcatttaaaactatcaatgcatccatattaatttgtccaatagacaaatgtagttgaagcatccaatttagactatgatagatggaatttgcctccatctcatgcgattctaagttttcgataatcagttttctatagagcaaccacaacacaactaggaacatttcgaataattgtactaataccactgatacttcttctagcatttaaagcaccatccacgttcactttatagtatcgaattgcgtcttaaataagtggcgaccttattttgagtgactagacttgattataaaattagtgatgaaataactttgatgtaacatttagcatgataaggtcttctttagtgatgtaatttagggcttcttaaagttggtgaatagaaccatgtcactaaagttggatccgagaaactagtcaccaaaaacaagtgatattaggacatctttaatgggatcaacaaaaatggttgtccaaataacctcacgtgacacacttttaaacttttaaccaattataattttttttgggtaaatactattttgtattctgtattttacaaaagttaccgattggtctctctttttgttaaatgacaaaatagaccatgtatgtaaagaccgcatatgattaatattttgaattattaaataattagggtttatgtatgagattttattattatcaataatattatgattatggaaatttatttgagtgcatatatatttattattatgctgtctatgtaatttctcaatttctgtgattgtgttcggaagctgtggaaagcgacgttgggccatagagagtcgcattttataatttagaatttattcgggaaatcattgctaagttttagcggag

SEQ ID NO: 317292 - DNA, 582 bp, Cannabis indica
tgaactggacagatattctaatataaagtatacatacatctttacaattttattattattattattatttatttattatttttttaatgatttatgatgtgaaggccttaaaggaaatctatatatgccgcacacgttttctatcaacaaaacaaaaacaaaaatttaaatttattatatgaaaatttatttttaattgtttttgaattttaaaagagtaatttgtggtcaagcttttaggaatgataatttgtatttgcggttcgtgttgtgttaaagtttaggtattataagtaaatgttaaatacaaatttgatttatttattaattgtgtcaaaaattaaaaattaaactcaattcgtttataaagagttgattcgacctgtttatataaataattatgtttaattttagttaaattatcaatttattaatatatttataagaaatttaacatgtttagtgtttataatcttctcatgacatatttctaagcatttcaacatgtttatatgtcctataactataaaatgtaataaatataataaatttaagaatgtatatttttatatgtcattttcg

SEQ ID NO: 317293 - DNA, 1178 bp, Cannabis indica
attaaatgcgagatgactgctcagaggaagcctgacaccacccagagatgctttgatgccatcctgctctccgggagcatatgagaccttgcatgccttctccaggaggcatatccaaaataatgctttgctttataaagacttagctatttaattcaaacgctaaatcctctccttccacgtgtcattgtacgattggtccacgtattttgggcaaaatcagaggcaatagtataatataaaaatatgatgtataatctaatttaatataatacgagctaaaatgacgttccaaacaagcttttaataaatattaaattaccgttaaaactttccaccttaaattataattaatggtattaatttatgagcatgtaataaaaatattaacaaatttaaattttatattggtaatataaagtcaatatattagaaagagagcttatttttcattgagtagaatcaccattacttatggcaaaaaaaaatcttaaattaaattcaatataaaattgaatattctattatgccacctcaacaaattgactttttaaaattattagaaacttgttaactaatccatatattcattctacataaaatgttgctatgtaatataattcttgattttttatttaactttaataaaatatcccaattaattaatataatattctttattaattttataatattattatatatatatttaaaaataaaaattatgtagatattttattaattatgtagatagttaaagactaacaaataaatcaattaaaaaaactttaaaagtattaaactaatgtataacatataaataaatcgaagtaataataaaatatctgttgtatatatgaaatttattgactattaaacgtaacatcaaattaattattggatttgaatcatttactttacttgaatatcattaacaaagattttaaatatatatcatcaacaaattaacaaatatatgaatgtgatagttattagttttggtatgtttttattttaggttgaataatagattgttaatacttaaatttttattggtaagatgtatgattaatagtcattgatttatatgatttagattagaaatctatcaatcattgtgctctttttctattttatttttttatttgtacatataaaatatgtatatataatcacat

SEQ ID NO: 317294 - DNA, 1092 bp, Cannabis indica
gtgttagtatactttatcgcttattatcacatcagtgaaagggaaattatctttttcggcatataatcacaattaccttccactgtgttgacatcactgtaattgtgaataactatatgttctggacttaacagattttgtacacattaaaccataaacatgaaaactacatgtaaacacaaatgacttctaatcttctattaataatatatcaaattatattgaaatgtgttttatttagggcataaaatcccaacagcaacttgggagttggagtcacatatgcgggaccaatatcccaagctatttaggtaactttcaaggacaaaatttttataaggaggggatagttgtaatatcccgaaaattaatacagtattgaagtggacatattttattaaatatgtaattattttggtattgaaataagattatgatcttacttagagtaattagggtgaatttattaaatgatttaattaagcgtaatttattaataacgaagattattttagagtatgtgggtatcgtggataccatttctgaaattaaatgttttcgggcccgacgatcgtggaagctcggcggagtggttagaaatgtcacaaaaataaaggatggattattttaaaaatattttggactagtttagaattttgggttgtcgagttggcggaatagttagaattaccaaaatggtcttttattaattattaggttattttgccctaagtgaaattttctaggctaagatgaggattaatattgaatatatgtttaagttaaattaagtgttatttttgaaggaaataagatataacctagaaattcaagaaaaatagcataacatagctctttctctctctctctctctctttcctccggctcaagggaacccagaagcaaaatttgagattttcttcaattctctgtttaattcttgtagcaaacagtcttacattcaacctagaatcttgaggtaagtcttcttcttatgttaatggtgattttctaggttttttaagctaggttttgttagttgtctagggttttttggactgtaggtttagattcttgggttttatgccctaa

SEQ ID NO: 317295 - DNA, 2445 bp, Cannabis indica
acaaaaccattttggatggaccaaatccaccatgaacgatggagcaacaaagggatgcatgccactagagtttcactagaaccaggagagagaaagccatcatttgtcgttttgttttctttgttttttagattttaatttaatttatttttcatcttagtataagttgtactatttaaattattataaattttaaagattgttcaaatagttacttagactattattaaaaaaaagtttattaaacatgtaataaaatatttaaattttattttagtattagtaaataaaaaaaattaaaaaattacatggagttctaaataattagagcgtatataattatagaagttttttttttaaaaaaaaacctaaaagatagataaaaatgtgtacaagttttttttttggaggattaaaattacttttattggctagtttagaactcatattaatttaaacgtaaataaagggaaataaaagtagaaaaaaaaaagatttttcaaggaaaaaaagtatcaaagaaggtagaaaagaagaatttggagtatcattgttgggctgcctccaccaaggtggatgcaaatttatctgcatttcaaagtacttaatatgagacagaggatcttctttgcctatatacatcttctatgtgggcattttaaacatgtgcaagagttcaagggcgttgatgtgaggtgaaaagggtgatccccttctccagtcaagttctaggtcggtgagttttgggttggtcagcctttggactaggctcttaagttgatctatttgggcttgcaccacttgatcaacttgacctacctgttgaccaacctatgtcacatgtggaccccttagagcattaccaggcatgtaattgtctacattgattggttgggtgttaggagggattgcttgtctgtcccgactttctcttatgtgatttaaatcttcccttagatcatgtacggatcccaatctattgaagactgattcatttaggggtcttctgatatgggcattgtgaatagtatagatgtataaggacagaagttatactaaccatctcctctaagattacggttagacagaaccagctcgtctactgtgttgcccatagttgaattttgtggcctcggattgaacaatttgttaacttggatttcatgggagtagttggtcagatgtttctctggctcatatcccgacttgtatgggttatgtggatatttcccccctttttgtatcccgtatgagtggggtgtcatcaactggtatccaaccagttaaccaatatgcctgagttatcagctcggttgcctatctaaatggttgtcaattggcactttttatacccaaatgtcggattcataattgcttagtcatggtgaagggtgttggtatgatgttgcacccaacccagggcctctaattcattatcatcaccaatgtctgcctgagaccctccagttggtggacctccaacacgtgtcacttggaaacctggacgggtggtaccatcctcggtatgtcatctgacctgttgagtagggacccattggaggttgaggaatggttggattgggatccgtcctcactggatctctttgatttgctagagtctgcacaataggatctgtagctatgggattagttgttttagtcggattttctctccttgtagtcacaaccatctttgtgtgttttgaagagaatcgaaacaacgatcgtgttcttttgctctcaatgaaagcaccaaaatattggcctcgcttttagccaacgacactgagttaattaaaatgattagaataaatgttaattgctatataaaattaaggaataagaacacaaatatttatagaggtttggcatgtgattgttgtaatagcctactctcctttttgttgtattacttgtgagaaaagaagtaaggagttcttgatatctctcaaaagcttataatttttaaaacataagagatctcttcaacaattgattttggatccctaaatagagaaataacttcactatctatagggaagaattagcttaattaggtttcccaaacaaatgtaaaacaataaagcaaaaataggaatgtttcccattttacaacaacacgtgcgaaaatcccattaaaatataaattaaattaataaaataaataaggaaagtatctctaaaaacattccaattgttggacgataccatttaccccgtcctgatgctctagcttaatcgtcaaataaactatttccaagggataactcactctggacgacatatcgaggatggcaccacccgtccaggttttaaaatattcacgtgtcactcagattgatgtcatgtcatcctatgcaaaatttgggatggcagtttccaagatagaaacatccaccactagtactttttctatcatctgcattacctgcccaatcagtatca

SEQ ID NO: 317296 - DNA, 981 bp, Cannabis indica
ttgtttattaatttttgataaacgtgttaatctaactaaagaaatccctaaaaaaatcttaaaaaatcatgtatagtttagcttttatgtattttttagttaatattaaaactcaaacgttgaaataaaaataatatttatgatgtctattcatagtctaaactatcttttttttaactaaggtgacaaatagctaaataaattgtgaataattaaattactataataatctagtttaaaataatttacatacctaagaattttgattttgttatttttttagctaattatgaaaattattattcttattttatattattataatattttatgtcataaatttatttatagtttattgtgtttaattctaattttaatcaattttatgtaaaaaaaatttgatattttttaactaatcaaatggcaaaaattaaaaaataactttttctttttcaattttgaagctttgaccaagattaaaaaatgcaagaatatatttgttgcatttttctaaagaaaataaaaactatataactaattaggtaagacaaatctcattaatcacccatcaaaagaataatgtaacactaacttagtcacaaagtaaaaagtaaagtagaagacatagttattaatatataacctataatacaaaatccacattagtatctaaatcatgtgagactattttaaataaggagtcaaattgctcattttaaaataagtatacaacgtaaaaacttaaacatttttgccaccaattactcattttaaaatgtattattttacttgatttaatagctagattcaattacttgtaataataaatttttggatctatgtatgttatttttttatttttttagtagcatttctaatggagatgtaaataagtagtgaaaagctaaaatatagcacatttaacaaaaaatatgtttcaatggtgtgccaaaaagtgatgtaaatttggcacatagcaaa

SEQ ID NO: 317297 - DNA, 674 bp, Cannabis indica
attgacacgtgtcattttatttgaattcaacggttcagttaagttagggaccaacggacttacagaaagtgtgaccttagggattattaccgtcaatttttgaggttggggactaatcggcatcaacctcaagtttttagggacttttaccgcaatttccccatttattaattataaaaatactgtagatacgtaaaattaaaaaaaaaaaaatcaagcaagcatgtgtgtagcacaagcaagtgaagaatacaaatgaccacatttagaatctactgtgacaaactattattattttttattttttttttttggcacggactattattgacaaaaagaagaggaaattaataaaatatatataaatgataatatttgtgagacatgttacaactacatatgcgaaacattaaaagtatgaaggacttatcaaataatttttattttataagatataaaaaataattttatattatattttttttggccaatcaaatagctattttcggtatcttattattataattttgataatattttattagaattgtaattataatttcattaaaattataaaaataagaagagtataaatcgttacccaatcatatatatattgtaacaccctaactaccttaggcgtattacgtgattttcaaacgtactgtgcagct

SEQ ID NO: 317298 - DNA, 1153 bp, Cannabis indica
accatgctccccagactttgatatctaccaaatcatgcccttcaaactttgatatgtactaaattataccccttgaactttcatccatattaaaaaaaaaattattaaaattaaacaaaagtccttaaatttaacaatctcaatagttaatggagaatttttaacgaccaaaaaagtttagagagcacgatttagtacatgtcaaagttcagagggaaaaattactaattagccaataaaatataccaaacacaagagggagttgtgccgaatgaggttcactaaattgcaatgatgatctcaatatttgtcttcttcttattttattacttcaatagctaatatgtcaaaataatgcaaaatttaccccaaccaaattattaaaaaaaaaacagaatgtattgatgaagaccttacatgctcgtatttgtcattaccattaacttatctatagaattaatgattagtgagaaagttatgaacaatttgaggtatatctaataagatgccgtccaacgacttttttggcacaatcttatgaaatgtgaacgtacattcttaggcattgatttcatatctcattagagtataattataaattacaataggatttttgttcattaaattttgacacttatatgattttacccgtaaaattatttttttttttgaaaaacttatctctctaattatgaaaataattgtaaataagctcttttggttggttgcattttgcttattttttaagacaatttattaatgtggctacaaatcacatgtataattataagggtttatttaagtaataaaagttagttagaactgaggcgtttggttgggaggaatgaaaatataagggggaatgggaataagaataaaaaatttaaaatgcataaaaaatcattaatttttttttgttacattggaatggtcgccattctaccaaaatggtggaaagagcattctattggaatgctattccaatactttaaaatgtaaccaaacaaatgaatggaataaaaattgtttcatttccatttcattccatttcactacctccaaccaaacgccacctaagtataatgatcttaaacattcaaacatttaacattaatcatgaatcaatcgtacattagaaaattgtttgcaaaaa

SEQ ID NO: 317299 - DNA, 2791 bp, Cannabis indica
attagtttttacacttctccaaaatcactgctccacccccaaagtaatcaccatctcataagtagactttctagcattaatgcaagtctaaaaattttatttggtgtagtctaagagtattaaaatacggcccttatagactaacatatagttcctcttttgatcataagatttatttgattatcttccaatgatcctttcgtggattatactgatatctactcataactccaactcaatagcaagtttccggttcaatgcatactagaaaatacatgagacctctaactgttgattctttaggaattcctttcatgacttttatcttttctggaatagttgaaactgttctttagttaaataaaattaatgtctaggagccaaaagacttcctatagagataacaattacaaaaatgctccagcatcttactaaagtaagttgcttgatgaaatgcttaccttgataagtgtgttatattctgtagtcctccgtaggttacttggtgctggcataaattttttggacttcactgccagacccaaatattcttcatatcttgccatttttcatggtcatgtccttgtgagcagcgggacgccagggtttgagagcactggtggcctgccgtgctcttaaatggttgatcatgcggatttgagttttcccaaatatgcatgggcattgcaagagcgccaagactgttttcgtccaccttctccatttttcttgcttggacatggctgtaggccttttttcttggtgacgcccttggccagcaaatcttcgtcttcaggccaaatcttggtggatagtcaagctgtgtcttttttcctttccttggatagattccccttattgcaacttgagactcgtgatggcaaacactatacatgtttctatctttccttagctctcaatgaaagcaccaaaatgtttaccgagatttttggaaaccaaatatttagagcttaataaagaaatatttccattgtgcgatgcgtagaggtacgatgagtgaatcatcccctcacatggtcgttggataatgggcaggtacgatggtgtgcatgccttgtactatgacctgaaatggggggacaaaaactaattttgtatccgaaaaaagcatcaccatcactcctgtgatctaacaggtacaggtggtggccccttacgacactgtatgggaagaaaacccaccctaagccttttcgctatagaatcgtagagggccttggcttctataagaaatttttgaacctggaaggcagaccttctataacgccctaactattaggcacgctacgctaatcaataatgaaaccctaatcccctaatacaacattactagatagatatgcgcggggaatttaaactttgatctaaaacagaatgaaaataaaacttgtaataactttaaactttacaaacaaaagtgacataattcgggatcccaaaaatattttacaaaatattacaagtccttttcactagtcgacctaagcggcaaatcagagatacaaaagtacatcacaagtagaccccaacctgcttggtctagtgtggcatgaacatgtacaagaatcgccatgctctcgctctcatggctaatcacaaactgatttacccttttatgcatagtagagcacccgtgagccaagcccagtaagacagtaaataatatcaacatttatatttaacatatgacatatataataataccattcatatttatgtgtttaagatagacccgcgtgctacgctcacacgcctaattatgtctacgtggcgtagaccctcgtgttacgctcaaacgtctagatacaataaggccttagaacggttcatctcttttgccttgaacgcataacccataatctcaatatatataacacataattaatggtgccaccaaactatttgtctatttgatatagacttacgtgttatgctcacacgcctatatatgtctatgtggcatagacccacgtattacgctcacacgtctatttatgtctatgtaacgtagacttacgggttacgctcacacgtctatttataataaggctttagtagggtttatctcggttatagttactgagtctaacctggttatgcctttcttgcatgaccctattcatatatatatgtaacccatacattaagttctttctatggtttatcatagtgatatataccaggtctaacccagctatgtcttatacatataactcttaacataaatgcgtgcactctatatatactataacatataaaatcataggttaataaccctaacttgcatactaaataatcactcctacaacatattactgcatcctcaaaataacacctattaagggtaataaccctatctcatgtcttcacttgattaacaatattaccatacatcatcacgttcttaccttcataatattctagggtaataaccctagaccgccataattaaactaaaggtactagtttatcgattctagcttaattatgccttaggcgcataattctttattacaacatattaagcatggcataacactacaaatcttttaattactagcgtaataaccctagatcatataaccgctcattttaggataataaccctaatcctggttctcaattagtcacaatcataatataaaacatgagcgccaccgcacttaactctacatgcaaactaatatcttacctgatgtcctgcaaacgcggagattccaaatctctgggtgctcctgaccaagtggcggtaatcctaatcacaattttt

SEQ ID NO: 317300 - DNA, 1686 bp, Cannabis indica
gtcactaactctcgttgttgtgtaatcgctgtaaaaagggatttatgccatctgtcacgtcttttatggaagttgcaatacgtcttcccccatgcgacattaaatgcaaagtgattgttcaggtaatctctttacctcccgaacatgccttatcatggctctagcctcccggagagtaagaatgtgtcctatgctcttctctgagaggcgccttccctgtggtgttcctcttttgtgtaagacttaattaattttcgtgagtgatggttctttcatatccatgtgtcacctttatctacatccatgtattttgggaaaattccaaggcatcatttaccccccaagcctcgttcagtgaagggtgaatgaggcttgtttgatgcctccggtttgcttgttgatataatggcacgtgctttaagcgcgtgacctgcatttatgctggtcatcattactattgatttccttttagaggcaacgattcgcttcccgtttattgagaaatgggcgcatttaacccgagtttcagaaaagtactcaaacgttttcaactgccctagcacccattaatctcacccgttagatttgttgaatgcaaattgattacaattcccaccgtacgatggtgtctgatcatagctgccttgcaccccttatggtctataaaagccaacattttctcttcattgggttacttttgatatctcgctattttgacccaagaaactcaaagaaaatttcagaaaccatagatttcttgctgctatttctccgttgttgccagtttgcattctaccgttgatcaacttaaagttcattacctttatgtagttttctgtgtacattttacttttgttgttcacttgcatgttagggtcagagtatttggtaaacttttagtcgtatttgattcctacggtggatgattttggtgaaggtcgtcgaatggcgtatcttttcatctgtgttctgctcttcctttctttttcattttgcaaatcttttttgcttagggattgttaagagtatgacatggctctcaacttatgtccctttctctttttatcttttcccttttctcctactttcactgtctttgggatatttacacctgatgtttgcctaggaaaatccctagatttatttctggcagacatccagagggggcctctttcctgcggttagaggacccccattgcctccttttatgttagggttttgtttgggggctaactgttggatttctcttttttagaatcttactaatctcgagacatgtctatccccacgaccggagcgaaatcctcaagcaaaagttctaacaccatggccaccctggaggaagtgatgaagggacctatggtccaggagaaatacacttgccgatacaccgactgggaggttgatgagttgcattcaactctaacctgtgcccaccaactggaaaagatcttcactatgggcgggatcaagccctctgcttctggagtctttcaccgtcttctcagagatgaagagacgcccaaccgtaactacggaggtttcagagtgtggagtcagactcatctcatgtcctgagcaatgctaccgcttcaggattacttcataaatttttagtttttgttggccttgcgccgtaccatcttatccccaagcataccgcctgctctcaggcttgtttatttt

SEQ ID NO: 317301 - DNA, 1238 bp, Cannabis indica
tgcaactctataaaaagcttgagctgtaacttttgattttgttgagttttaatattatctagactgaagagagaaattgataggaaaagcaaaatattgtgttatattaggccatttccaatattagttttattgatgttgcttgtcaaaagatgggtacctcactcaacaaaatatttgacttttcaaagaatatataaacatagttgttcctcaatagtacccatactttctattttttcttttatctttcatcttattgggaaaattattattaaattatataaataataataagtgggtcatgacatgcaacactactagttgcttgcattgtagatgatatctccagtgttagttttaagagaaatttcactacatatttttttgttttaaatgagtaaatattattttaaatttttattttgcaaaaattactaattagatcttttattttgttaaataaggaaatgaaccttatattttttataatgataaaaataggaccctgaatttaatttcaacaattttattttttaatataaccaactttaagacaatttctaacacgaacagatacagaaaatgtaatcagttttgtcataacatctttagattagattattattaatttttaatttgaaaaaaaaaatcaatttagggtcataggatgtttttgtcattttacaaaacagagagtccaattaagaatttttacaaaacataggatccaaaatgatatttatctcttttaaattgatacctttaattttattttcttttttaaaatttattatgtttacctctttttcaattattttaccaattttatccctatcactccacaataatgtccattcttctttaatcaaaattttacccaaactttttcacaaacctacacatctatctccaaagaatacaaatttattatatttgaaattatgtctttgttatgtgaagatgtgaggatagtttgagtacaatactcataaaaaatatatattatttaattaaattttatatgaagataaatttaattaatgtataaacaaagatgtattcttcaactaggttggttgcttgtgagaagatggatccttcactcaacaaaatattcgacttttcaaagaaaatataagcattgtcattcttgcatagcatcgatgctttctatttttttttttattttatctttcatcttattgagcaaattattattaaattatataaataat

SEQ ID NO: 317302 - DNA, 1706 bp, Cannabis indica
ttaataaaacatacttggtagtaaatctagatcctgataaaatatttccaacacaatcctataaggccagaaccttcataactattctaattcgcaaaatccctataagaaaccaattttttaaacttaaaacggaattaaaccttaccttaagctttcctgctccaagaattttctatcctgctactaccggagcttagatctctaggtttcaggttgaaattcgaaggaaattgatagggggagataagggtttttctcagaggacgaggattttttttcattacgtatgttttccgtttatgacttataacttatatatatactgttaacgttaatattaataatataataatgttattaataataataacagtaagtataataatattaatataataatatatttataataacttttaattaatggttatcctatcgtttcatagccacttagaaatttttacttctagggcactaaactaaattctgcatactcttaattaccccaatacttacattatctatttatcacaatattcccattaattctatcaattaaacttgttatgacatttttggtccccgatccagtctctaacgtcgtcaaacttaaaaatatttttattccaaatatagctcatatcgcattcacacatgctatataaatctttgaaatttataaattatgtttatttactcacttatatagatttaaaatttatgttgaactagattagtaggatcataatcccacttattacctgattaacccaaaatataaatataaaccctaattatttaccattacgcttatcgggatatcacatgactagtgggcaatgtgttagggacaccgtcctagacaatgtaaatccatgaactaaggaggaactgtcttcacctttggttgagctcccagacaaattagtcataaaattcaccaccgattcgctccaaatagcagtgatgctagaccttaagttcaaggaatccgctgctgacctcaagatcacttaaggaactactcgaagaattagttggatggtgatcttcagagaaaagactaagtaaatcttttcctattcgattgtcacctccccaatagttactcaggatcatctgcatacaaaggacaaagggaggtgagcaacaagacaaagtgacaagatttaggcaaaatattggtcaactatacctaagggtactagccaggcagttccattatataaacttgggaatcagtaaggtagaggttccaagtgtaagaacttggacaaacgttgaggtttaagttaattacttgactacaatagaatcaccctaaaaaagtgtcatatagagttcctaagggaaccaagtattggatcaggattgaacaggctcaaaaggccataacaaagttcttactagagtcagaagaggacaaaaaactctccactaccttacactatatttggtaggagggagaagtggagggatggagaggagaggagggagagaagtgggtggagagataacaaatcccttcgtttggcaatagggattgaaggagagaaaggagaggtgagaggatagcaaatccactgaaatctctaatttgcaatccctctaataatggaaggattgaaactctcattcttcaattattgtaaattacataaataccctcaacaaatattattaaaaaataattataaggataa

SEQ ID NO: 317303 - DNA, 530 bp, Cannabis indica
actgcaaaaccacgtaaaaaaccatgtgttcatatattatttttacatagcttttattttttctttatggaattattaccgtgaggctcaaatttaattaacgaaaatatgcgttaacaatagaattatttttactttttctttaattatttaatactaatttttttatattcacaataaaaattaaataatgtgttgactttttaagtaaatttagactaaatacattagaacataattgaaaattttggtcataatattagcttatgtttttgccaaacttgacatcatttattacagattttttttcttgatagaaaaaagattagagagaccctctacggcatcaaaaaaataatggaacactctagtttctctctggtttttccagtccctcttgctcatcttcgtgatgttcccaatcccctttctctttctctctcctttctcaactactcctacttcatcattatccaacatttaatgtgttggaaattattttaccaagatcttagatctactcacaagta

SEQ ID NO: 317304 - DNA, 1177 bp, Cannabis indica
tttttagcttcaattttttattaaaaaaataaacagcatccatgcaaattttttagaatgatatcattttctctccaatggtataacatctcaatattttgtcacataatatgtccacctcaccaagcatattttaaaattttaccattgaatatgctctaatagtacttgtaaaatcagtcttgagattgggtgtgccataggaaaataaaaaggatttttacaaaaatattagattttgggcaaaagtttataattttactatcacacgaatttttttacaaaaatactatctttttatacaacaaccaaacagaacaattaaaacaacaatagaacaactaaaaataattgtggaacaacaatgaaaacttacacagtatttttgaaaaaaattctactcacagtaaaaaagttagaagttacagtatgtggtgtaaaaattccaaaataaaaattattagactctttatttaaaaagtgtgtagtatttttgaaaattattgaaaaatatgtatttttaaagataaactatttttttttgtccctgagctaagttgatcccaggtgtgagcctaattcgccttaatccaagtctgaccctgagtacttgcaataattattcatttgaggcttgaattaatttatagttggatgttgcaaaaattatataggtatatgcaatcgtttttatagtttaattcagtaagaccgatatcgttccacaaagactgattatcaagtactaatagcttattttattttctatttgacaatcaaaattgaaattgttgaaaataatgaatgacaaattttaatgaaaaacaagaacaataaatttaattcaaatatataaacaagaaattagaaatttttatattctctgctatccactttattatttattaatgcaattaaaaatataattttcctcactaaatgaaagacatacaaacattcgggtaaagaaatatataaaactcgacctaatgtaaattctttatatttttattaggggtgttcatccgatccaattcgcactaagtgcggatttcatattttggatccaatccgatccgcataacagtttaaatccaatccaatccaatccgcaatagtgcggattgaatcgattactttggatcggttatttttttaataataaattatttaatat

SEQ ID NO: 317305 - DNA, 1439 bp, Cannabis indica
caccaaactgttaaagcatattttcgttaactaaaaatattagccttcttgtaataaactaactacagaattgattatatagcaattcatttattaaattaataaataacaggaaggttttaacatggttttgaagttaaatcttcatagtctatgagtccatcttattaaggataatgatatttgaatacagaatacaatgatataattagcaataatatctcttttttctctagattggtcgtccgatttactctcgattatgtctctatttatagatgtaatggatgatagttattcccttgagatctactcattcataaccgcttatgaaacgtggacattcctcacgttttacctttatgcacatggggtaagattaaatgattgttccttgtctttatccttagacggttatgctgactgtgttggattgttctcaccggttgcatgttatctttcttaacctactttgtaggaaaaatgttaagtattaagatataatgcatctcacggttctcctttgccgtttgaaaggtattagcgaggcgattacttccatacatcaaaagcgaggtgagtaaacataaaagttgtttccacttcttaagcatactcacgagtatgtgaatcaatgagttgaaatctcttactcacgagtatgtggatcaatgagctacaagctcttactcacgagtatgtggatcaatgagctagaagttctttgtttactcgttctgaaaaactttgtgtattatgtttatcctaagatggacttattgtctcgccagcctcacttgttaatagttaatattcacatctcactattgtttatatggcggcaagttcgaatatttctattaactataattcacgaggcgagtaatttaatgtgcatttaataatgcacggcctgggcttgttcatattccgaccctaatacacgtgccaacttcttattactgccaaaatttaggtataatagagtatgccataaaaattttgaccagcttcaccaggcaccaaaatactaatgttttgggtgttacgattttcatcccaatcctgaactggtaatttaactgcgttaacaatacacacaggataacaatagcatgtgattagaggaattttgcaatggcgtacaactcatttgatacttctccagccttatctgctcgatgttgattgatctgtcattgagtgaaaatgtaatcattactagtattaatcatattaaatgaaaaaattagtagaaagaaatacttactcaagactggaaccaactaaggatctagatttactaacaagtatgttgaattaacatcctaaatatgaattctctaaaataatgaaataaacacataagggtttaagaaaacattacattgattgcagcggaatataatgactcattccgttcaagatctctagccctt

SEQ ID NO: 317306 - DNA, 728 bp, Cannabis indica
tttttttttcattgtattcaaatactattttttactgaaaaaaaataagtaaaaaatctgtaaaaaaataaatctattttaaatatatttttgtaaatttttcataaatatattaatgaggtacataaattaacatgcactaataacacaattaattaatcatttggttactattattattaactgccaacctcttataaatctccatcaacaatctactatccacaaattcttgattacttccacaacaaaccatagcaatttcctttcttttcgccactttcttacccgaaaaagctccggcgccgcccatatttccggccaaccgaattattaggtccacataagtctcatgaaacttggccaaaagtttcaccggagaaacaacaattttcctcagcccaaccatcaacttcctcagccgccgccgctgccgctgcccgcttcctcggccgccgccaagcctagtgatgagaagctttctctttgttggtttttggtggtatttcttcgtcttgaaatatttcttcaagttttcataatatgttgttggaacaatttccatttatgcccctagcttctaagagagagtttttgagttttgagttttgatgggatcatgagtgttgtgaaagggtttatatatatgtcaaatatgtgtagcttaattataatatatatatatatttatagggaccggatttcgtcccgttactgtacggacacgg

SEQ ID NO: 317307 - DNA, 961 bp, Cannabis indica
aaacaaaatagaaaaaattcacaaaattttaaaaatagaataaaaaaaaattgtgctttcctttataatgggattctaaattccattccatctgcaaaagagatttatgagtgcatgagatcaacgggacacgacaaagctccaggaccggatggtatgccacctggattttatacccaacattggaacactgtcggggaagatgtgatcaaaatggtccttcactttttcagtaatgggaatcttccccaattcataaacaatacaaacactgttcttattccgaaaaaagactgtcctagtgaggtgaacgactatagactgatcgccttgtgcaatgttgcatataagtgcatttcaaagatcatcgctctcagattgaaaccactgctgcctcaaatcatttctccggctcaaactgcatttttcaaggggtagcttattactgagaacacggcagtagcaagggaaattgttcactcgatggtcaaaaagagagggagaaagggatatatgatgataaagcttgacatggagaaagcctatgacaaaatgagttggaaatttgttctacaagttcttaagggattaggattcaatgctccattcactacctgggttaaaaaatgcattgagattgatcgaatgggcctcttgattaatggttcgatgcatggctatatcaacccgacttgtgggcttcaacaaggagaccctttatcaccagctctattcatcctcgcagcagatgtcctttccagacttttcatggccaagaataggactggagatatcaaggggtttaaaatcacaaagaatggaccgcaattacacatcttatgtttgcagatgacattgtgctatttggacaagcctcggtgaaagaagctaatggtttcttgagctgtatccgtgagtattgttaggttatatttaacctatgtttcgggtctttaaagtt

SEQ ID NO: 317308 - DNA, 2606 bp, Cannabis indica
acaagtttaattttgtctattcgcgactgttgggttctagcagaccctttgtacacatttttaagggtaatttcataacttgctatagaaagaaaaataatagacacaattagaatgataattaatatatttattcatttattggtctgaatgattttgttaccgtagtaacttacatttattgaattatacaagctatgacatgatctaactgatctttagctaattaaaacataaaacaattgttttttctagactgtactttagaggtggtcatctgacctgattgccaatcgttttatccaaacccttaagcgaggtccgctcaaaaggccatctacttaagagtagatgttcgagcattgtgtactttaagggggtcatcagaccttgcacatttattggtagtattttcttaaatgttccccgttctaataccttggtaccagaacaagttttatgttttcattatactgactaaggttgtatgctccagatttgttacttctattacttgatatggtccttcccatttaggtccgagtacgccagctgtgctatcctttgtgtttaacaacactcttctaaggacgatatctctcacgaagaatttcctcgccctcgtgtgcttattgaagtaccgagccaccttttgttgatgaactacttgcattaggtttgctgaggctcttttttcttaaatttcatcaagtgattctcctaggagggcgtgattggcttattgattataggtcagtctcttgtggaatggaggttctaactcaatgggtagaattgcttcgtaaccataagccatggcaaatggtgtctatccggtttctatcctttttattattcggtacgaccacaatacttatggtttttcttctggccagttcactttagctttttcaagcaactttttcatggtgtctttgaatgtcttgttgactgcctcgacctgcccgtttgagggagtgccactgcaaagaaactcttaatgattccatgtgctgtacagaaatatgtgaacatctgactatcaaattacttgccattgtcttagacaatctggcgtgtaagtccaaaccgacatataatgtttgttcctacaaaatctagaacttttttagatgttattgtttctaggggctcaacttctatgcactttgtgaagtaattcacagcgaccactgcatattgtaccccgtccttgcctttgggtaactgcccggtcgggtatattctccttatgacaaagggccatggactttgcatcatgtattagctcattgggggttgcacgggccgggaatttttgaaaatatcttaggtatttatcacatttccttacataggcctttgagtcttctatcatggtcggccaaaaatatctttgccttagtattttttttgataaactctgtcctaccgcatgattaccacataatccttcatgtactttggttaagagccgtgtaacctcttcttttgttacacatctaagcaatggcatggagaagcctcttctatacatcacacctttaactatgatatacctcgcaactattctcatcatcttccgagcctcattgtttttatttggaagttctcaagtgttgagataagctgatatgggtgtcctctagttcaacattatatctatcatttcaacttcttctgcacagttgatgttgggttcttccaagaattagattggtactaagttggacttatctgtcaccgtgctgctcgcaagccgtgccaaggtcagtagttcttcttcccttgggacttgcttgagggtgtaacccttgaattgtgctagtagatcttggatcttacttagataagctatcatcttttctccacgagccatgtactctcctgagactttatttacttctagctgtgaatcactacagactttaatgtatccagcatgtacctcccgagcaagttttagcccagctatgagtgcttcatactttacttcgttattggaggctttaaatccaaatttgattgctccgtgtagagattgcccctaggtgtgatgagagcacttcctgcactagaaagctagtcaatagctgatccgtctacatgtaatttccaggtaggtttgtctttgttcttttctggtagtgactcttgtactggctcggggttatcatttgtattatcttcctctttgcctgtacattccaccacaaaagtccactaaggtatgttctttatatgttgtacgaggttgaaagattatttcatactgtcccaactctatggcccatttgagtaaccatcatgcattaggcttttgtaacacttggcacaagagttggtcgttataaacttgaacagggtgagcttggaaatatggccttgactttcttgtggcgaagattaggcagtaagtgagtttttcaattaggggataccgaccttcttttttaacaagttgtttggtgatatagtagactcgatgctggacattattttcttctctatcaacacgacactcacaatgtattcaatgactgccaagtatattcctaattcttctccgtccaagggttttaagagtacgggaggctttgcgagtt

SEQ ID NO: 317309 - DNA, 1012 bp, Cannabis indica
tttagagaggtaaaatgaggagaataagttggttgaatctgagatgatgaccctccttcattactggcagtattgcctatgacagattgggctggagcattatttttggattgaggggtttcttcagttgccatggcggaggcctaaatggctctgataccaagataaaatattgaacaatgtattttatcaaaaaactcagctcaattaacaatgagccaaagcaatttctatttataagaaaaggtttacaagggagtgagccaacggctcttacagctgtcagtgcagcaatccaaataaagatttgtagaaagggaatattctaacaacttgcaatcattacacaataacagaattaggaccacacaggaacacttgtcacagcagaggaaatcgaattgcaggttgttgatgcaggaacatgggaccttacagtagggaggctgcataggatttatgtcattcctcaacggattttgtattttttagctggtggaagtggtatcttgctctttaggtttttcgaacctcttgagaggagagaaatgtacattataattaatagatgtactgaggataattatgtttgcttcagtaagtgattgaattgatggttaaacaggtagtgcttttgaactttcctttttcaataggaaagacacatgaagatgtagtggcctagtatagtttggcgcaccggcaggcattaaatcataataaatttagaatgaattatatattttcagagcgaatatagaattttgctttactatactatatattaatattctttcccattttcccttatttgattacctcgatctttccgaacatatatacatgcaaagccatatattcttcattatacctagtttagctttattttgtttatacacgtatcatatacataatcatcgtgaatatatgcgccgccatttagtcgttaccttatatagtaggatataaaaattgactagtattatataaatatatatatatatatatatat

SEQ ID NO: 317310 - DNA, 1144 bp, Cannabis indica
atataaatttgatcaataaaattttattaatataattaaaccatgtttacttatatgagacgagtttcaagttttaatttaatcatttaattacatataaatcagaacaatttactcaaattgattaattagaattaattttaaggtaccaatatatataattccaaaatacaatactaacaaccagatcaatacacatcaactacataagtattttgtcagctatatgaaataaaaactttaacaaaaattatattttaatattgtgaataatttggagaaagtttttaacataaaaaaattatgataataataaatattcgacataaaatactaatgaacttaaatataagaggcgaaacatgagtatttaacaaaaacccacaagacttatgaaatctatagaaatataggatatcataaatttgaaaatttgttgatatacatctcgtttgaaatatgtcaaaactttaacacagcaaaccaacatatatctatgcaaaagtccaaaacacatattaagagaggactataacacaatttgaactaggtttcaatatattacaatatcaagaagaaaggaccactaaaaatagagaaaattacactacatacctcttttaatttgatgtttttaatttttaccatctctttcaaaatttattatgtttacctcatttttaataatcctatcaattttactcctatcacttcacgatagttttcattcttctctagttaaagttttacccaaaatttcccataaatctacacatccatctataaagaacacaaatctattatgtttgaaattatatcttaattatgtaagtgtgtgaggataatttgggcacaatactcataaaagagatatatttgaattaaattatatttagaggtaaatttagttaatatataaaaaaagagggtatttttcaacttctcccctaaaaatataactagttgaatataggtggagtagccagtgacaatagaacctagtaaaataacatccaacaatgatatcactgtaattgtgaataactatatgttttggatttaatagaatttatataataaacatataatcatgaaaataatcatgtgaaccatgcaacataaaataatttgtgatcttttatta

SEQ ID NO: 317311 - DNA, 676 bp, Cannabis indica
gggttttattagggacaaaaagtgaaatttccctttaacatttgagctttatatattaataatattagtttatattaaggaaacagaggaaaattataattttacaaacatattaaatacttgctataaaattattaaatttatgttaaattcaacttttggcactcttttattgttttattctaacaaagtattttttttttagattacttgtggtctctgactctccaatatatcctatttgttattaatttcatataaacatatgcatttttgtatgtatttccaatggtcaaaatggattacaaatatttatatgatttatcaactaccttttcactctcttcttcatgcttctatgatattcgttcatgtcatggttgacttgtggagtatagtttacatatttttatatgaagggtcaaaatgaaactcttgaaattgatttatgagctaatacatgcatgtctatgtatcatgtatatacatcatggctgttggctatgtataatactatatgtttgcgaattagtggaagcatgaagtgtgactaaccaagcacgctcatgctcaaaggtattacccatcacgcttgtaattttaaatacaacataaatattaagttaataaattattggggtttttagagtaaatagcggcataagtacctaaagtt

SEQ ID NO: 317312 - DNA, 1497 bp, Cannabis indica
ccgaaccgggttcggggcccaaaatacattttcgggattttattttggaattttataaatgattgaataatttgaaatttatttaagtttggtgtgtgatgaaatgacaattttgcccttgttgtatgcatatatactttattggccctaggagtattttggtcatttgaccatttgactttattgacaacaaagtggattttttttttttagaaaaatgaaaaaaaaaaacattttctggatttttctcatagcccagcagacccctctctctcaccctttttcatctctttaatctttgagatttagccttgaatcaaagcttagatttttagactggtggtgctaggattgtgaagagcttgaggtagtttttcccacctctttattttgagttttgatgctgaataatatgttaatatttaggtatttttgatattgttagttgttggttgcatggttgtttgaattgaagagtttgttgatgataatttgttgtttgagcttgtaatgttatgagagatgtatcttgagttggttagtgagtttttggagttgtgatttagatttgaatgctattttgaaccttaattttctggatattcttgtgggttgccttgaagttttggtgttcaagattttgttaggggattatgttggttttggtgtaaacttatgttgcttgcttcaattcttgtggaccttgtaatagttacatttattgttttaggttaaagcttgattttgtgttcttaatcccctattggtgatggttataatctgtgaataatgagtttgagtttgagcatatttttgttgagttttggtatgtttgggcttgaatttcggttactgaaaattggtattttctgggtttggaacctaggtgtcgtgaccctctctatgagcgtcgcggcctgcccacttgaatcctgggtttttttttaacccaggtgttgcggcatgcctagggagtgtcacgacccgcctagggatttctgggcagtttgaatgttaaatttgtttcgttcataacttttcgatccggactccgtttggggtgttccatatatcattgaaaagctcgtttcaagctctatatatttatttgtatttgaattcaaattttataattatgtaaaagtggatttagggattaaccctatttgtgaattccaggaattgtgactaggattaccggcacttgtttaggagcactcggagatttagaatctccacgtacttgggacattaggtaagacaatagttagcacataaagttaagtgcggtggcgctcatgtttaatattataattgtgattaattgagaaccaggattaaagttattaccctaaagtgagtgggtatatggcctagggttattaccctagtgattaaatgattttaaatgctatgtcatgctatatatgttgaagtaaagaattatgtgttcagtgaataatttggttagactcagtaattagaactgagataaac

SEQ ID NO: 317313 - DNA, 707 bp, Cannabis indica
aatggagcaataaattaaagattatcaaaacaaaaaacttatgagcttggtcaattttggttagcataagtgagctcaatcaaatagtacaatattacattaatgacaaagtcattaataaaaagagagtacaataatgatactattactacatatacaatatattatttatttttacataaataaatagcaataataatattctttttagtttggaatgatgtacaataatatagtattttttttttgaacataacaataatatagtattattcattcactatatactattaaatactattcctttatatataaagatatatttgtgtaacatgtggaagatactaaataattatttgttcttttatggtgtggcagcctggtcttgctaggagtaccaatattgagtgccctatttcacatgatttgtagagtagacatctattaattttacctttttccaaataaataaataaataaagtaaaattattactattattttatataataacagcttttataggttcttttttaactagatcaccattttatttaatgtaggcaattttctatttccttttctaatcatatgtttggtatgggtatgtataaattaatctaatttaatggcaatttatttttaaatattagatatttaattgtaattgaatcaaattgtatattatttttaaatatttaattggat

SEQ ID NO: 317314 - DNA, 1918 bp, Cannabis indica
tatttctcacgagaattacaaggcaattaactaaggaagagatcccatattttagagagagaaattagagagagttctctaacattatatagatttttcagaatgtaaaaaatgagcttagaagagcctcctatttataggaatggaggtccattaaaataataataaaatattacaaaaatatggtatattttgggaatattcaatctagagtgattttgaccatggattgagattcaatggttgagatgctcaaatttgacttcagatgatgatcactaatttttagagatttaatcgtgcccgttggattgctttcctgttatctacggcaaaaatggcactttgacttgggagccatttttagactaaaaagattcagaattaagatatgagtgtgagacatgggtagaaagaccttgaaaatttattttcaacgcacttagaatcgtgtcaatcagaataatattcagtaaggtatgaccatttttttgcaggatcgatgttcagtaccctgtgaccatgttgacaatcctgcaattgaaaagttatcaaatgtcaaccttagcgccgggaacttggaaaattgtgttgttattttatgaatacttagtaatatatgtttgcatcacttagctaattaatttgttttgttgcagtcgttcaccaattctcggaggtttagctctttcgcaaaatcgggagattcaagattacccgatttgtgactaatttgcccatagtctaccttttcgaaaacgtaaaatatcaaagtataaatttgaattgccacaagttgtagatatcatttataatgaaaaaataggcagatgctcacgacagaattaaaaaaaaaagataagcagaacccaccataccatgctaaacatcaacttgggcactgagtgcctatcacctaactctctgtgtaatattctgaaaatcttattatgaataattaaagcatattttataaaatatggagtaataagtgtgttaagggtattatgagtaggattatgatctttctaatctaattatgccataataagggatttttgttgaaatgaataaataagcgtaatttataaattacagagattttattcgaatatgtgggtaacatacatgctatttgtgaaataaaaatattttcaggtctgacacccatggagactcgatcgatggccagaaatatcacaacaatattagtttatggttttggtggaatttctaagttgagttgataataagtttcaagttttttgggatatttctgggtaattagttatgaccgaattacccctaggttagggatttatttagaaagcaagttaagggtattatctttccccttaggtttaattgattccttgtcttttagtggtttaaaaattgttatcttaattttcgtacggggtgacatggcatccatctggttgacacatggaaaagattccataacttgggcggacatcacgctccatgtctgaccgtcgagattgatttattgcttatatacaattgatttgaagaagaaaccgggaatgaccaacagtcagctcgcatgcaccgagtagagtaaatgaaaagaaaatatctttagaatatacatcttataaattttcaaagattcaagccacaattgtatccttatttgagggatatattcgcatttgacaagaaataagaggaaacttacctagttttccattttactttatttgtttaaggaaagtaaacaacattcctattttaattattatttgtttttagaaactcattcgatgtaattcttccctataaattaaagtgaagtcatttcactatttagagggataaaaagctagagaaaacaatcatggattgaagagagaaatactcaaaaatcattgtaagagctttcgagagagatcaa

SEQ ID NO: 317315 - DNA, 1918 bp, Cannabis indica
gaaacatattctgacgcagcaaagcaaatcagaccaaaaaggaaacttgccataaacgagtacggtcttaatacctgccataaacagtgtgtataatctgattgtatcaagacacaatcgaatttcataaggaaaatagcaatagtcaaagtttcctttaaaaaccaactttccataagagaattgcttctcttacaagaaattttcatataagaaaagtccagctgaaaatcaatctttcctaagttagaaaagaacaataaaaccgaataataaatgtgagaaaatcggattggaaacacaaagcaatctcaccataaataaaaaaaatattttagcatctaaattgccaaaaaaaggactttacaatatcaaaatttaattttaatattatattatttaataaataatataacaaaaacatataaactaaagttgttgtatgatctaataattaaaggaccgatcagatgattaatgtgatgatttttttttttcctcttttctctcttcaataagataaaatacgagaaatatttaattgatctaaagacgatcttataaatattattatttaaggtttaggtagtcctcatcgtcatcatcgtgatctttgtgaaacttccaaactgaagccataattccattgtttgaagccttagtagacttgccaatcctctgtatctgcaccaatattatattacatttaatttaattataatgactttattataacaaagtaatatattgttaccaacaaaacattcaattagtgaaaaattaataacgggaaatgcatttaataatgggtacgtacttttggcctgggagtattattgttcttctggatctttactgtctttaattccacaggtctgttttctatgtattccttcaatttctcttcattcatgctatctatcatattggtctgtcaagaatatataatttattggacattattattattattattattattattattattatttatatatgtatatagtgttcctaatccttataaaatattattcacatactattttactttaaaaatatgaattaaaatatattttgtaagccaaaagtctacattaatttaatttattaataataaacatacaaatattaacttttaagtatacaacattttggtttgagagctctgctgaaaagggatagtctttgtaacagagtgagatgattgatgtattgttttttgcttggattaatgttaatgagtactacgggtactggcattcctggggctgttgagatattgtgaatatggcaattaatagtaaattgggagtggaagaatgggaggaaaatgatgaagctgctaccaacaaaacaaagtatttttgtgaagtttgagaggctagtgatcatgatgttatgctatatatggacaaaaggattgccaaagtggagtggttttacaaggagctgttgatggtcaaaaagttggtacatattaaagatgatgatgatccagtgcctaattgttttatggcatatatactagcagcaggatcaagatcaggttagagaggtggaagaattttctagtgatcaaaggaaacggttgggacattaattggtgatggatacaggagtaattgccaagatggtattaatacccatggaactaagaacatgcatgggaggagtggacataacatatcaaatggacaaatagtcaatatggccaaacatgaatgagaaatttacattttatactgttttattatattttattttaattttattatggtaatgttttttaatatactgtttactgttttgtttcttttgggcaacagatattatatatgtttaatgtggggaagttatatgtctttatatgttattttttttttttttgaaaattttcactgatattattgattat

SEQ ID NO: 317316 - DNA, 1345 bp, Cannabis indica
ataataagttctctacaactgaataatgattaattgattatacagtcatcttgatcaaggtggggcggctaggccgtttccaaggcccctcagcctaagaggtttcacagcctctttgttttttaagaatatttttctaacattagctatagtagtaggttgtttttttttttttttccgatcaggtttgctgacctttcacgggcataggtgcagcttgactggaattgtgttttgcaattgcgatttaatttttactactgtaattagtcttgtttatgtgacgtagttttgagtgttctaaaaaattagagtttctcgttactaaaaaattagagtttctctgtgacatagtgtattatagctacagtaggttgtcttttgcaggtaaagtgcaactgatccattttattttacttggacttcgtaattattggattagcatttttgctcttccccatagtatcacaaaagagattgaaaagatatgtagaggttttttttggggaatgaatggtaccaggagtaagattcatatagcctcctaggagaaggtgagtctcccgaaggcttatggaggccttagattcaaagatgggattaaaaatagaatcaagctatccttgttaagtatgtctaggcaatatccactaagcaagaccttctttgggttaaaagggtggataatatctacttaaaatccaaatgcttatgggagtatgatctcaaacttgacgtcagctgttattggcagaaactatgccacttaaggaggaaatttgaaaagaggagaattcttaaagctggtatagcctctcagttcaaaaccataagcttgtacaacagcaagttgtctcaagatccagtcaactatcataaggcagtttggagttcgcttaatgttcctaaacataggtttattctctggcaagtcttaaactctcatcctctcactaaagacaatttactccaatttcatattgaattggagtcgatgaactgtcctatgtgtgaagaaattgttgagactcatgaatacattttcttctcttgtcttgtgtctagaaaaatcatcgatgagacattttcttggatgaatttcaaaggttggcctagtgattttaaaggctagtatagttggatcaatttgacaggtcactcttggattcaaaggatcaacatctccatcttggctgccgttattaattgataattattaatcggtaaagtgttgatgaggtctcatcgtacagttttgtattgtgattgtgatcatttgtaaattgttttgtaactacatatttaagaaaaatttacataataaactaaaaaattttaaaaaaaa

SEQ ID NO: 317317 - DNA, 935 bp, Cannabis indica
aaaagagaatcgaacaatagctaaatcacatccctgtaaaaagacctagaataccaatgtagaactctatacaaaacataaagaatcacttgaaaaactcaaacaactagacaaagtttccatcatctctctgtatggagggctgcataaaaatataggttagaagtagagaactcaattggggctctttctttcatgatcaggttttcaagaatacatctttacctattatatctaaaataaaacaaaaacatactgaaaagttgcatcctacaaagttacaacaatctgaaattcatttcagagtaacaaaaggtataaaatccccctttacatagttagttaaatatgattacggcataaaatattaacatatttggcaagaactaactaatgctcttcttctgaactattttttcggatgggtactggtagtctcatcacagggtttaaaagaacaaaaacacaggttgatttaattgctttaaaactaagcagaggatataaataaaattacacttaaaaaaaaaaaagaaagaaacggagagaaatcaaaaaattatgaaaagggaaacaagaaatctatgtagaaataaaagaagggtacaaggaatgaatccgtacctgtcagtgaagtaattcgaaaacccaacggaattccttctcgccgatcagttagtaaacagttgatgagttagcgagagaagaaagtcgagaagagcgatagagagattgagtaacggagagagagagagggtggtcgatggagggagaaaactcagaagttgtggtctggagattttgaagcaaaaccctggctaattaatgccaatatagttgatttgaggggtttctaatatttttttttccggctaattagttattttttttcccgaattttgacatataccaaatcataccccctgaactttttt

SEQ ID NO: 317318 - DNA, 700 bp, Cannabis indica
tcgtccgtctctctctctctctctctctctctctctctctcttaaacttcttccctttgctcttttctctctcttcctctctgagatggttgttctccctcttggagaaataaacgatttctttgttgtcaattattttatttttcttgttcttttttaaagaactgaatttaaatctaccaactaatcacatgaagccacgtgtcgttatttgaacacatcgctcgcttggccgacttttttgatcggacggtaccgactgttttattgttcaattagtttatggtactttcattgttatgacccaccgagcgaacttccctaatgtacatttttgtaccctttttttaacaattttgtttggtaacaatgcccgtcacactcttttcaaatcaaagagaaaaaaaataattgtgtaaaaaatcctcaaaaatttagagtatatctaatgatgttttctatttttcacctaaattatttttgccccaactatgctccatgctttagttagaatttaattattttaatgatattttataatttaaagggtaaatactattttggaccctctgttttacaaaagttactaattggaccctgtattttgttaaatgacaaaatggaccctgtattttcaaaaatagtacaaataggaccctgaattgattttttgtcaaaataaagtttaattataatccga

SEQ ID NO: 317319 - DNA, 1764 bp, Cannabis indica
ttttaggtagcaaaaaataaaaaaggacatttgctttattattttaaaaaagagacactaacttttagtacagtgaaatttactgatatttcccaaaatatatattagtattttatttataaaaatatttgggaaaattatactatatactatatatttttattttttattttaatttttatcttcattttactacttgttaatttgtacctaattttgtaagttatatcctcattatgtacattgagaactctaattttgataaattgtgtgagattatatttggtaatttaattataaaagaaagtatttattaatgaaaattatttctcatttatatttagttaatgtgtaataaaaagggatagttttcaacttatcccaaaatacttccaagtgtaggcaacaattttgcctttaatggacttttatttaacaaaatatcacttacacacactccatgccacctcaaattgcatcagcttttctctgattttttttttaatttttattttcagtttcgaatttagttttaagtttctctttccattttgttatacccaaaattcagctagcacatcagagaaagacgcttgtcaagctgggtagaataagaactcagacatgtaatcataattacacttgatatggaaaaactccttaaaagcataattaatagagtatgtttataactcgcctgactgattagtcttatgcgagataaaaatatacaaactgttaccttatgtctcgatgacaaaccatgtaacttcaggtgtacaagatgaggcactaacctcgttacttggaggagatataatgacaatggagacacttagcgtataatgtacaatatacaaactaagtacaacagatgggtgaaccaaggcgagaggtggcgaggcgtccaccttgctgtaggaaggcgtgcatgcgaaaaagatcatcttgtcacccgaaacagcggttgtcagatttaaggtaaaagtattatccaccttggaaaaacatatgacgagctccagctcgctatcaagattaactctactctattcccagcgaggcattccaatacgatacaacctacaatatatttaatacaagttcatttgacccagtaaaagcgggatattcacagctgtgtgaaatttaataaaaactgcatttacttaacgtgatatgtaatcagatcccaagatttcaagggatgatcgttgtaaaaattgcggtcaacttggtaaattaactgcctactatgtgattataaatagtggtaggctggatcaaaaaggggatgaaaaaatcataccaaaaaggccctgaaaaactatcagaaatccaataagatttactcgtggaccatgttgaattttaattgcaaaataacgtaaaaaatctgttgcgttcatactttttattttacagatttattttttctgtgtgagattgtcaattttaggctcaaatttggttaacgaaaatttgcgttaacacatttcattttcagtttttcattcaaaaatcttattcttgccccaggatcaaaactcacttcgagcaataaccatctccaacttcttcatctaactgtcaccattatcattcagcttttttttatatattttattttgtatatataatggaaattacccgttcctatgcttcttcatctacattaccaaaaaaaggcttctgttatctcaaattttgtccacctaacgtggcttgtccacgtaagcaaagacagagtacatgtggaataca

SEQ ID NO: 317320 - DNA, 728 bp, Cannabis indica
aaaaaaaaaaaaaaaaaaacgctcatacatgcacaaaaccaaagtaaatatatgtatatatctaagaggtttttttaaggggaggatcaaagtttttattcattaaataatcaaaggataaaatttattataaagctcaacgtaatagtaaatgatcaaatcccaacaaagtcaagtaaaatgacaagaaggccaatagaaagaggcacatacgtccatcataatcataatcattgagaagtaccattccaccctagatcaaaagtaacgaaatagaacaagtatatacaaactcacaaatgtccataattgggccaaaaaatcaaatcaaagaaacaaaataaaacaacaaagttgaaatcagtaatgaatcttcaaaaaacagcaataaaaaataaaagcatatccatagaccccaaatcagcgggagaggaagaaccatatagccacaagcaaggtttcaaagatagagaaagaagctggaacatctaccacagcctatccccaggccacaaacgaaaggggaggggaccaaaactagaagaatcggtcgagcaaggttgacagacatcactggagacccatcggggcttccctcgggtcccacacaacaaacatgcgtatacttattgtagaccacgaagcgcaacgtcgcgtgatcacctcccaccaacacactacaaaaaattgctatttttagtgacaattttttagtcacaatataattt

SEQ ID NO: 317321 - DNA, 1545 bp, Cannabis indica
aaaaacaaaaaaaaaaaaattgtctgtctataacgagttttactacccagatttattttatttggtggaggatattacagaaaatatgaaatgtttgttgtgttatacaaaaatgtggccctttttttcattataaaattttaatggtatcttttaattttcaacatttttataggatttttttctcatatatttgaaatgtttaatttccataccatatgtaaaaaaaatttctagcaaagtttctaaatatttgtttacccgaaaagtgatcttggtaacatagacatcaatgtttgacacttggcaagaaagaaaatattttggagttgagtagtttcgagtcatgacagtctatacttgggaggggtccctagtcctgtgcctaggttgacttcgagaactcaagaatagttgtttggatcctacttagttattttcaactcactatctttcaatattttacaccatgaagacatgaagaatccaaatccaaggtctggaagctgaaaacacacaaaataacaactcggtcgtcaactcgggtgcccaatgcccaagttgacaaacctactatggttttagtttttggacccgtcttagtgcaaatgagcccaactttgtactgggataagaattagacctgtcaaaatatattgaggtaacgaaatcagaatatgagcacttattgctttgagtaccttgagcattaggtgcctcgggcacccaacgaccagggtgacatattgttaaccctgggcatttccaagcacaatactaaagaactatcccgatcattttcttcatcttcgtccaaaacaaggaaataagtgctttcagaggagaaacgaattgacctgaaagccaaaatgaggacccactacccatgttgacactttgtcatcttgggccacttccatcaatagttcagatgaagtattccaggcatattctctattttcataaacaattaagatttgagctcttttgggaaatcaacagagctatagtttgggggtcaaaattgggacccaaatcttaggttgaccaagtggttgtggctctagctgcagcttttggtgcaaaaatcattgattcttaacatccattaaagtataaatctaatttctaataattttagtaacttacattgctttgtttttgaatttgtaaattttttttggggatttttcttaatttttaagattgtgttatggtagtggtgcgtggtggctagattttggtcagtaatggtggtcggatttcgataataaggtaaaaatctaaactttaatagtatatatgtatgtattttatatttcattgaatatgtattgtatgtgtatattttgtaatcgtattgtatatgtatttgttgttcgaattttcataagcttgacacgtggaccctaatatagaaaggctaaagatagtcagctgttcaacccttttgaccacggttttgggaagataggagcctagggtcacagaaagggcctccatgaaagaaatgttgggttttgtgccctaaataaaacccattac

SEQ ID NO: 317322 - DNA, 2001 bp, Cannabis indica
aaataataataatatattttattttattgctagttatgtgaaaaaaaaatattttttcataaatactgaataatttattattaaaaagtaaccaatttaaaataatcgatccaatctgcacttttgcagattagattggattagatttgatctattgtgcagattagattagatccaaaaatgaaatctgcacttagtgcggattggatacactttgagcaaagttgtacggattggattggatgaacacccctaggacccgatacttaaatacaccaataacaatattaacacgtaagagagtgctagacccactgttgccttttagtatttctccatttttttgtattggataccaatgttgacaattggttagcgatattccctaaatttaacaccaccaattctaggaaagaataggcagcattttgccttaaatttggagttcccaaaatttacaaatcttctcaaaaccacttccaagaaaactacaacacctcaagaataaaaaaaatgtgacaatatctcacccaaatatgaactttctacaatacattctcaaactcctccaataataaaaaattcacctcaaattcccaaaaaatcacaagaaaagtcaagagtcaagaattacatacccttggagataaatttgagagtcaaaaccttaactttttacttgcttgaagaatattgaaaatccaatggtaataggatttcgaatttggagatataattagggatttgagaatgaaaaacttgaatttagaggtggaaatgtgaagaaaatgatgggttgtgtaatttaggtggaaggatgataaatgttaaggtgagaagtcagagaagaagaagaagaatggtgggtttttgtgtttagatgcgaacctttttaaactgaaaattcaagggaaagcggcgaccttcaggggaagtcgcgactcttttataacttttgcaagggttgcgacctttggaggaagatgactttcactctttttttctatttttttaagtttttacgctttcaacgatttttttacaaagaaattaaatacaaaaatacaacaaataagaaaagacatgaaaaaaaaataaaaatatataaatgacaaaataaaaaacatcaaaaaataaaaataaaagtaaaataaaacaaaagtagggttcctcccaagaagcgctatttttaatatcttgtagccggacgctaaacttcttctcaagtgttctttaagtaaattactaacttggcgtgatcaatttcaccaaagtaaggctttgatctctgaccattaaccttgaaagaaacacacgaattttctcaaacttccacaaaaccatatggaaaaactcaaacaatagtgaatggtcataaccatcttgacttcaatttgttaggaaacagtctcaaccttaaattaaaaagaagtacctgttgtccaagttgaaattctttcctgaccaagttcttgttgtgccaagcttttgtcccctctttataaatcttagtgtaacaccctaactagcataggtgtattacgtgattttttaaacgtactgtgcagctcgttgctaatcaacgaggtttatgaaaatcgtgattaattaaaatttttgctttttaattaaacttatataatatttcatacaaaatactttggaatcccatttacaaaatactttacaaaaagtttactgtctattacaaaatatttgtcgcccagcgacttactacaaaagcactgttgtcccgaggaatcggctcgtcctcacggttcctcagccttggccttgcccttacctacgcataaacatagcactgtgagtcgacagactcagtaagaaaagcataatcataatcatacataaatcccgggttatgatcagacgcccatactcctaaccataaccctaactgccgtgtcccacacgatactgagtcatgaacgttcgtacgacggtacttttgactaagtaacagcctatactcggtacact

SEQ ID NO: 317323 - DNA, 1161 bp, Cannabis indica
ttttcttttcggtttataatactttgtttatatatatattgtttgtatatatttttctgggtttgaatctgtttgggaaaggatatatctttggtgttcttcgtgttcttccgtgaagaacaacgaaggaggctcggatctggggtttatttgatttgggcagtaggttgttgctaggctgtgtaaatttctgggcagtgagatagttgtttctgggtttatgttgatggtgttcttcatgttcttcaaagaagaacattgaagaagaaggaggcgtttttagtttctctgctaggttttaattttctttgtagccgtttatgtgtatgtgtgcaacaagaaaagataatatatataatatgagtgaaataagtttagggttacagctcatttaatacaacctgtagctctttaataaaaggctgtcgtattggtttgaaataaaaggcagagagtcaaaaagttttctttgactgggtcatagatcaggtttgaccttgctttgacagatttacttttgctgtggtgtaggaataaaaatcttacaggattcgaaataaataccgaaaatgaaaacggaaaaattacggatcgaaaataaaactttcatgtatatatatatactcgtatacaatgtatataccacataaaatcatcatgaatgtatgaaagagagtattacatacaattttatgcaataaaattacgaaagcattgattatatataaacatatatatacgaaaattatatgtacatacaacgtgtaaatatgaacatgtatatgaatataaaaatgtatatatatatataaacttatacatatgaatatatatacacatcagcataaataatcgtaccgaaaactccaatcatatttatatatatatatgaacgtatataccgcataaaaaattataaatttatagaataaaaatattacatatattttatgcaataaaatcatatattcagtgtataatatatatgaatgaaatgtatctatgtatacaacaatacatacgtgtatatagtatatatataaataaatatatatatataatacgtagatgaaaatgtatatataatcgtatgaaagtatatatatatatgaatgaaactcaaataaaatcaaggcagagatatataatccgctttgatac

SEQ ID NO: 317324 - DNA, 1776 bp, Cannabis indica
gaggaccaccagggacaaaccttgaacaggtcaatacacaacctcctactgtaggccatagagtgacttcccctctggctgggatcacaccaggtgtacaagagactggaaacaccagtttgacaatacgttccaccaactgtccagccaggtatctgtacccaagatctagttcaaagagatcctaatgtgacacaggtcagtcaacaaatcaaacaagttcatctatatgtgcaagcacaattggatcaacttaaaaatatggtacaaggtctgaccggcccaaaactcattgatctcaaactcgaacgggcacgcggatcacccttttctctagagattgaagtccttgaattatccttaaagttcaaaatgctaacctagaaaatgtatatgggaaaagaatatcctttatcacatctgaagtattttgagatgtagatggacttagaaggagcacgaggtgatgtacgatgcagaatttttgctgccacacttccagaggccgcccagaaagggtacttcaaatttcctccaggaaggtttagctcatggaataccttctcatcaaagttctatgcacagtttttctcctctcatcaacttccctcgcacattgaagagctggtcaaagtaaagcaaattccaagggaacccctcagagcttatattagcaagtttatgactaaagctacaaaagttaaggggctgactgaaaaaggaagactggctgcagtactaggggcattgaaccactctgagagttatggaaggacatcaaaaggctaactgtgaggttaatggctgactttctagatcgagcagacaggttcattaagcttgaagaagcagttgggatggactccacccctaggaagaacctaggcaaagtctgtgaaacttggtgaatagcaagtgaccaagagactttcctgtattgtcgcttgagggatacccataccgtacaacacatcgaactgtcacaaaaaacttatgcagagaaattttaaggcttaaaataagatactgaacctgcctctaagtcgtccaggcacactttggcttgataaagtaaatctggacccttacctgtcaaggccataaggagatagccaagacaattatatgtccgtcatagatggctttcgggctaaataatagtagtgctcgaaaatagagggcctataggccaaagcaagaacatgaatgccttgaggtcagatatgagattggttcgcatgcataaggccaaggccctgctagaacagtatagctagaaagacctggacagagctcctatggggccacgtatcgggctacggctagggtagagttccttacaagatccaagccatgttgagtcttaagttgaacatttggctataatagactcaccattaagcctcatacaaagtttataaggaaaccacgtatgaggctaaggctgtatatgcctacaaagccaaactcttaccgaagtcacaagacgacagaaaactggctatcgactgggaaccaaggcccatgccaaggttcttaagctatgaaaggctcggtcatggtcccatgacttaggcaaaaactggccagggtcattaaacccaggcatgaacaggaaagctttatagagcaaaaccctaaagctggcctactcccatgattaagccttagggccagtcaggtcttaagcaagacctcctaggccagccaaggtaagttttgaatcccaatgtgtatttttctttcaaaactcgaatatgtgcctcatattcttta

SEQ ID NO: 317325 - DNA, 501 bp, Cannabis indica
tttgatgtgatatttgatgtgaattgttgaagttgttgctctaaaagtagaagattttagaagaaattatattgtatacgcattttactttacatgttttaaattttacttttattttcatattctttaatatatatatctacttttaatgatgcaattaaaataaattatatgctagacataagtagagaataaaaatatattgaataactcactcacaaaaaaaagtacattttatggttgttcgcagtgcaggtggtgtagtttttgatcatttttcaaacaaacccgcacatgcaatttttttaatttctcaaaccgcactcgcactacgaaactaaaaaatgcaaaaatcgcacagaaaaaatggtacggcacggtgtagtttctgcaatttggactatcaccaaataattaaactatcacaaatacaacagcttgaacaacacttgtcaaaaatatcataaggcttgaaaataaatatgaaaaaaaaaaattcaa

SEQ ID NO: 317326 - DNA, 1020 bp, Cannabis indica
tctgtattttggggttgcattttagcagttaatttaaaaaaaatattatatgtacatattagtaaaatactttcaacttgtattttgatactcgggatcccgacccatatggttattaagatataaattattaaaattaactttcgagttgattaatataaaatacgggtgttacaattttagcttggaaaaatggtttcgtttttgaatgtattacttgctcccaaaaccataatactggcttggtctactcggaccccccgtcccatccttggttactttcttgtgtgtatggtcctccttactccaatgctaagaaaactttctgggctgagttcacgaagattggggataggtttggaggctcgtggcttatcttgagagacaataattttgtgctaagtgaatcggaaagagttggctctaaagggagggacctgtttatcccgttcatctctaacttggtgaattctacagggctcatcaacttacacattcaaggagataagctcacttgggataatcacagctcaagttcgaatcatgtcaaatctactctggataaaggtctagttaatggagtgtggattaagttgtttccgagagctatcctttgctcttctcagacttgcaactctgatcataggcctattttcattctgtctggaggcgtaggaagaaaaatttaaagatgctttaagtttgaagagggctggactcgggatgataggagcaagttggtggttgatagtgcctggaactcggttattcacttcactcttgggcccctagcagggtcttcaagaaaattggggcgacccgggttgctcttatgcactggaatagatcccaatttggtaggtttgattccttaatcaaagagctggaaagaaaactcaatctcattcaaagtttgcaagatgcaagttggtactttaagaaactgctgaagcttagaacaaaaattgatagagaagccatgctttgggcgagaatgttgggtttattgccctaaataaa

SEQ ID NO: 317327 - DNA, 1218 bp, Cannabis indica
caaaagtgatactatccaaagatttataattcacatctatatgaaagagttttttttttttcaaggcatccaactcaatctaaagaatttatgaattaagcacacggttaaaatttcaatgtgttgcacaaattaacaacagcagttcaatcaatatattgggtcaattatgaacacatgaaaattaaacaaaaactaaaccaaccagcaaaggattgggctaaggatctggggttttcattgaccagcgatcagaaagcggtcaaagtcaggtaactaaactaaacaaaaacatagacataaaaattttaaatccctccccccaaattaaagatgcacattgtgcccaatgtgatataatattcaaggtgagagagactaacgtaaacccccatcagaaggggttttgtggaggtggctgatcaaaaggataaaaacagggtggattcgccaagtaattaggctcttcaatctcgacattcatcctggtgataagtgaattcagctgctgcacttgattttcatcaaagacactcatttgcgccatgtaagtttgcatgtgaatgttttgctgaataagataattcagctggtcatgtgtttactgcgtggctggatcaagagggccagcaatacgttgtggtaactgttcaacatgctcatcttcgttttcaggaggaggccttgtgactccttgctgtggtggaagaggtggctgaccatgtggatgtggagctttaattctaaacaccgttccaacatcagtcatgcgctgtggaggaaccttcgtatcataggaatattgcggcaccccatatgcctcacacatatcagtgacaatatcagctagaccaagcccacctccgcaggctccttcaatcatcaagttaaagctatgcctaataatatcccccacattcaaaataaatcccttcataatggcatagacatattttagtctatccaattgagcatcagaaaattgcttgttgggtatcaacctagcactcacaaaatacaaccaagcttcagccatcgggttcaactcacaacggtacaactgatagggtttctcattatattcatgaaacatgaattcggggaaacccaaagtcttacccatatcaacataatccaactccccttcttcttcaagcatttttaggcgtttctcttcacaggcaaaagtttgcaggtcaaagtgttgggttttatgcc

SEQ ID NO: 317328 - DNA, 1826 bp, Cannabis indica
ggacgtgatggttgctaatggcttgacgtccttccacttggtaaaataatccattgcaacaactgcgtacagtactctgcctttgcctctgggtaactgttcgatcaggtcaattccccaaatggcgaaaggccaaggactttgcatctgagttagttcgttgggcggtgcttgaggtatcttcgaaaatctctggcatttatcacatttcttgacgtaggccgtggaatcttcaaacatggttggcaagaaataacactgccttagaattttcttagataaactctgcctggctgcatggtggccacaaaattgatcgtgtacttctgaaaaaaatcgtccaacttcttcttatgtgacaaacttgagtaatggcgtcgagaatcatcttctatacataactccctctaaaatgatatactatgcagcctttctccattttttgagctttgtttttgttatctggtagttctccagtattgaggtagcctgctattggcgtcatcaagtttggggatgtatccatcatatcaacctcttccgtgctggtgatactaggtttttcaagaaattggatggggattagattttctttatcattcatgttgctgctcgcaagtcgggctaatgcatcgatagttgtgttttcttcgcttggaatttgcttgagagcatagcttttgaattgtgctagcagatcatgtattttgctcggatatgatatcatcttttcccctcgagcctcgtactctctagatacatgatttaccaccaactgtgagtcactgcagatctcaatgtgtccggcttttgtttcctgagcaagtcttaggtcggcgataagagcgtcatattcagcttcattattagacgccttaaatcagaacttgaccgcagtgtacaggtgttggccctaggtgtgacaaggacgattcctacgccggacaactgatccgtagctgacccatccacatgtagcttccaagttggcttgttttcattattgctcggctgacgtacttgtattgggtctgggttacttttgaagttctctcttctttacccgtgcattcaactacaaaatttgctaagacttgacctttaatcgttgttcggggctgaaagataacttcatactggcccaactccactgcccatttgagcaaccatccagaggtgtccagtttttgcaatacttggcgtagtggttggtcagtgtatacccgtacagggtgagcctgaaagtagggccttagctttctcgttgctaagattaggcaacaagtgagcttttctatcaatgggtaccggccttcagcttcgatgagtcttttgctgatgtagtagaccgggtgctaaatattgttgtcttctttgatcagtacggcacttacagcatgctccgttatagcctggtatattcctaattcttctccgtccaaaggttttgagaggacaagaggttttgcgaatttcatttttagctcttgaaaagctctttcacattcctccgtccattcaaattgcttatttcctcgcaagatgttgaagaatgggacacacttgtctgttgaccttgaaataaatttgctgagtgcggcaatccggcaagtcaaactttgatctgccttggtttttgttggaaatttcatatccaggagggcttgaattttctttggattgtcttcaattcttcgggcgttgacaataaagcccaaaaatttatctgagctgaattcgaaggagcactttaggggattgagtttcatgttgtatttcttgaggattttgaagcattcgtcgaagtcatctatatgccccccagc

SEQ ID NO: 317329 - DNA, 1195 bp, Cannabis indica
ttagcaaagctaaccttcgagattagtcaacggttaacccggtgttaactccaagaattggcatttacgattctcggagacttgtccaagcatttcggagaccggtctcatggtcgcccgcaagcaaagtgttgggtaagtgagaaagcacaaaggaggaggcatcactccatgaagattttaaaaggtccatgcatatgtgattgtttgaggtattttcgatggaggtcggcggtcacgagtagagtaagtaagactaacttactaagtggaaattgttggaggattttcataatgatgcgtttagaattagatcttgtcatcaacataaaattcatagatctctttcttatcattccaaagcattttgaatcgtccaatttcgacatatatcgaaaaagttatggccaaaacactaagaccactgaagtgtgtgagtggggtgtgcgagtggtggagcccttgtacgagtggtggagcctttgggcgagtggcagagccttttgggcatggtgtgtgggagtgaggttgcgagtggggtgacatgcgagtgggtgaggttacgagttggggagtcaagtggggtgaggttgcgagtggtgaggttgcgagtgagtgatgagaatggatgaaagaaggagaagatgcagaagagaaatgaagactagacttacctaagggttgaagagaagatcgctgagaaaggaatcaaaggacaaagcatgcgcgcggagaggtacgagaccgagtacgaccatgtcctcgtcgtggctagatggcgagagggtacaagtagtggagagatgccacctgcaacccctgacatctcgacgacaacagatactctacaaccactacccttgcaactcgggaccacttaacacctgacggtacacggcgcaagaccaccttctgcacctgcaacctacaaccacataaggccaacttgtctttggggaatcacaagtgtaatcaagaccattagagcctataaatactccattcttagaagtgagaagaggtgggttggaaaatcattgtaacacttgacctagagaaatacacactactttctttctccatagttattctacacttttctttaagttttcatattttgagatctccatctttgttctaggtcttacatccaaatttctattttcttgctacaatttggttgacgacttttcac

SEQ ID NO: 317330 - DNA, 1535 bp, Cannabis indica
ttccctttttcttagtttcttaatatctcactcttgtatttgtataaataggagttcaccccattggaataaacaactcagaaattctcattcactttctctttctctcttcatcttcttcttctttcctctcatctactttatattattttataacaataacgattttataacaaatattaaagaggcgaaatcaacaaataaattacatgtatttttataacaaaataaatgaaaaaaataattgtctttatttttttttttgtagaaaaaaattgttattattaaaaaatagagtcattaataacaacagaagaaattggagaaggaatttcccccaacaaaattttatcttcatccaatcgaagagcaaatttagctaaagcatgagctgcttcattagcatcttttttagcatgagatacctttgctccaggaaaatagaataaaagataggaaatatcatctaccaaatcataaaaagggattacaaatctagtagaagacgtcttattaagtgcattaactaccacaagagcatcagtctcaataatatgaattggtagttgatgctgaatagcccaattaacactaggaaaaaatgctgcagcttccatttctttaggagaaaaacaccctcagaaaggcttcgagagaccagcaatgacattgccatagtgacctcgaattaaagctccaaaaccaattactgctcctgcattatcacaagcagcgtccacgtttaatttgaaacaaccagcttcaggtggatgccatttaggtcgtgtcttcgcatgtggagacccttgatgagcctgagagttgctgttgttgaatttcgcaccagttgcagcaggttgttgtgatgtagccttgtgatattgagccaaatgagaggcagcaaaggtatggataatgtctgcggatttcggcttagtaccatgaatctccttgtttcgttcagaccaaatacaccacatgagacatgtaatcaattctaaatcagtatcattatgggcagcagcaacgtgggaaaaaaatatcaaaacctttgatgttaccaatgttcaggatatacacattgaaatgacactttttccacactgacttagctctatcacaacgaaaaattgcatgaccaactgattcccagctgcatttacaacgtgcacaggcagtagaagaagtgatttttctatgagcaaggttaacagaggtaggaagtgcatcattgattagtctccaggcaaaaatttgacttttttggggaactttaaagaccaaaaccagttccaccattgtgtatttgaggatgatgatgaatgatcatccattgaatccgaacttacagcaaggtgatatcccgatttcaccgtataaaaaccagtatctgaatggtgccaaataagcttgtcttcttagggaaaaggactaagcgaaatagagaggatacgctcaatgtcaataactccaaaatgttgctctaatatctgagtattattcggttttgtgccctaaataaaatccatttcagt

SEQ ID NO: 317331 - DNA, 1326 bp, Cannabis indica
aattatgattaagatattgagtgagggcttttgtggattgggctttaataaattgagtgaagtgaattaatatatgtatatatctacatgtgaaaaatttaatgtatatatttgagtgagggcttaagcctacatataggcataagtccctccgtccctggaggcacatatgtgcactaccatggtctaacacatggagtaagatctaattctgtgtcaaaaggtggataaccaccagctcgagttccaaatatgatatttttgaatgagctctgggattaccgagccaaaaccttcccggatcgcaatgatccattgccattccaaaatacttgaagctccaggtaactctgatcctccccaattgcggatggatagtaagggtcctggatctttatccttactcgccaatattggggaccttttattggctcccgaaatatgacaaacttgaacgtcttcaagcagtaagtatatactaatcacatatcgtttagagtggcacccttccgtgattgccacatgttaggcatctgggaatacggattacaataacctatcttaagactagtaagaatctagtcttaaatttaataggtaataacaagtcaatagagtaaatatggtatactcaaattgtcccatttatgaatgagtatatatggtgaaaattggagggttaaagccaaaagtttatttaatggagcttaagcttaagaaaactcacttaagcttataagaagtgtctaaagaattgtgagacacttaaacttcacctatatagattaggggtggtgccacctcttataagaattaggagttattctctaaaaagtccataaattagatttgttcacatggccataaacggtgcaaaagtaattcataaggttcttgagtgaacatagcaaaggtgtgtgttatcacaaatttattatcaaggaatagtggttcaatgttacgacaactaaaattttgacaaactttatggtaattatactaagataaaattcaagtcgaaagacattttacactatgcactaatgcaatgatttttattagagttgagttatttaatcaattgggaaaatattatattaatttataatatataatgttagttgattaagtaaaatattatgttacaaaattatttgttaccaataagatcttctttaatccagtaaattttatttatataatataatatctatattaaataatataagtaataaataaattatagtgtgataaataatagggaaattatcccatatactattttttaaactttttttttaaatttacggtttgagtttctaaagt

SEQ ID NO: 317332 - DNA, 1016 bp, Cannabis indica
ttctaaattaatcacaaccatttaatagtgatccaatggttaaaaaaaaatgcaaccatgatggttacaataaaaatgtaaccattgaaacctcctccatatatatatgaatatttatatggtgtgtgttaatatatatgataaatattttttttaattgaaaaacttttaggagcgacatatatgttgttcttaaaaataaaaaatacttttctggaaatgctttttaggggtaattttatactatcgcaagttcaaaatttcgtcgattacttttaggggcaacattattgcccataattataggtgacttttttgttgctcgtaatagtacttgtagacgcgaaatattagaggcgactttttaagagcgacttgttgcttctaataatcattagaggtaattttctatagttttaggagtgacttttgtcacccctaatacatatatttattgcaggtgtttatctttaactcctattatgttccttataattaaacatatctataaaattgctcagttgaaaaatgtcagaaaaatatttcctgacacttaaaaattatcgacaatactaagaagaattactcattgttttgcacaatcacctatactatgagtgatggtgccaaaacaaaaaaatttaagttttacaacaacattttttttatgttgcattttaaaatagagaaaaaatacaaattttatgccttttttttcaccagcttgaacattttagattattacaattttatataacaacaaaaataattaatttaacattatttgtaatttaaaaatatttgtaatatcaaaatctatttaactaagttaataaaaaaaaatatacaaatcgtaaattatataaaactaattacttaatgaaaaaatataaacataaattaaaatgtaataaacattagtctcatcatttgtatacggggtgtcgaaccttttatcctgaaaaataaaagaattgttataaatattattaattatgtggatgtccaaatctttt

SEQ ID NO: 317333 - DNA, 971 bp, Cannabis indica
ttgtattttttaaaattttacaaataggaccctgaactaattttttgtcaaaataaaacttaataataatatgatttaaagatgttatgacaaaattggttacattttctgtatctgttcgtattgaaaactgtcttaaagttggttatattaaaaaataaaattgttgaaaattaaacttagggtcctatttgtacaattttggaaaataaagggtccattttgtcatttaacaaaacagatggttcagttggtaacttttgcaaaatatagggctcaaaatgatatttacccattactcaatgataaaaattcatataatttagtttgtaattcaaatacatagcagtgacaaagagaaaatattaataccttgtaatccttttttatttttgccaataaaagtatggtggcatccttaattgctccaagtgcttttataaaactcttctgacatcttcactcctctccctcaataacaaatttctttaaaaatacataccaaattgtaaatattttacaatttagaaccaaaattcaaaattaagaaattgaaatttacaacaaattttaatacacagttaattctatgttctgagttgataaatcaataacatttcattactaaactaaaagttttaaagttaaaaataattttctaagcaaaagagtttgaaatctatctttttcacctacacaagagttttttaaggtacctataattaaaaaaatcatattaattattaatttccttcttttctacttcacaactatgtcatagttaaatatacttagctatttcaaaaaaaaaaatatacttcaatatttagaattctttcaagtaccctagaaagcttgcctatacattcttctttccttttcctatgtcatcttctctgactacttatatcaagcttagccactggatctttcaatttcttttctatgttttatgtgaaaatcaacagttt

SEQ ID NO: 317334 - DNA, 1757 bp, Cannabis indica
atttattttaaaattacgtatgacatttgaaaaaaaaccataactataactaaaacctaaaataaaactaactatatgtggctagacatgtaatttctacctagtatatatactacttgccatttcatcacgtatatagctccatacacaacacaatatcttaccgggtaagcctttaatacatttttaatgtgtgttttggtaatttttatccgttttaatacttaaaataattttttagtttaatttttttctcatgattgtatatattataattatttaggacaattactaaatttatataaaattttgagtagtttacaatatcgaaaacaaaatttatatattttgttgatgcgcgacttttttttatgctcatagtagtaattattgtttaagcctttctttttttaaattgtaaactattcgaaaatttttaaaaatttataaatgatgttaaataattacaacgtatgtaatcataaaaaataagtaaagtgaaaaaaaaaattgaagggcaaatagataaaatctactaaaagaaacttaaaaagtctactaccataataatattactactacaaatgcacacactgttgtacgacattaaattaaagtacctatacaagattagagttgccttcactctctctctctattataattactaattaggccccacacttaattagtttgtggattttctttttacatatactattttcctactcttttcaaccctatattttccttttgataataatatgattgtggacattaactagtacacacaatatttgtttagagtatagatttttcaaactgttatgtttgatctaataaaatatattttatacaaacataatattacaagtttttatatataatgaaaatttgataagaaccatacacactatgttgagtttcaaattggttaatgattatattaatttgtctcgaacgtttatatattagttatttatttgtgatgctagacactaattatgtagtcttataatgatattatatttatatagttcttgtgattatcgaaaataatgatgatttttatattttttatatatatatatagttatttaattgatattataatattcaatttttgatttaaaaaaaacagtaatcccacaaatgagcttttatttaatttaatgttaaatcacataattttaggtcaaaaaaaatacatatagataagatgttgtgagttgtttgatgtgtatgatttatatgtagctagctagatatacattatttgggtatctgttgtcgagcaaatctactagtaactctaagaaactttcgtgttcactggcaatattgaaagtttatgtaataaataaaagggaaaaggttctcattatatataatcatttttgtttagttatattaaaaaatattaaaattattattattcgtaagtatatataagggaaatttgcggtaaaagtccccaaaaagttcacgttgatacaaattagtccccaaggtccaaaaatagtcgcaatagtcctcaaggtcacactttttatttgtccgtcgatacccagtttgacagcctcgttaagtactggcaagaatgccacgtgttgaagtattattggtccaaattttaattttaattaaaaataataaaaataaataaaaaataaataaataaaaagtttaatattattttattttcttatttaaaattaatttcttttttctttttcttttttttttctttttccttt

SEQ ID NO: 317335 - DNA, 1993 bp, Cannabis indica
atcagattgtaatgagttttatttagggcataaaacccaacattattagcattttatttatgagtgattaacctgaaaattatttgaatatgtgatatgtgaagttaaatgaaataattgcccttgaaagtttgtgtatgtgagatatggccctaagggcattttggtaattttgcatatcttgattatttacaacaaaagataatttagaatgaaattaaaggatattttctggttctttctccccaaaaccggccccctctctctgtatattctttgtttcagttattaaatttgtgaggagttgcttggtttcaatcttggatttggtggcttttgtgctatagtttaaaaaagatttgaggtagctcttcttactgatttctatttgaaattgattttgagattttgatgattgaaaagcatgaaaatgtgttgtgttgctcttgaatgcatgtggatagaatcggtgttaattttgatgtgtgttggcttgattgtatggcctagaagtggaatatgtttttgatgatttatagatgagattgtagggtgtttttcatgtgtgaatcaaaattctaccttatgttttgctgctgaaatttgaggttgaaagcatgcttgaagttcaagttcttaagtatgggtttttggtgagttatgctcaagtattgagctttactttgaatgttgattaaatctgaatttaaggtgtttgtatgctgaattttgagccttaatgtatgtttcaactctctgtatatttattgacaactgtaatttatggtttgagagtttgattaggttttgggcttgaattggtgtgtttatgcatgtaaattcgaagctgaaattgggtttttctgggtttggaacccaagggccgcggcccagctccttgggcgtcgcggccagtcccttgtttttggacagattcgaatgcaattttcgaatactcataactttgtgatccagactccatttctagagttctatatatggttggaaagctcgtttcgagctctatgtgaatatatgtgatttgaatgccaattttatattatgtgaaagttgaactaaggattaaccctatacttgtaaatcctaaaatttgtgactaggattaccgacacttggtcaggagcaccagggaatttagaatctctacgtttgcgggacatcaggtaagatagtagtttgtatgtagagttaagcacagtggcacccatattgtatattatgattgtgattaggtgagaactaggattaggattattaccctaaaatgagcggctatatggtctagggttattaccctagtaattaaaatattttgagtgttatgccattcgtactatattggaataaagaattatgcgcctaaaacataattaagatggactcggtaaactagtacctcgagtttaattaaatgtggtctaaggtaagaaagcgatgatgtatggtaatagtgttaatcaagggaagacattagttagggtaattaccatcaataggtgttattttgagcatgctgtaatatgttgtaggagagattatttagtatgcaagttagggttattaccctaagattctatatgttatagtatatatcgagtgcacgcatttatgttaagagttatgtgtataagacataactgtctatcaccaggataaatcaccgaaagaacgtaatgtatggattacatatatatacatgaatatagggttatgcgagtaaggcataaccaggttagactcggtaactgtaaccgagataaaccctattaaggccttattgtaaatagacgtgtgagcgtaacacgtaggtctattaaggcctagaaattctgcttccatggtagagtctaacgttgcagtttgtttagcacttctccaaacaactacgccacccgcaagagtaaattccatcccagatgtagacttcatgtcatcaagacaagcctagaaatttaagtcggtatagcctacg

SEQ ID NO: 317336 - DNA, 1281 bp, Cannabis indica
  modified_base (1207)..(1207): a, c, t, g, unknown or other
tgcaccccaaactgagccacaatttgaactacaacattgagccccatacaacaccccatactgaacctcaagcaacaccccatatcgaaccctaaataaaagctgagccacaacctgaatcacgtgttagaattatgttttttatacattttatagatcttaatgcattaaaaaagttgatgttattgataaaaaatgaataagttggtatttctaaagttgcatagattttaatttgatactttgttttctttgatttacagaaattaagtggattagaggagactcgtaaaagattcaaagagaggaggatgaggcatgattcagttgtagccaaacttttcagttgcacccaaatagagccacaaactaaaccacaaatagagcgtcagtcagaactacaatctgaaccaaaaacttaactccaaatagagccacaatgtgaaccacaactgcaacccaaatagctcaatctaaacccaaaatacaaacacaatttgacctccaaactgcaatcccaacaacccaaataacatcccaaactgcaactcaaacaacccaaacaacatcccaaatagcacccaaaactgaagttgagtttgaaatgcatgaggaggagtataatactgaaccagatgtggagatgaatgagaatgtgcaacatgagaatttttcttggtggaggaggcatactgagttggttcatgaaaatagttttgaagatgaaggtgatattggtgatgaaattgaaatggaaagtgttcatagtgatgaagagaatgaatgtgcaactccttataaggtttcatataatcctgagacaaaaatggacgatgtggagttcaaaccatacatagaattttccacaattgacttgctaagaaatactattaaggaacactttattcacaacaacaagagtacattctgctggctactgtcaagtagaagtttagtgtaaattttctgaatttttaaaatttttacaggatgccttaaagagcaaattggggcataacccaatacttttactttgctagcaattaaccctcaaaactcaaattttgacaaaaaaatctccaaaacttgtgtcttttagcaattagtcattaacatccattttcatatgttaactggcagattggttgtgtccacgtgtacacgttttacacgtcacacaattttattggttacacgtaaataattnttaaaaaaataaaaataaattaatttaaaataaaaaaataaataaatttttaaaaatatttaaaaattaaaaaa

SEQ ID NO: 317337 - DNA, 1902 bp, Cannabis indica
aactgttggtgttgttcgtatcacaattaacctaaccctagattcaatcaattgagccttgaattggactatgggctaagttctaaggtagtttggacttgttctctttcgaagacatgatgccaaagtttagtttacctagggaaacaacaatggtaacctcgaataaaagtaaaggtctttccaacgaatattttgttaagctacaagactctggacaagccgtgtctctcaaaaagcaatgcttcccatcaataaccttatctataaaacgtttaaagcaagtaaatgttttttcatggcaaagtttctattgaataacctaattctctcgttgtttatttctaatattggttttctatgtttcagctgcagtttgaagagtaaggcaggcagtcttagattttcttattctagaaactttgaattccaaaattacgaaccagggataaatattctttctacagaaaagaagatgttcttggaattcataattatttaggaagaaattcagagaagggtattgctaaaataataactaccttatctattctgggagaaaataatgtaagaacatatcaaaaaccaatatatgtataatataataacgaaaggaaaatataatgagaactactggattctaggttcttgtaagacgcagatggtttcttactaggaatctctggtaccaagtgtccggaatggaatgagaatgaggtgtgaaaaatatgttgttgattaaacgaagaaaataagtcaaagacaagtcttgcatgcaagagtattttgaagaaaagtagattttttctctcccgctttgtatttcatatgaagtaatgagaaaggtaatagtaaaaacctttttcataatgaaagaaggaagtcactgatcatgttttaaattagattaattaattgattgggatattctcagcaattaaaagaaatagataaaaagcccgtcacatgaagcatgtttaattaatgattaattaacctttcttggggaaagtaaaatcgtcaaagaaacatactcattactgactagaaaaagagaaaattatcccaccttgaatcgtttaaaaaaaatcttccagttccaaaaagagctttttatgggcaattattttgcccatatttctagccataactatagacatgacacgtggataataataccacacattaaaagaatttattgaatacaacgattatcttttcccaagataagctataataaatagatattggtctcgtgttgtgccacaatgacgacgatgataatacatagagctgagaagtaacaatattctaagatcatcgcgaaagctaactaggataactcaaaaaaaaatacaagaattgaagctacatcattggaaatggtagataacgagttctttaaagagcttgcagttcattgacccacatactcatgagtatgttaaaagactatggaaaataagccaggagcgaccaatcttgaaattcgaaaagactagttgaagaattgtcgtaaaaggcaatggcaatgctaaacatctcaactagcgtctcccaaaacatgaccatctattgctaaacataatagaagagtgcgagcaatgggtggaatatgttacctctgcaatggcaaactgtttcatgataagaatgaaaagcggttatttgcaattatttcattttgtccacatgttgtaaatatgaaacataggaattgttcatgtttcattaacggtgacctagataagattgaaagagaataattgacattcctaaaattcctataaataggagtagaacctaccaggaaaaggatggatcattttgggtggaaaaatcctatgagattgagtgaatatcccgagaaattctcttgtaatccaaacacattaaaaagaa

SEQ ID NO: 317338 - DNA, 903 bp, Cannabis indica
catatcaaaataccaataaaaaaaacctaaaaaaataaaaaaataccatataaattggccaaacttaaatgtgccatatttatcataagaacttttaaaatcacatactaagtgtaatttcctctaattatatatctatgtgctctgtatgtgtcctgtagagaaagatggtatccactttcccactttccacaaggctggggcttttatagagctcaatacttagccagaatgacacttgcaatagacttaattaggatatattggaccaccaaatattaattttataagcttttacaaaaatcaaaaccctcattaatatattaatatacacaaaccatatctattttttcttttaagcaaagtttttgtgatctagattataggaataggttatgcatatgaaaataattaaagtttcgtgcatatcctgacaattgtggaaagacaacaacatgtacaataatctagtcagaaattttaataatagtttttgttgctcatccattatgatcacacattatactttatcaaatttaatcaaggatttatctattgtcttaattaattaaaaagcttccctcgatcgcttatactcttggattggtttcatgtaatatatgagcaactcaataattttatggtatttgggcccagatctttttttttgacaattgtactctaattatatataggtatttataaaatgtgtacatgtcatcaagtcggttttcaaccttatcacaactcaaaatatgtttgagaaacaactttggttagaacacaattcgatatgtacacccctatagaagagtatcaatagacaaagatttaggaaagtttggagtttgctatgtaggctccaccccatgtccaaaaaaaaatgcttagtttcttaaatct

SEQ ID NO: 317339 - DNA, 1009 bp, Cannabis indica
tatactaaataaaaatatatcaaactccaaataaataatattaattaattaaaataatttatcacaaattatctatcttatattcttataagtaattttcttatatttttctataaaaacaaataataatttaactataaataaataactttaataatatattggatataaacgggtcaattcatgtcgattttgtgtcacatgcattaaccctaatccaacccaaataataatcaagtcattcaagtttggccaatttcgactcgcgtctatttttcatgatcctaactcacaataatttgtaacgagttcatgtcgtgtgatcatgtcttgacctaaattgccacaacgcgtacctcttgtacacgtgtcaaatttatattggtccatatatttatttgaacataaatattgcactcctataaaaaaaggtgcactgatgcactcctatatatttaagcatttaagagaatttttttagtctgattttttttatagtcgtgtatgacataattatttaagatatccgataaaattttgagaaattcaaaataatttacaacatagaaactagtgttcaaatctcacacgtgtacaatgtaaaattaacacttgtacaagtgcacatgtaaatagtctaacatgatatttaagagagaaacttgatgaaaaagctaaattgcattttagaaattttattgtcaaaaaatcgatttcaagtattagttgcaagcatagtaaaaattttataaccgcatctaattctaacaaattgttgatataaacctccacttacactgatacttaaacaacatacaaggacaaaactggaaaaaaaaagaaaaaaccctaagttggccttcagcctctagaatccctaacagaaattagttagaatggatttggttaaatccacacctaactaatttctgtaactactactaacacatttagaaactagaaatagaaaccctagatctatatatacctgcatctaagctcagatcta

SEQ ID NO: 317340 - DNA, 912 bp, Cannabis indica
ttaagcctaaaacaaagctcaagatcaaagccaaaacatacccaaagcatggtgcacaacaacataattgcacataatctcacaagctttgaaactcaaacattcaaagcaaagtcccagaaattcaagtgttctacccagaatttaaacaccaaattttcataccacaatcatctaaaacaatctaaaagcattaattacaaacctaatagcactagtacacaatatcactaaaatctccttaaatctcagcaacatgcatccacaaacaaagaacatcaagaacatccagaaacacaattaagaagctttgaatatcagaaattaaagtaagaaaaagatattaaactagctaccttataatctctaagttcccaagcaagataatccacaccaatttcaagctttttccttccaaaaatattttgaaacacaaaaatggagagggtgagagagaggcggtttgggagaagaaaaacctagaaaataattttcaatttgataaaaatctgatttttttgaataataacttatttggccaaatgaccaaaatgcccctaaggcacacatattaccatatacacataaaaaaggcaatcttgtcattaccactcacacacataaatcacataaactaaatttattcatttaacacataaattcataattaaattctaaaaatatattttcggtcccaaactcggttcggcctaaaatactcggttgtgactataccgtgctgacttgttagaaattacctacaaaaagacaaaataaacataccatataataatatagtccataagcacaatatactataaaattatgattttacccttctcgggtcaaaattacgaaaaatacccctgacacactaatgtgggtcttaaaatgcaataaatcataataatt

SEQ ID NO: 317341 - DNA, 703 bp, Cannabis indica
gtaattagattctatgttattatatgtaaaatatatattgtatatataaaaataaacattaaaattttttacctttatttaatggatggatcgatctaatctaatccaataaatactgaatataaaatattagatggattcaatctgataaaaaaaaataataggtctaaaatattagataatccgaattaaactaagagatatacatcaaatatattcaatggaggaaaacgatccaatccaatatttaatatatctaatccaatatctaatcagatcggatggtaaaacttatatctaatatataattgaatcgaatttaaatagacttaacattgaatgtgattcaatagatactcctaatattttggattgcattgtatcatacgctcatgtatttttgtattcttatctattttatacttttataagtaaattaattaaaaaatataaaaataaggcacatgtactatattcactcaaataatacatataaaaaattaattttatgattactatgtcataccttctattaaaatataattttattgtttaatattttgtttcatcacttaatcaataatattttctaattgaattggatgactaaagaagaaagaaaaggaaaacactatcatgattcatgaatgacatggattatatgaaaagtgtttgttatgttgatcaataaacaagcctttgt

SEQ ID NO: 317342 - DNA, 649 bp, Cannabis indica
aaataaacaattattgtaaaaaaaaaatagaataactacgaaatacaaatcatggttcgaaccaaaccaatccgtttttgagtggtttggtttggtttgatcatttaatttgtctgatttggttttaaatttttaaaaaactgtaatataagtttgatttgaaaaaattaaaaattcagactaaactaatctgtgaacactcttaattttgaaattaagattcaatgaccgatctaatctaataataatctaacttttgtcaaattaaattgaattgaattagttgggtttattgaatttgaattggaccttgcctccaaccatttgggtagtgtagttgacaaaactaggtagttgaggcaggtgaggacggttgataggagtggccgaaggaggttgagaattataataatatgaaatattacttaatttcattattaattttctgtcacactaatgattaatgaatgtgttccagttctgtagaaatttctcaccatactcccaaaattaagctacccacccacaataaatattttatagttgtcatttttatgtcaaggtattaacagtcttctcttatttgtcattgcaaaatgtaaatttaactcttatttaatctatttaataatatatatatatatgaaac

SEQ ID NO: 317343 - DNA, 920 bp, Cannabis indica
ttttttgttaattccatcatttaatgtttgccacaaaattgccatcataatacatatttttaagataacaaatgatacttctaattttaaaaaatatatagggacttttttatttttacacttcaaaacatttttttttttttgcatttttacgaaattctacatagaaacccctattgcaactagcgatgcaacctaaattgcaataaaaaattgtacagaaaccctttgtaactagcgctgcaaccagtttagaaacccaaactgtaaattttaagaaaaatttaaaaaaatagtatatgaaataattccccaaatttatattactcattcaataatacaaatttatatactagatattagtttgcatgtttagacttgcattgtttttattacctaattattaattaaaatattaaatctaatgtaattaattctataaaaaataaattcaaatttaaatttagatttgtattgaaaaatatctacctaatttatcaatatttttaaataattatatgagttacattttaataaataataataataaaaattagatattttaaaaacaatgataaatgaattagtagaaaaagtaattaattatttgatttaacatttaatgcaaattttaattaagattcatttaaaacttaattttttttatattgtaaataattagataaattatattttcataaacaataaaataaaatttataattttttagggtaaatacttttttggactctgtgttttgtaaaagttacagattggatcttctgtttcgttaaatggcaaaatagaccttaaattttttattatggtacaaataagacttttagccaaattttcgacagtttttttaataaccaactttaagacaattcttaacatgaacaaatgtaaaaaatttaacc

SEQ ID NO: 317344 - DNA, 1304 bp, Cannabis indica
tttaataattattataaaatatacaacaaattatttacaatacacctctacatggtaagtactattgtcacacacgcatcaatgcatcataagatacttgtctattctattttattttcctctccttttctatttttaaaatccggttaggcaaccaaacggaattgattttttttttttcatgttacttgtaagatgaaatttgaaaggtatattccgaaccttctatacttcattttaaaaacaaattaagtttgaattatatcatttgtcttagttagtcataattatatataataatatacagtacacactccaaaaaagaatttctttccctgcagccggcttttgcagatacatgataattttcataagctttttagaatgttattttattagtcgtacatatagtctcttctcatgaataattttctggatttgaattataataataaaatacaataaagagttagaatcgaggataattacaaagaaatgaaatatgtacaagaaacgacaaagaaaaagggtctctatcaagtaattaagatgaatatgttttactgtacaatgatgatgctggctcctttgaaattcacctctaaaacttaataaagactctgactcgtttataataataataatgacaataatatctttcgtttttctgcctatggttattaaataattgagtagattagcagagttgacaagtctatatctggacagaaaaccaagcccaatggcaaatggataaaaatgaaaataatttgggcccaaaagaatgacaagtttgggacttgccagatcatgaatccatgataatacaactgagtgttgtacaataaaactcttgtgtcaagaagattcacagcaatacaggtaattatttggataaattcccacactgggtcctcttcaaataaaaacaaaaaaggctcaaactggatcctctaacattaaaatatctacaactccaaatatatttattaatactaagaataaaaataaaagcaacaatacatcatgaaatatcttctaagaaaaatattgggtaaaattttgtttgatgaacttttttttgtacagataaaattctcctcatgtcactttggatatatatttatgcatatatattttgtcctttttttgtggcaatagtttgtctatctcaattttttaaaggttactttaggatagtatgtaagtcaggaccgacctaaatattttgagagttttgtgcaaaattttaaaattggactctttagaaagaaaaaaaaatcgtgtacattaaaactacaatt

SEQ ID NO: 317345 - DNA, 1207 bp, Cannabis indica
gtaatatggggtttatttcaacagttactaaattattaaaaaaaataataataaaaatataaaaggaattaattaattaatagtattaaataatagagtgacatataataaaaaagaatgtcagacatttttcatgactctactcaagcatttttcaattatatttactttcatggataattaaacaacttctcaaaaataacttttgcaaacactttttatttagaaaaactataccataataccatcaccaattaatcaccgagcaccatcaattaatcacctgggccttggagaactcatggaatacaatacatatcttctctgattctctagtgttggttagtagtttttctaagttaatttgtctggagtgtattgcatgtttctttaaaagttttaggtttaattaagaagtttagtatttgtaagtttccttttgttcgtgggaatttgaattcctttgcggatggtttagctacaagtgctagaatatctagcttggatgctggtttttgtattggggagggagtgtcccctgtcactcgcatcttttgctgttaatgaacttttgttctttcaaaaaaaaaaagcaactccctccaagtactcttctgcactatccatgtaggtttcaatagcattcaaaaaagcttcattggaaagatatatgtcatttatattagtgacgtatacatacatatcagttaatatttagtccttttatccatttcaaaaaaaatatatatatttagtccttttatactttttgtgctatttaaaataaaatttctccataatattttttttttcatgcatgtaataattaataaatctatcaagttaattacttttaatttttttttaattaaactttctctaattctaatatatatatatagataatgctttaataaaagtattgaaaataattttatttaaagttattttttttaaataggtgtcattgttttattttatgtctatatttaattttattttcttatttattttttcttataattatttgtcaaaaatattcatataaaaaaatggactttttaatttttacacttcaaaacagttttttttttttgtatttttacggaattctacatagaaactcctattgcaactagcgttgcaacctaaattgcaacaaaaaatcgtatagaaatcctatttcaactagtgctgcaactacttt

SEQ ID NO: 317346 - DNA, 1174 bp, Cannabis indica
tgataaaataatttccaacaatgatttggtatatgtcaaagttttgggagaaaaaatcataattacccatgaatttaatacacaaaaacatttaaagaagtgatgtcaatagacatgataattattgagattcatttaactcaggatggcatttggagtccattgagtttgagtcttcctccacttattgaaaatatatatcaacaaaaacgaattataaataacaatttaaataaacaaacaggcaatataataatttataaaaaaaaacatagcacagtctaatttttaaatgtaaatgtaacgcttttgttttaatttattactattatttatgaagtgcctctcaaggagagaggtaggatcttccataattggttcttgatgtgatgcaagactgtaaaccagaacatgtgcgttaatgttcaaagtagttagttgttctgtttattctgttaggatagttgtttcttgcattaatctgttaaaagagtttgttactctttcttgctttgtatctttgtgctatataaataagatcataagctaaccattttggttaagctctttttggcaaatactctgtttctacgctctgcattaatttactttcttctctgcttttgagcttcttcatggtatcagatgcccttgaccaccgtctttaatggcttcccctgataatgctatcgcttccgatgttcaaaccgataacccaacccctgctactgcaaataatactccaccaccatggaaccccttttccaattctcttaccgcttccctcaccatcaaacttgaccgtaccaactttcttgcttggaaatctcaggttgttccaaccgtaatcggccatgaactcgacaatattctctttgctggtattcccccatcccaaaatctggttacaggtgcacccaacccagcatatcagcaatggcgacgttgtgatcaactccttctgtcatggcttcaatcttccatgactgaaggagttcttggatcagttgcgcaatttaccagctcctactctgtttggcgatccttggaacaacgattttccagccaatccaaagcacgtttgttgcaactcaaaggtcagttttctaacattcgtaaatgttctttatccatatctaactatgttgataaagtgtatgttggaaattatttt

SEQ ID NO: 317347 - DNA, 3037 bp, Cannabis indica
ccgcccctgaccggagccactgcgccccgaaagtcgattgcctcctctgagccgatgcccttaattccaggctatatggcttctcttgcaaatgcagcggcttcaagaaaagtcttgggcaaaacttctccgaatgtcctataatcccacatatgaaacaaaaagttggtagtttttcatatttaaaatttgcctagtaccatgagagattatcaatacttatcttcatccttcgtttaattggtttatcaacatttatccaaaatctaacatgaaggtaatccctccaaactcccacaaaattgttaggatccgattcaatgaacgtatcgatataattttcgagcgccatcacaacactaagggtcatattacccgtttgtagattgtggatttgaacccacatatcaagatggttgatttcaacaagcctaggattatcaccatccttcaacctagtaaagatgaatggcttttgatcataggaccatggactcccatcaatgaccctttgtatatcgatctcatggtaaaattggacaagaaacaaatttgggttgagttccttgacgtacattcccatccccgactgccaaagaaacgccatcatgttttgaaagacgttaaaatctgaaactcgacccgttaatagcttgcccaccaaacaccatctggtgtctatcgccacttcttctatattactccctgggattcttaagacttctgtctcttcctcctctaggattataggttctttcctaacctccaggattctccccttaccactacttgatgccatcggataccaacacacagtcgaaatcaaaacaaacaaacaacaaagcactcaaaacaaactctcaaaacagagagacagaaaacgtatcagaggatacgacttcttgaaaaattatatatgctttaatattatatctatgtttattaatttagagcattctcaatactaattttttataaatgttgtattgagatcataaatcatgcataaggtggtcaatcaaacacatgtaataagtataaatatgaataaatcacaataatagaaaagaaagaacaatcaaatagcattaatccatagaataatctcaatcaatattcatcacatccctaaatagagagtttagctcataatcaaatctataattaaacaaaacacaaataaaaatataagaaatcaagagaagagaaagaactatatggaaaattttcacggatcacccacgctcgctccaagagccttctttttgtgttttaaggattctattttgtctatctccactaaaattcgtgacccccttcattaaaatagagtttttcatcccaaaattgagaaaagataaagttgcggtcccgtacggagctgtggtcgcgaccacagatagtctagtcgcgaccactgtggaaaagtgaaaaaagaaaaccattctgcccacttttgatcgcgaccacggaattcaattttttactttgacctctcttagtaaaatatgcataactttcacatacaaactctaaatgagcttattcaagatgcatttgaaagaaaaaaaaaagatctaaaacttttatgctttgacattttccaaattctgatcagaatatagtctaattcaggcttgaagtttcatctttattttctcacaaattttctctattttatagatcgttgttttctgaaatttaatcaatttatatattccaagtctgaaacttaaaatcaaagaaaacaagcgtaattctattccaaaaataataacaaagaagaaaaataactataaaaaataacctaaaacttaggctaaaaatagcctaacacaaaacacgattgtggtaagtttcgtttgtattacatatggggtattattaggttttgtgaggttttatgttagttggctcgcaatagatataactattgcattataatttcattacagttgacttacaatactctaacttttatactctcaggaaaaagttgcaattctataatcttattagtagccctcaagtctttcaattcaaattctattttcaacaaattcttcaagttctcaatcctggccttctctttactaattaacaacatgtcatcatcatataaaattagatatatggtcatcatgatattttttccttttagatacaaacatgtatcctaataactcttagtgaatccatgtttgaccatgaaggagtcaaaccttttattccactgtctaggagactgctttaacccatacatgaactattctagtttgcataataggtgttctttgcctttttctacaaaacccttgggttggtacatgcatatctcttcctctaattcatcattgaggaaagcattggttatatccatctgctccccttctaggttgtactttgtagctagggcaagcataattctaatagttttatattgagcaacatgtgagaaaatctcaatatagtttatactctctttctgtgtgaatcctttagctacaagccttgccttgtatctaattggatctccatctttaaccccttctttatgcttgaataaccactttcatgcaacaatattcttgccctcttgtcttctcaccagtatccaagttctcttctttttaagtaaagtcacatcttcacccataaccctgttccattttgctacatttttggacttggtggctccttcataacagtaaggctctgtgttgttcagttccataacagtcagaaaagcataagccagcacttcattccagagattaaaactgaacattcgagtaggtttgggaaccctcttttctctctccaatgagctggtattcaatgatgtcttctgggttgtttccagattgattcacttttattttttccacctaacctctgtcaggttgtgtcactctctgatcagcttcagcttgtgctagttccacctaaatagtttacggtggtataagtattgttatagtgcttgaatccaaattaagcgttaagcttatcaaagtccccactcgacactataaaa

SEQ ID NO: 317348 - DNA, 1129 bp, Cannabis indica
tagaataatcataaataaggcaacacatgaaagcaaataatagttgaggccaaagcctcaatatcgtttcccttctcattttcactaatatctcaaattttttaactatatcttaattagctaaaaattgagatatgcaaaaagtttagaggaactatcctttatatagtctcgatctatatcaaagtatatacatagatttaaaattgttacaatttgacttatttcaattttgttagtacatttgataataaatttcataaaatcctaaatgtaggaatctaattttatcttctgttgatgagttattgccatttattacaaattaatttaaatatattaaagattatgggctaatcttgattgataacaaaagttgacattatagaagaaacctaaaaggctaacaaacttccaatataacctccttacaaagttacaacaagttctatttgcaaagttgtcatcttctccttaatattactttaaacataatatatggttgttgtccaatatttcttccagaaatgagagaactacatttttcctttttttttgatatctcaataattgtaatcctaaattttgtataaagatgtctatttttttttgtattattttaaatatttgtttaaaacaaacatatttattaagtactagtagtgccttacactaaccatgatgtggcgacttgtgactattatcaaatttttcataacaacttctgaattaaattatgtgagactcaataataaattgcatcaatattaatatgacacttcatgatagtgttaaacatcatcacaccccactataaaaggcacatttagcattggtgaaaaatgtctatccatgtaattgatcgatgcaatagattaccctaaatttgagtcgtcaattgtgaaatcgatacctataagtactcaatggcatcggtccacacactaatacaaaaatttaaactgaggccagagaaaaaattaaaaatatatttgaccttaagctaaaaatctagagaaaatgctcgaagcgtcttagtgttagtttacctctctttttagttaattttcttatgggtttctaagttcccttattattaaggcggacgatgaaacctagtgtatttaat

SEQ ID NO: 317349 - DNA, 676 bp, Cannabis indica
aaataaccccttaaaaaaatatcacaacaaattcaactcaaattaatggttgaagaagtaacataaaaagttatatatgaatttagaatgttgtgtattttccaaattaaaattgagacgtacaatattttgaaacctatatttttttggaaggtttagttttctttttaccttataaaaaactactaaagtgacacattctttaacaatatattaattaaaagtaataaatttgaaataaaacagtcaaaagaattctatccaaacttacagtctatgtctttattactttatagattacaattcttcttttaatatattttattttcttagacaattaagtattcaaagttttaagtttatattataagcggtataaatttaatatttatttttagtaatataagtacttaatatttataaaactaaaactttttttcgagttttgttagtacatattttgttttgaatttattaaaagaacatttagaagtaactgatactatatgtttttatctagatgcaatgatttaaaatttagaccttatatgtgccttgtttaagacaataacagagtatgtgctaacgaaattagagaaaaattacagttttacaaacaatgagtacttatactgttaaaaataaacattaagtttatgatacttacaaacttaaa

SEQ ID NO: 317350 - DNA, 933 bp, Cannabis indica
aatttgtttcttaaatatgtactttcattaacttaaatcttttacatatttttaggtaatctctttttttttttttttctgaaagaaagaaattaaacaatgtaaaattaatattctctataatttttaacaattttttttgttagaatgcattattttctcatctctaaatttgattattttttttttctctttcaaaaaaagaaaaattgtattataattatagcttctaaaagtgtaatggactattattaaactcattagacagacaaatatattattcaatattttatattttttttaatttaaaagaattaagaaattttaaaaattatgaagaaaaaaaaactattaatgtttcttagatatgtacattcattaaattaaatcttttacatatttttagataatcgttttttttttcttaacaaaaaaaaaattaaacaaaagtaaaattaatattctctataatttttaataatttatatatatttatatatatatatatgtttaatatcatataaatgcatgattcacgaggagataaagaaagagaaatgtgcatgactgactagcaaaactaattaaatcttagaaaagataaagtgttggttttttgtttttaaattaaaaatggtttgtaaccactaatagcaataataattcaacttaattatagtaaatgagtaaaaactaatttaagaataccattatttatttgtttttttcttaaacatataccaaaatttattatcatcattaattataataattatctgtgacagttagtagtcccgtgatccgtaaggggaaataccgggtaagctgtacaatctcacactgcctggggaaggtcaagtgggatgattcttaagactatgtaggtatgggactacacagtttaaaaagagcttaaatggattgattggtact

SEQ ID NO: 317351 - DNA, 946 bp, Cannabis indica
taggatgttaatcaaacatacttgctagtaaatctacatcctagtaaaattaattccaacagttttagcttcagcctccaccactcttgatcattggcgaaaagctcaggatacacttgctttatcatcactatctctttataatagtgatgatggggccgagctttggactaaatcacatcaagattaatgtggacgctgcactttttcatcatgagaattcatatggtttcggaattattgcaagagatagtatgggcaaacttattgaagcaaagacatgctacaaagcagcttcctactcccctaaagtcatggaagcactggaaatcaaggaagctcttagttggattaagagtaccaactgacataatgtagagcttgagactgttagccttctcactatccaagcaatctgaagtaggcaaagaatgtcatccattttcggcttgatcattcaggattgttgtcatttattgtcttctctacctattatcaaaataagttttattaaacgatcagctaatcgagttcctcatgttgttgctaagcatgctcgattttcctctagttgtagcatttttgaacataatgtttgggttgatttaaaggccctcttgtattcaaaatgcttttaaaggaaaaaaatgtgttgattttcctctagttgtagcattttcacatacaagtcagcatattgatctaccgtatatgttacctttacaggaaaaaaatgtgttgactttgtgaagcgatccactatgacccatactaagtcgtaccttcctgtagtcctgagcaaaccaaccacaaaatccatcgcaatatcttcccacttccactcttgaaaggatattggttgtagtaacgctgttggtggctgatgctctgctttaatttgttggcaagttaaacacttggtcacataatctactacatccctttt

SEQ ID NO: 317352 - DNA, 810 bp, Cannabis indica
gacttgcatcccaaaaaaccttagtcttccaacaattgcaaggcttaagatctttgtgaaacaaaaatgcctttgtttgaccttgcaatttcaagcctgagaaagaatctgagttctccaagatttgtcaatttgaacttgtcatttagcttaaccttcaaagcttctaagtccttgatgtcattactagccaaaatgacatcatccacatagactaacaacaatatcaaacttgatccattttgcctgatgaacaaggcatgatctgaggcagaatgtttgaaaccttcttcaatgagagttgtttagaatttttcaaaccattgacttgaagcttgtttaaggccatatagatattttgaagcttacaaatagctcgaggtggtagctcccccttaggactatacccttgaggtataatcatatacacatcttcatgtaatcaccatgaataaatgcattattcatatctaactggtgtaaaaaaccaaccttgtatagcagaaagagctaaaatcaatttgacagacactaacttggcaactggagcaaaagtgtctgtgcaatcaactccttcttgttgattgtattttttggccacaagtctggctttatatcttttcattgccatctacattgtacttcactttgtaaacccatctgtacttcacacaagtctccccgaactttgacatgtaccaaatcatgccccctgaacttttttgatcgttaaaaattccccctgaactattgagattgttaaatttaaggacttttgtcttatttcattcaattttactattttagtga

SEQ ID NO: 317353 - DNA, 2025 bp, Cannabis indica
ttagtcacaatttttattttgtcacaacttttattgtgactaaaagtaagattttttgtagtgatgcatcttcaagagacacgttgaataaagtctcatccttacggaaacactatggtaggagaccactgacatttcctagtgttaatggtcatgcatgtacctcactagcattgcaaattggagttatcttccgtgtgcctctcactagcgtggtggatcgatttggaagactagggtgtgaggattattagatccaacttacatgaagttatgaggttaccttgagagtcatcaacaggtatacatatatttctctcatgcaatttatgttttgatttcatgtttatacatgtggagatacttggggctatggtacaatgatgatcagatatataaagcttctactgcgtacattagtaccataaaaccaacacaaacaatagtaccacgcataagacaacctctagcacctgcttctctcttggggaccgtaagtgtatcttaggccattagagcctataaatatcatattattttatgtgagaaaggttagaaaatcattgtaatacttcatcccttgaaatacaaacatttttctttctctgctgttgctctgaacatttcttgaagttttcatattttgatatttcatcttcattctaaatcttgtgtttgagttttggtttttcagccataatttggttgacaagattacaccgtcgacaatgtccaacaatgctagacatgaaaggggtccccgttgtggatcccattttcacgtctaacattgttatacatggtatattttcttgttcaactgttgttggacatgaaaattacccctttcatgtcgttggatatcatgtctaatacaaagtggatagcaaagactcatcatgtcaaaattcaatggacattgaaatggggttttgtagtagtggttcgaggtttgagttcaggttggggttcaagtccatgtttgagtctgggtttgggtcctgctttgggtcttaggttagggctacaggtttgtccaaagtccatgttgatggtcaggtcttaattcagagtcagagtcttggtcctgcccgatatttgggatctagtgtcaggtcaatgtttgcgatccaggtttgggtctaaattttaggtttgggtttaggtcccaggtcaaggacttgggtattgaagatttttttcttcttttgaaaatattaatgaacacatcctattttatgaaaattacaacagctatgtattgacgctgaaaactgaccaacaccagctcgctagattggggagatgaataatgagtttaagtaaattttagagagacacacacaatttatagtagttcactccccacgtgttgattgtaatggagctgcgtctactttgagtttttatttcttaggggacagtaataacagaatgaggctaagtgcttaagctctagtttctagagagagaaactagagtgagatgctctgacctagtgggtagttttcttaatatgaaaaatgaactaagggagctctccttttatagatagaggcccttgaaaataggaaaaaaaaatgcaagttgtctattttttaccatagatgatgatctcagatgtaaattaaattctgaggttgatcgtcaattttcagagcccgagttgcgacggtagggcccgctccaggtaagctggagcttatttttctgtaactctcttggggattaaatttggagtttataacttaagaattgcaattgaagtgtgagacatgacttgataaaccattgaaatatctttgaaagacaagttgaatcgtgtcaattggattaatattgagtgagttatagtcattttattgaaggcaattcatgacctaggacccaggttaatatccaccacacaggttgacatcccagcaccctggttgacatttaacgtcatcctagatgttgggaaatgtcccagggatgtactttttaaagcttaagtgatattttaacatcacttagtctattttt

SEQ ID NO: 317354 - DNA, 988 bp, Cannabis indica
gtaaaaatgatagactttagaaaagagggtaaaaataaaagagaacaatataaaaagggtatagagtgtaatttcctcatttcggcctagattttttgtttagagtccattatctttttctaaacccatctaatctaaaccctattttagagagagcttatatatagaatatgataaatatttgatttacaagtttttggcgagacactaaaaccctagtcctaagtgaataaaaaaaagcgttcctctctattcaattcgaattcactctctataaatcaaccctatagtgcattaagtactagcctactctatttaaggtcatactcagatctttgtgaaagactgtgtaaattgtcactatttgactaaagaaaagtaattcatgttcattaattggcaataccgtgcaacaaaaagagaatctaggattagagtaattgaatggatggagtcacttattttcactgccttcagtgtaaagaatcttaaactttatacgtgttatatgtcgttttatgaaatttatattttaggatgttagattatttatgtgataatcaaatatacatattagtaaattatgatcctagtaaaataagttccgacacaattgccactacaccttgtcaatgccacaaatgtattaaaattttaaaaaataatttgagagtttttaatttagttatgtttatctttttaaattaattgaatttttagtttaaggatcttttaaaaatgtcattttttttaattttaaattagacacgtggcactaatatgataattgtctaaacaaccacgtcatcaggagtcacaataatatattggtcctaatttgggagacaaaaatgttaaatagtttttatttttataatatggaaaaggtatatatatatgttattaatatatatatacacattatttaattcattttaaattatatctttatatattaaaagtgcctatctaacggcatttcttggtt

SEQ ID NO: 317355 - DNA, 740 bp, Cannabis indica
ttaagtatttttgccgcaaattactctttctaaacatttattatttatttattttactttttttttcatatttttgagtggtgtctgattgaattgatcattagaatactttagtaaggacggttgtgcatgttttttgtttttcctataatatgatgtttgaggaaagaccgtaattaatatctcttaattatatatatgtgaaactataatatatatatgtggtatagtttctccaaatgaaaaaaaatctcgccaaaagctatttttagaaagacgttcacttgcgaaagctggtcctggaagacttccttgttcttcagcgaatggtcttcaaaaaaagctagccttcctccaggatggagtggctagttgttcctcttggaaaggcaatttcggatagtcgactctagcagactctatcctatccagaaacttcttcaacgagtgtctttggtccgtgatctcaaaagctcatatacgttctcgaatgtactaagacttaagttgacgtggagatctcgctcaaaggagagttggttaagttagttgctcactaaataatttaacaacttcgactcttgcagccactgactttaggattttgatcctacctaagtctataaatatcatcttgacttgtcgtttttcagaatatggttcggattgagattgagatcgagagagagaaaagattaagaggtagagagagaggtacagagaaaagagagagattgagt

SEQ ID NO: 317356 - DNA, 709 bp, Cannabis indica
tttgatttaaggtttgtttaagcttaaattgattagaaatagggctgttaaatttgagttagaggaattaaggtttaatgagctaagtttctactcaactgtggtattttatttaaagtgatgaattgttgtgtatggatggtttgtataccttgtttttatactatggcataacttaaagttttaaatttgtaagcggcgtaaattctataatttttttagcagcttaagtacctagtatttataaaattgtaatttttctcgagtttcgtcagtacatactctgtgattgtcttaaacataatataaggcccagattccatatctttggatcaggacagaaacatgtagtgtcagttgcttctaaatattattttaataaattcaaaactggagaaaaattataattttatattggatacttatgctgctaaaataattcattgagtttataccgcttacaaactcaaaattttaagtacttatgctgtattttaccctaaaatatattcacaaatattttttttttaaataaaattatttaggcaatgtgtaatacttaataagtaactcaatttaatacaaatacgagtagtaaactaatttatttatttatatcttacactataataccacaaacgtttctaagctatgtaagacttttcacaaagagttgttaaagagtcatatcatcaagattcttaaaaaa

SEQ ID NO: 317357 - DNA, 787 bp, Cannabis indica
agacttttaccaccatgaaccacattgtactccacagttaattgtaacagtgagaagaaccaaatctacaaattgattagcaaagcccatatacgaagcaaacatggctcgaagaaagccccattcaatttgatcataagctttccttaaatcaagtttcaacgccatacacccatctttaccttttctcttgcgtttgagatattgcatgacctcaaaagcaattataatattatcagagataaggcgacacgggataaaggctgattgattctctgagatgatgtggggaagcaccatctgtagcctatttgcaagcactttaaagatcactttataaagcacattacaaagtgggcagagatcacccatcgtagtgggctgtttcttcttagggattagcataatattagtatgatttaaaccaaaaggaatggaacaatgatcaaagaaattctagacctggttgataacatcctgcccaacaattgaccaatatttttggtagaaactgttgggttttgtgccctaaataaaacccatttcaatataatcagatttactaattaataaaaattagaaaacacattttacgttgcatggttcacatgatttatttcatgattttatgtataaattctaagtccagaacatatggatttgtttatgattatagtgttgtcagcacagtcgaatataatcatgattatatgttcaaaagtttaagtccctgatttatcagttcactggatttagactggcatgataatcagcgataggtatactt

SEQ ID NO: 317358 - DNA, 1067 bp, Cannabis indica
cgcattatcgaagtaacgaccttttcatgttttacatattcatgtatgtctttaaaaaaaaaaacaaggccaacttttgatgtttaaaaactctaaaccaaacccccaaagaaaaaatattactatagttatttttttcattttttcccccttaatgatgcttaaagaaagcctttttgttttttttttcggattagtgaagcatattgcatacactaactaaatgctgtagaaatatctactctaaactattataatccttactcatagatagtagtagaaagctcaaattggtctcgctgggtacatagtttgtaattaatttttgagaccaaattaccaaaagcgtgtagaattaatcaaacatatacaataatttctttttctttttcttttctaacgatgattgtttgtacatacgcatgaaaactgccagtactatagtagacacgtatatatatataaagagaaaaaaaattatctgggaaatcaagtatcaactaaccgaatgtatatatgggcacagacagcttcaacgaattaatttatacataaaataagatttagatcgcagaacgagctaataatcggcaaaagttggagtatttttgttaatttgggtcatatcgatcgatcagttaataccccatatatcataataataataataatgcatgctctgatgttaaataaatgagacatttaatgaggacgtcatagaagacagacctcagagtcagaggcatcaagcatataatttgtgtctttaattgtgggaacaggcgggcgcatgacaactggacttttgacttcttttttttttttccttttttaaggaaacctttgacttttagttcttaattcataaacaagtccaagatttggagtttagagttaattaaatatatatatataatcaaaaagcaattgaggctaccttttcttgcccaattatagcaagaataatgatatgtgcaactaatatatatatacatatacattaattttgtcaaatatataatatatatatctagtagagatttttacacctcatgtcaaaattgaca

SEQ ID NO: 317359 - DNA, 1743 bp, Cannabis indica
tttacaaataaaaataaagcaatgtacattactaaattattatagatttataccttaatagacgttgagattctacgattctcaccaaattgcgccgaagctacaaccaccacaactactacctctaatcttagtttacgactaaaaaactaaagaaaagaagatcaaactctgattatatatttttgagtataaaaaatgaataaaaaataagaagtgggggatggaaggtggtggttggcgagggttttgtgaagggctgctagttattttgtttgggggaaagataaagtgaggaggatgaagggttgattagggttatataaaccttatcttgtcggttattttgtaataaccgacgatataggtatttttcattaaaattcaacactctagggcatcagttattacaaaataagcgacgtcacatctttttctttccaacctcccactatggcatcgattagcttcatttttttattaatcaactgtaagagctgtctttataggcttattttgtagtagtacttgatcgaggtctatagctttatttatttttctacagagagaagaaggagaggaagaagatttctatttataacaaagttggtatttatagacatagtctaagaatgttagaaagatagaattgtctccaactaatttatctgtcgaaattgaagcttaaggaatttattagttataactgaaataatagttagaattaattaacttaaactaacaccacacgatctatacttaagagtatattgacctactctgattagtcgtctagactagatttttcctaaatgtccttacaaaattacattatatattgatgaaaagtgctacacatttctacactttttttatttagaaaattttagtattaactacacaaagctaagaaaattagaaaaaactagaattacctagaaactatatttgtaagctaagaaacttaaaaattttagaatttcttagaaagttaaattgtaattaaaaataagaaaaatctagaaaattgtagtatcaaccttagctccctataaataccaagcttgggttgaggagctagtgtaacaaccaacatccaaaagccaaaagttccaaactatcaataagagcttactactttacatacaattctctcttccaagccaaactaatttcatatactaaatcaataactactcatcaacatcactactttactacattaccacaacaaaccattaactacatatctatctattctaaacaaaaccaataaaaatttattctcaaactatcagtggtatcaaagctccgtttgatcatatcactgggcgtaatcttttacgctcatcaatatgagtttggagtccaattgctcttctccacttcttccaattttccatgaagaaaattataatttttggtccatcaaaatgaggacctattttcgatcacaaaatctttggaaaattgttgaagaaggaatcaatattctagaagatattacatctctttcggaagatcaaaagaaggcattggaggataatcaacaaaatgattactgcttgcagcaagctatggtagaaaatcttttttcacgaattatgggtgcaacaaaggcaaaagaagcatgggacacgctgtaggaggagttctaaggaacagttaatgtacgcacagttagactacaaaagcttagaagagattttgagaatcttaaaatgaaggataatgagactgcaa

SEQ ID NO: 317360 - DNA, 1340 bp, Cannabis indica
tataataaaagattgacagattaattaataaagaaacataatattattaagtgtaatcagtacgtaaatatcaaattatgttgatcatgtgaacaaacattatatttcttatagatatatgattctccaataattacttacaaccttttaaaatatctctaatatattggttttctcaatttttttttttttccattatgaacgatgatggtgtatgtatacgtatctagtgagattatataggcattgaaatttttcacgagagccttatgaatatccttttttttctttgggtgcatgcatgtgattacacttaaaattttatatggggccatgtaattctaataatttcacttattgatcaatattcatttttcattatgatcattattaaaaattatggataagttcctatagctagtctttcaactttctttcttatctttgccaattatttcaagtacgaagaagtgaagaaccatacaaatatatatataatcttacatttaatatatattatgaaattaattataagtagctagtcatatatattataaattccaattaatcgtcatcttaatttgttgctaattattaaaatggatatttcaaattaatatcgaccataagttttattattattatagtttttttggaaaaggaccataagtataattaattaattaggtaaaatatataacaatattttaggtaaaagtttaaattgaaaaggacatttaatcttttatcggaatcaagtacttaagagcattattagataaaattagggtcccaaggtaggaccataatgttgtagcctttgtccctatggcacataaaataataaacaaagctataatagaaaaacgatatattgatgccgacaatttacatacatgaccgaaaaaatgtaaaatatataatatgagcattatttatgtattagtgattatactacgatgtgaggttttacaattaattaatacttatttatattttattataattattaaattaaaatatatattagagttaattttatattaattaattacaatataatgatatgatcagtattgttatgggactaaggcgaggtgaggttttataattatattaacagttttttataatttttattaaattaaaataataataaaacctcatattaaattgtactaataataatattacatctaagtacaaggttggccttaggcataagaagctagacgtgagcctaaagcgcacactttttgggagcctaaactaaattgaaagacctcattttagagtttcaattgttagaaataattggggtcacaattgtatatataaaa

SEQ ID NO: 317361 - DNA, 851 bp, Cannabis indica
aataaaatatggctcggctcacatggacagtgtcctatttacacactcattcttctttcaaaccttttcggccatcatttatacctctcttcatcccaatttctcaacaaatctcagttttccaattcttcatttttttttagttctctctctaactaaaaaaaacccctcaaattattttttattcttttagcaatttatacaaattacattgtgtgtgtttacttataaaagcccatataatgatgatgaattattgttcaaaagagtacaataataacatccttaatattggtacgaataaggggtactcggcggtggcgcggtggcggaggaggcggaggaggacgatgtcggcacggcgaggattggttcggatgaaagtgaagaagctacaaagcttaattccaggtggaaaagggttgaagcctgaccttctttttcttaaaacagccgattatatcttacgtttgaggttacaagttaattttttgcaagcactttccaaaatttaccataattaattattcactttattatatataaaaaattatttatatatgtattttagcttgaattgtagagctagtagtaaattaattaagtacttctctctcttataatttttctttagttaattttattttggttttctctttctatatatagtattagtatattacgttattaattttttttttatgtatagggagaatttatgtgatctctctatatatattggttcaaaatttagttaatctatttatttaattttattatatatatgaacttttgtaatcattttctttgacctacatttacgaacgtgtaaagagttttttttttttttt

SEQ ID NO: 317362 - DNA, 517 bp, Cannabis indica
tgagtgtatatatattattctttgttatatatatgtgtgttatataatatattttgtgcatttttttcttttattttttccataaaaaataataaatatatatagtgtatatatattgtaatatatatttattaatttcttatattatccttgtattatatttgataatagagttataatatatcttaataattttttttcattattaaaaaatctctaacaatatcagtccttattttattaaacttgaaatacatgattaatgttcaagcatcttaaatgagtaatgggtattgtttatttattttggcttgtttagtttatcctatagggttgttgttggttgcttgttaggatcgggatgaggtggaggagagagggttaaaattttagtgagttaatagtgcaccgtagctactatctatctatattagggatgcacgcgaggtggacaattggcggagatgtttagttttatgccctaaataaaactccatttcaatgtaatctattttat

SEQ ID NO: 317363 - DNA, 1574 bp, Cannabis indica
ttctactgtgataattggttggattaataagctttacattaattttaatttttagtctattttagtagatatctattctttattagctgttgttggtagtggttcttgtagtgtcattccacaattagcgaatggtgttgtccatatactggtaacctctatcactagtttaggagattgtatttgaacagatatttgtccttgattttttagttcttctataagagtggattttttataaatgaaattcgtatttttttcaaaaaaaaaaaaaaaaaaattgagttttttttagtttggcaactttattgacaaatttatgagaaaaaaaaaaaccaaacttatcaaagggagaaggacatgtgggatcgcaactcataagaagtaaaagataaaattaaaataaaatgatttgatggatgtttttagctgttagtaaaaaatgcattaaaatttaatttttataggtgaaatagttcttatccaaaaggtgaatttatgaatatacgtattataaatattagagtaaacagtgacataagtacctaaagttttaggtttgtaagtggtataaatctaatgatttcttttagcggtataagtactcaatgtttataaaactgtttattttcttctagttttatcagtacagactctgttattgtcttaaatagggcacatagaagactcaaattctagattatttagtttggacggaaatatgtagtatcacttgcttttatatttttttaaaaaaaatttaaaacagagcttatattgaataaaaatagaaaaaaattacagttttataaatattaggtacttatgccactaagaaaattattgggtttatgccgcttacaaaatagagaatctattttgttatataataaaaaatccttaaatttataccgcttataaatattattatgctttcacaaataaaatattattattattattattattattattattattagtagtagtagtattatttatgagacttattctaaaaaccttttgaatattttgttagaaaaatctattgtacattgtcacatgtctatctctcagctactgttcttttatgccttcaacacattatagcacattaaatttgttgtcagtacataaataatagaagtgttcctaattaaataccaatggttaaaaaaaaaagcattaatctaatattttaatgcaagttaaatattattttagactttttgttttgtaaaaattattaattgaactatgtgttttgttaaatgataaaataaatcctatatatttttaaaattgtacaaataggatcatgaactaattttttgtcaaaataaaacttaataataatctaatgtaaagatattttgacaaagctgatttcattttctttaaatgttcgtgttagaaattgtcttaaagcgtgttatatttaaaaataaaattgttaaaaattgagtttagtattctatttttaccattttaaaaactatagagtccattttatcatttaacaaaatagaaaattcaattaacaacttttgcaaaatacaagtttcaaaatagta

SEQ ID NO: 317364 - DNA, 923 bp, Cannabis indica
tttttaaaaatttaattatttttttcaaataaattacaaatgtgacgttgacgtgtcaattgtctaaacagacatgttattatttgtttggcacatgtgacaaaatttgacatgactaatttacaatattgtgaatagttttaggatcatttttaacggtttgaaaaatttagagagaacaattatatataagtcatggttcagggacaaaaatactaacctccaaataaactgtagaataagaattatatattaccatgctagtaaaaatgccataagataataaaatagtaatagtataatctcataataatttaggatctgcatccatagttagccattaaaatgatgaaaataaatagttcaaaaataggcccttttcaatgagaaatttataactagggataatttgatataaaacattaactatattggaagttttgaaagtttataattattattagggtatgtacttatttggtatgtctcattaatttttttttcttcaaaatataaagttttgtttgtattttcaattatatacttatttaaatctttatgtttgatgtcagtaacctatattcaaatttaattaataaaacttttttaatatcatcaaaatgttttgaattgatgagttataaattcaaatttaattatttaattactgaaaaaaaaatcaaataaataaatattttattgattaaatttgagtgtaaaataccatatctatattttcaaattagaaggtaccatattatataatattgaaaatgtacatagagttgggtatgcataaatagatctaatccaataataattgatcgatcaccaaatattaaatatccaattgtgatcagatcagattgaatgttattttttaatatccaattggatcagatagaatgttagataagatgtcc

SEQ ID NO: 317365 - DNA, 1514 bp, Cannabis indica
acttctgtttctttattgatgttgaataaatagattacattgaaatggagttttatttagggcataaaacctaacagtatatactcttgtaatcaccattacagaggagtaatacatcatccgtatagctaaggtgattaagctttaaatctttacatctgtcatgaaactgaaactcattcttccccccaaccttagtcataattcgacttaagtactccattcctagaacaaatagcaacggggacatacgatcaccctgcctaagtcctcttttagcttcaaaaaggccatgaagagaaccattgaagagcaaagagaatcgaggagtggagacacaagtcataataagcttaatgattttttttgggaatttaaaagctactagaatttcctctaaaaattcccactccatagtatcatacgccttttgaagatcaagtttaatcatacagctagacttgttcattttcctcccataatgcctaatgagatcttgacatatcataatattgtgagcaatgtatcttcctttaacaaatcctccttgattttgagaaacaatatcggggaggatttgttctaatctagcacagatcatcttagtctctattttgtaaataacattacaacaagcaatagggcgaaaatcactcacaatattggggcacttcacttttgggatgagggttagcccagtagagttgatctcctttaataatgcaccagtatggagaaaagaaataactgcagcggtgatatcatccccgatcaaatcccaattgtcttggtagaacgaacttccataaccatccggaccaggagctttgatactagggatgctgaatgttgctgctctaactttgtctcctgtatactctttcatcagcagttgaatatgttctttagtaatcaatgatccctgctggacaactcttttgttcacaggctttcgattctgcattttagagcctaataattcttgatagaatgataaaaaagcatcaatgacttcagcttgtttctctactctaataccttctttgttgacaatagagtagatactgttttaatttcttctctgtttaagcgcctggtggaagattgatgaatttgagtctccttctttgatccaagtgatcttagttttttgctgtatgaaagagtagtatgcttgttgagtttcaataaccttatttcgggctttcagttcttcttcttggagagcttcattgagtgggtccttatgcagattatcctggcagatctccatgtgcttcttagccagtagatgaacattttgaatatctataaaatccctctttgttgatacgcttaaacacctgtttcagggacttcatcttcgacacaacctggtacattttggtgccagtgattgagtgattccattcttcttcgaccagttgcttgtattgtggatggtttctctgttggaaattattttaccaggatcttagatctactcacaagcatgttgattaacaccctaaata

SEQ ID NO: 317366 - DNA, 847 bp, Cannabis indica
aacatacccaatccaatcgaagcctccgaaagatagagactttttgaaccatctagaagtttaccttgcaaagagagatggtgtagacaaactccttaaaatctcaaggtacgccaccaagatcatccttgcctcctcggctctcccggaaaacctaaccgtaacaggccgcctcaagagcttcgagtccagcgttggcctcagtcggaaggctttcaggctcggaaaattcgtccaagacgtgaacgccctaaggaactcgcaattcgactcgaaacaggatattgctctctcggtgattgcttatggaggcgagggattgtattatttcgtcgaacaatttgtgtggttggcgaaatcagggttgatcgacccaaaacacacccggaatttccaacagctgagtgcttgggcggagtttatcgggtaccttggaagcatatcgttgaaatttagggatttgagtcggattagggaagacgaagcctgcctagaatcgagcatcggaattgcgattctaagagaaatcggttatcaggatgagaaagaaaaattgaagaagataagggagaagaaattgatgaagaaagtctcgatttttcaagatttggctgatgggttaatggctttggcggatattaggaatgggaaaggttttcttttgggacctctttcagtgtcttgcgctggactattatcggccattgttagcactcataagaactgggtatcttgctaaaactcatcaatcaatcttttcgttctttgtcataattctacagccaaaaactctacaaataaaaacagattatagtctctgaagtctgaacctccaaaaagaaaaaaa

SEQ ID NO: 317367 - DNA, 727 bp, Cannabis indica
ttgataagatgaaccaaaacatacacaaatgaatgaaaaatacttctgcttctttattgatattgaataaattggattacattgaaatggagttttatttagggcataaaacccaacagatgaacccaatttagcctttgccttagccaccaccgagggttcaatagaaaaagagtgaacattttttactcgagatggcaccaccacttcagatggtggtgcatcgactccatggtcaaaggtgatgtctggaaacaccataaaatgctcattggagagaggaaacactttctttcgagccttggtcttgttggtgcgaccaatagaccccgtccgagctgacgcaagtggaagtgaagtcgaaacttaagccaacggagatggtgatggtcggactttagttacagtagggcccttggacgatgatcctctttgggtcttcactatttttcctgtttgcaaaaactaaaactcacactcgattttttgaaaaaaatacaatgaagaaatatagctcgtgtgagaaaaagagagtaggtgagtaatatattaataagacatgacattccctttctaaaattaacccactataaagttgttttccgttttttttatgtgaaccaaaaaagtagacaaaaatccatgtacacaactcacacgatctgccaacaggataccctttttttttattaaaaaatgatttgcaacttaaaagggaaacaaaaaa

SEQ ID NO: 317368 - DNA, 568 bp, Cannabis indica
ctatgaacacttaaaagtgtttagttacacaacatatgcacatattatataagataagcttgaccctagagctattaagtgcatattcattggatatcccaaaggagtgaagggatacaagctgtggtgcttagaagagggtttcaagaagtgcatcattagtagggatgtggtttttagagaagatgaaatgcctatgaaatataaagcatatgcaaccatcaacaaagagcaaaacacaactcgatttgaagttaaaaaaccaataaattttcaaaacaaactggtggtattggtcaagatgagcacactcaacaaagtgaattgagagattaccagttagcaagggacatgtagagaagagaaatcagggctcctgaaaggctaggctatctagacttcattgcatatgctctagctgaagctgaagaagaaatcaatgttgaacttcttacagtacaagaagctcacaaaagacctgatggctacaaaatggaaaggggtaatgtgttggtattatatttatccaggatcttagatctattgcaagtatgttgatttaacaacc

SEQ ID NO: 317369 - DNA, 1518 bp, Cannabis indica
tgtatcaaagtaatcaaggccttttcgttgtttataacctttaattacaagtcgtgccttatacttttcacttgatccatatgctttcattttcttcttgaaaaaccacttagttcctaacgtcttacatcctggaagaagatttactacctcccagtgtgattttgcagtatagattcaatttcattatctatggcttctttccatagataaccttcagaagaatttatagcttcttcataactttgaggttcaccttctagcaaataggtcagaaaatctggaccaaaagatttttctgttctaattcttttgctacgtctaggttcatcctcagattcatggttttgatcctgactattttcagtaatagccttatgtgttcgttttaatgaacttgattcctctttggatctacatggaaatacatcttcaaagaaagatgcattcctagattccattatcgtgtttttgtgtatatcagagatttgtgactcatgcacaagaaaccgataagcagtactattaagtgcataaccaatgaaaatgcaatcaacagtttttggaccaatctttaccattttaggtaaaggtacaaccactttggcaagacacccccacactcttaagtattttttagttgtgaaacagagaaaaggaacagagaaattgacaatgggaatggaagaattagttattcattgatcagctaaaacaatacaaaggctgggctttacatagcaagcaccagcaactaacacacactagaaatgtaacagactcaacagaaaataataacaaacttaactccctaaccaactcaacacactacaccttaacaactcttgatactcccccttaaggtggagtgtatatattgcaaattcccatcttttctttgagaatctcgaactgattaggaagtaaagcctttatacaaatgtctgctatttgctctttactgccggtgtgaacagttttcacaagcccctcttgaaccttctcccttacaagatgacaatctatctctatatgtttagttctctcatggaaaacctggattggcagcaatttgttgggctgctttattgtcacagtgtaataaggcaggtcctatgtgatcaatgtctaattctttcagcaatgatgtcaaccatatgagctcacaagtcgtgtttgacattgctctatattcagcttcagctgaagaccttgatatagtatgttgctttttactcttccatgaccctaaagagctcccaagaaacacacaaaacccagttgtggatcttctcgtgtcaacacatgctgcccaatcagcatcggtataagccacaagctgattttttgaatcggatgggtaaaaaagcccttgtccagttgtccctttaatttattgaagagctctagttgctgcatccatatgattagttcgaggactaaccaaaaattgactcaacttgttcacggtataggcaaggttgggccttgtaacgccctaatgctaaggcacgctac

SEQ ID NO: 317370 - DNA, 1172 bp, Cannabis indica
aacaagtgaggtttcctcaaagcaagtggtaatgtagtgagaaagaaaatatcattccagtcaagcttttgttcctcagaaactacaaaagcttgtccaaacccttctacttctcctggaatctgccataactttttcttctcctctattggcatcttgaacaactcttccacctctttcttcattttctctaccaaagaactacttactccatggtttaccaactgcaaattaattattacatggaagaaactatattcaatttcaatataaacatttattataaaacatataggagagaatatataattactatatatacctggaagaagccccagttcttgcaagctaagtggagcttagcaagttcagaatcatataattctgacccagaaataagcaataaattttggaaattgataactgggatttcatcaaaagaagtagaattgagaatattggtttgattttgactttgatgatgatgatgatcaaggcggatgtatcttggtgggatggtcaccatattgggatcctttgccaattcttgcacacttggcacaatcagagagtttccaaagtccattatatgatatcccccttaatttaagctttggcttaaagctagttctacattatatttgaagaggctgattagcctgcaataaccgatatatgtatatatacatggtacaattttgagtatacttctactcatcacctaactataaataaagacaaattaaaaattaaatgattgtattttttgtaattacttcaataatttatgaggtattgcgttgcttttatgtgtcattgtcatcaaggaaatatttcttatgatatttatgtccctacaaaaattaaaatatatatatttatatttctttctcaacatttcgtataaagattaatataatttatgttttgtcccccaataattttttacttttggttcaagagttttgttgatttgctcttgcaaccctattcctttttgtttccatactgaagtagttgtcttctaattgaaattgctgttattaggtgaggtatttcaaaactgatgtaatgtattttgattaattaataattttttatattatttattaaattaaaatgggtaaatactattttggaccttttgttttgcaaaagttacagattggacc

SEQ ID NO: 317371 - DNA, 640 bp, Cannabis indica
tttgtttttttttagaaaaaaaagggggcataactatatatgtccataatataaataaagagagttattatttggataatgtttcacatgaacagtactggctatatatatataagtagtaatctacttccaacagctttttttttaatccaattttaatcagctgtgataactaataatcattagacccctataaaaaaaaaataaacaactaagtgacttgattaagctaggtaatatatgaaagtgaagttgaattaagtagttctaattaagatcattaggccttaaatttatatgatcttttttttaagttttaacttataaagtcatgcccggggaggaacaaacagtactatagctagtgcttaatttaggttcttatatataattaattaattaatataaagaccttgagacccaaaatatatatatatatatatatataataatgcatatgtactgtatgtgagtaattaatggaaagaatttaaagagaaatttgattttctatgcttaaaaaatcctaaaattatatccctaaacctaaatgttataccataggcaatatatgactacttttgctttatccccataatacccctcacatttgaaccacttgtagttttttttttttttt

SEQ ID NO: 317372 - DNA, 540 bp, Cannabis indica
taacagaatattcttttatttttaaagtatattctgttaaaccaagaaataccgttagataggcacttttaatatataaagatatatatatatataaatcatttatcaactggtatacaaaattttaatttttttttacaagataagactatacatgttagaatctcactcagtagtcctctctcgttttatctttctttatatatatttcagaaattgtatctttagtttgtgtaatttattttgattatttatgtaatacaatattaatatatagatctgttattttttatgttgattttttttagtaaatatctatatgttttaacttaattgtataataattagataacatatttggattatattattgttgtctttttcttgttaaatgttgtacatacgtgatcattttctgttggaagagtaaatcatttcacaatttttaactcaattcatttgactcgatctatgtaagaacacacttttcatatcaataacatattagaatatttctaattaaggaaataaaataatatt

SEQ ID NO: 317373 - DNA, 1195 bp, Cannabis indica
tactaaagtgtgtaatttgattatgcaatgtatcacaacggttagtttctctgtcttgctcaacggggctccgatagctcccttcaatcctaataggggtattcgacaaggagatccgctctctccttttattttcattctctgcagtgaagtgttgtcaaagtttattgctagagctgaaagaaatggagagatctctggcgtgcgtattgcaaagagtgcagtacctatatcacatttattatatgcggatgactccatatttttttttcacgccacagctgctaatgcagacagtttgatgaattatattcgtaagtacgagggctggtctgggcagagagtcaataaacagaaaagtggtttggtcttctcgcctaatacctcccgaagatgccatgatgatatcaaggaaagtttcggtattagttgtttgaactcaagagagaaatatcttggaaaccctttcttttttactgctagtaaaagaagggataaccaattccttaaggaaaaaatcttgagtagacttgaaggatggaaagctcgccatgtggcccaagcgggacgatctgtgctgataagttctgtactccagagtattccaaattacttcatgtccacggtccttgttcccaaaacgctctgcaatgatttggacagaatccttgctaagttctggtggcttggaatgtcacgacccgagccctaggctgtggcagatgtgtaatatccataacttgggtggtcaaaggtcacactttgacccttgtaggaaaataaagcttataaatgatccttttatttatattacaaaatactaatttaaaagatatggattaactcctatattaataagaaaatattagtaataaaatcaggaccactcatcaatataaaagaacagtaatatccccacagttatgtaatcaccaaatagatagatttaataagtcaataaaataccaaaataatacctagcatccatcatttctcatttctaactagtacatagctaatttaagtcatccagaccatccatttgttcttaaatacaaaatcagtctcattagaaggtgaaagagtaaaatatgactaaactaataacgacattcctttcccaacggtaccatcctcatccactagcatcaaactgagttcctggaatgggagaaaatagggggtgagcttataa

SEQ ID NO: 317374 - DNA, 1521 bp, Cannabis indica
atattaaatgacacctattcctatttatttcagccaacaattaaataaaataaacacatataatccatttactaagtccactaaaggacaaaatatcattggggcaaaaagaccattttgcccctccacactaaaataacataaataacactaaaggggtatttttgggaaattctaaattcccggccattcccgacattcccaatgtctaataaaccgtcccaaactactaacatactaagttgtgattttactgagccaaacaccgagttccaaaataccgggcaccggaatgcaaaattatgaaaactactacatgacataaaaatgcatctctgaattcaataataacagtataaataattatttaaatagctataaataatttcataattaaacgtgattaactgctaatttccaaattaaactaagcggtctttacagctctcttagggattcacgtccccctttgtctggtgccaagagactcgtaatttgtccaaatttttatgacttgtgtggtgttctgtagtttgcctcgtccatacgtgcgctgctcatggctgccaaggtcactgtggctatggtggctcttccagccgccaaccacggtatgaccatggtggctggacccccccgttttttggatatattatttatgtgtgtatatgttttatataatatattaaatataatatatagtatatatatggtacatatacaatatatatatatatatgctatatatacactataaattatcactattatatattttattaatagaaaaatatatttttatgggatatttatttttttaaaactaatttcaaattaaataaatattatttagttttgaaattcaaattcaaattcaaaatgtataaccaaacttaagacaaatgttgtcttaatcccttaaaataataaaagcatcatttgagacaatacatatgtgataatacaaattttcttgaataaaaaactttattttagaataaactgattaaaaggaattttaattaatttaagtgtttaagaatattttttaaaataaaatgtttatttaagaataattaattaaaaatattttaattaattaggatgcttacgacgatcctacaaaattacaaaaatattcttgcagcaatggatattagttttgtaatttattttttattttttcttaagagttgtaaaattagaaatacctaatattttacccagctcatcatcattgtttattatcacttttaaacaaatattaattaatagttgattaatgacatgatcatgcattagtgaatatataacatgccatacataaaaatacacacacatttattttatcatctatcttctaaaaaaaatgagtaataataaccctttctttttttttaagccatttagcgtcggtttcgtattgaggccaaatttgcgtcaatgcacaattggtgcaaaaaacttgttaaaccgacgctgaaactcaacccctcatttgtgtaattttttttttaaaaa

SEQ ID NO: 317375 - DNA, 1015 bp, Cannabis indica
acaatacttgttgtgactaaaactaaattagtgacaacttgttactaaatactatgttttagtcacaaataatattttgttgtaattaaaagtcatatttaatcacaaaaaattatgttgtcattaaaaaattatcactaaaaatagcaattttttgtagttaaatatatcaaaatttcaatcaaaatatatagataatatactaatgtttttttagaaacgcataatattagagtaatgttagccaagacaagctatattatttttaattgggtggttgaaattaattacaccataagtgtgcccaattatttttgaatggaaatttgatattttattaatcattaatctcagttaccaaacaaggtaataagtcagttagaacatcttctaaattgaaaacacaactaggatataatatcgaggctctagtaaagttatgagccaatatattagttgatcgtttaataaaaagatagaaatatttctcaaaaccatcaaataaaagtttattataatcattaattacttgaccaaagatagagatcatcttaattgaactctgtaatgcttgtatcactgtcaagcaatctgtataaagaatcacattatgccattattttttcttgatccaactcaacacttcttaaatcctcattctttctgctagttcaggtgagacctggctatagaaaaaatatgtatgaccttcaataagaagacctttatcatcacgagcaattattccaaaaccaaagctagttccctatgagaagaaatattacttttaccagcacagttcgttactgtactggtaaaattaagtagcttttacgagtgcatttcacaaactccagttgaaaaataggtcaaagttttaccagcgtacatttgctgtggctaaattctaacttttatcatttacgcgctggaaaaagttatttttgctagcgcacgctacttctcattttatgctggcaaaagttctaataccaacattgatttgccaacacat

SEQ ID NO: 317376 - DNA, 2688 bp, Cannabis indica
tgttgtttcccttttctcgcaagaggctttccgatgatctgctttcattggtggcgattcttgggcatagtagatatgacggtttcgactccctttgtcgtcgatggttccgtcttcaacaatccaagctctctcccatctctctttttgtatatatatttataaatatatatctatattttaaatttatatatttatgaatacatacatgtatattctagatctaatatatatggtgagggagaggaagagatttgtatgtgttgtttgatttttgtcattttctggtgttgcagcaagggaactagatctgtaactagtcttttttttgcatgtcgattcgaaattgacaggtaaaggtgtagcgactgtttaaaacagttgcctatttcttagagaccctttaaaatgttcgcttattcctcattagcgattttttggaaccgatgtctattccaccactttttgcgttggtagcataggcgtcaatcttacgaattgacagtaatacaatatccgactattaataacgaccgcctaaacttcttttcttagtagtggggaaaaacatgttgtaatattgtaatctccttgaagaattcttggcaaacaaattatatttgaagatgaagatgtatactctacggacggatgatgctaattaaagaactcaggaagcatcttgatgatttcaacataatcatcttaaaattaaacaacataggagtaattaaagcttgaagaagaggaccatggtgtatataatcttactcagttcttcgcctacatcttatgaacattttgtagacacaatcttttatggaaaagatactttcccaatggcagaagtaaaagcacttctaattttttgaggtagaactaatcatagagatcaaagatatggaaaaggaaacaatggcaacaagggtcacaacaaccatgaaccaaagtctaagttcaaaccagggaagttttgcaataactgtaaaagagagcgacattgcaagtccaaatgctactacttaaagaacaagtaaacccaagataaaagtcaagaaagaggagaagctagtgtggtttctgatggatatgatttgacagatctcttggaggcaagtgaaagttcaagtaatgaattgaatcttgactctggctgctcatttcatatttttcttaacaaactgttgtttcaagacttcaaagaattctcaggtggttatgtgttacttggagatcataaatcatgtcaagtaaaaggaattggttttgtcacaataaagatgcgtagtggtgtgatcagcaatacaaaatgttaagtatgttcctgatctaagatgaaatttatattatctattggagtcctagctaagaatggttgtgtcatcaagatttagagcaacacaatgaaagttatgaaaggttcattactggttatataaggagaatttaaaggtgatctttacttccttgctgggaaatcagtaactggtactaccttagttgcttagaacagtgacgatatgactcaactttggcccaaaaggcttgggcatgtctgctcaaaggataattaagtgggagattagacttctgtggggactatgttcaaggaaagagtttcagggtaaaatttggcaagggaatgcataccacaatagaacctctagcctacatacacccagacttatggagacttgcaagaatatcctttctaggtggagcaaacttttttttgagcattgtagataactactgatcaagtaaagattttgttcttcttatgaaattaaaagatcaggcatgagaaagattcatcaattggagtaagtagatagaaaatcaaattgggaagaaagtgaaaaatcttaggacaaataatggtctagtagtattgttcgaatgagttcaccaaatttcgtcagcaagaaggcattgttaggcacaagaaagtaaggaaaacacttcaacaaaatggattagctaagagaatgaatataacactcattgaaagagttcgatgcatgctctaaagaattgggcttgagaagaaattttagggagaagttgttactacagtaggttacttaatcaatagatgtcccttagtagccttagacttaaaactccccaagagttttggtcaggaagaaaacaatcctatgaacacttgaaagtgttatgtattgcctatgccattaggcaagacaaattggagccaagagccatcaaattcatgttcattgtgtaccctactggtgtcaaaggctataagctatgttgcctagaatctggtttcaaaagacgcatactcagaagggatgttctctttagagaagaaaaaatgccaatgagaacaacccctataactcaacctatcaccacttatcatgttgcacatattcaagttgaagatggaacaaaggggaggaatgatcaatctagtgtaatacatgaaccaatgctacaacaaatgaaggtgaaactgttgaagccatagatgagacttgaaatcttgagagttatcaactagctagagatagggaaagatgagaaatcaatgcaccaaacagacttggatattcttgttaggttggttttactattaattttaagttaatttttagtgtgtttttaatttagttctactcttgtttgaagtaatttttatactttttatcttttattttt

SEQ ID NO: 317377 - DNA, 936 bp, Cannabis indica
tatagatgaatattattaaacaaaaatttactattttatctatcttatttttttcccactaccaaaaaaagaactgctaatatatattcttatctttgaacttttaaaaaatcttaattttcaataataaagggtctaaacgaatatcacagttaagagttttaaaatataaaaggtttgaataaaatcttaatttttgttattttcaacctatagtaaaattttagcttcacaaaacatgatgtccaaaatttactttatatataaaataaagactccaaaaatataaaggctaataattagaattcaaaataatattaagctttacttaaaaaatacatttttcaataaatataattttttttataaataattttaatattttgatcaaatacaatcttgaaaatttagacatatattgatcaaaatataacattcaaatattcttatgttggaaatttagctctgatacataggaattaacctcagtaattccagattcaagatcacacttaaacaaacaaaagataaatcaaaacaaacaaatcaagaacgaaaaactagctgttgccccttattttgtccaaaatacgtggaccaaccggactgtgaaacgtggattgaagaagcaagactttgagatgattcgactaagtctccttaattaaaagggtcaacacttaacatgcctcccggagaaggcatgaggatttcacatactcccggagagcaaggctataacaaagcacctccgggagacatcaaaccctatctgaacagtcacctcgcatttaatgacgcatgggagaaggcgtattgaaactgtcataatattaaagtttgacgacgtaacccccttctgcagctactacgctgtgattaatgagcctagtgacagctactttatgagaaatcacatcagtcaagaaaggataa

SEQ ID NO: 317378 - DNA, 713 bp, Cannabis indica
attttatttattgacaggttgttatttttaaagcaatatttatttatatttaataagtactcataatgttatagttttatttatatatatgcattatataaaataaaaataattatatatttatatatttttgaagtacgaataaaatttcacccaaaaaaaaaaattcatctcttaaaatgtacaaatattaaattagaaaaacaaaagaataatttaattaaaatggcaaatatataataaaattataatactatgggtacttattaggtgtaaataagtattatttcaaaaataaatacttagtagtattatcaatagattaatacacttttataaaataaataaatatgcatatcattaattatattttaatataaatgtctcgtatataggggtgaacatccgatccaattcaacctttgtttcctcatgcgatccaatctaattagtaattggatttgaaaaattatcatccgatccaatctaattagacctcaaaatccaatccaatccaattactaattgaattggatcgattttttaattggatatccaattacacagctaaagttcaatattaactaaaaaatatgaagaaaaatacgtaaaaactaagtattaccttttatttaagtttaatacttcataaatatactatttttgtaagtgtaatgtagctaaaagttttaaataattaaaacaacaatatt

SEQ ID NO: 317379 - DNA, 593 bp, Cannabis indica
atttttttctcatacaatttaaaacaaaattaaatattttttatacatacaatttttttttatccttttaatttgttgttgaaggcataaaataataataatttatttttttatgacatcgtgattaaaatcacacatgaatgacaatgcatcaatccataatcagcagcgacacctcctcaaactaggatagctcatacaacaaaactgccctaaaaaatttaaacaataaagctataacatcctcaaacaacacctctatctcatgaaaaaacactattcattgatagcttttgaaatccttgcatcatagcacgatcaagtgagtgaaataaaaatacacctatataagataaatatatcaaatttaattaaatacacaacttaatataaaatgagattttttatctatatgttgaaaaatattccaaaatattattttatatatatatataaaaaaaaaattatatttgatatatgtaaagcagatcgggtatcactgctactatcctcaaacaaattattaaaaacttatgtttaacaatttgttttatttcattgctagttatgtgaagaaaaaaaatatatatttt

SEQ ID NO: 317380 - DNA, 1091 bp, Cannabis indica
ggtgcaagtggaggtgttgttcgtactgtcatcgtaagagtttcctgcaaaacacactgatttcaagtaaaaggagagaattaaatgtggcaacatagatagcttacaaatttttggttttgcagattaattccgagggagtgacaagaaacttctacccgggagaccaacttccactctggcacgaggagttagagtcccacaattcgttactagacatattgaactctgcgagtccagagccaatgagcatacaatgatgagtccagagccaatgagcatacaatgatgatgagctttctatcctttgttactgtttaattacctcttcgaactcttgtgcaaggctttgtgtactttaaagtttaaactaaactttagaacaaatatttcatctcacctctaaattaatttttataattgtgattttgattatgtctgttgcttcgttttaagctacactttcttcttctaaattcttacagttcttctgtatgggggtttgaatagacttttcttttcatacgaaaaagataaaaaataataacaaattctaactgaattaatttgcatggtgttatgttgagagcttatctaaagctttataaattctttcattgaaaagtcctgaagctcatagaaaagttcaaactataagaatgacataattggcatagttttaaaagaataccatttcctacaacatttttgtaaagaaaatggctgtgctggtggttgctctcgggaatggtggtggttggttctccggggttgctccggtagtggaaattttggcaaatgatggtggtggtggctggtagaaagagaggaggaaatgatgagaaggcgaagataatgaggggtatttttggtaaaagaggaaacagtagcatgtaaagagtgaaatttctaaatgtgtatataaatatacacatgttgtatatcacatgcttaatgcatatattatgaaaatagacatatctcaatatatgaaaacatatatattaataatatatgactattgtttaaagggattattccacaaatatacaaaaataaaaaaaaaagtttacaaaaatacggtttcacga

SEQ ID NO: 317381 - DNA, 846 bp, Cannabis indica
aaaataaatatgaaaaaaaaattaagtttcaacaatacaataattagtagactttgggttggacattcacatattggacctaaataaatataaaaattggtatttttataatgtgcagtgcggtttgaaccgcatattaacaattcaaaacctaaaacttcaccgcacagcgcgatttaggaaaaatcaaaccgcgactgcaccgcaaggaatttcaaaccatattttatttgcggtgcgggcggtttgaacggtttgatgaacacccctaaattttaactatcaaatattaaacttaaatctttctgtgtaatagatatttatgctgcaaatcgctctttattattttcttctcacataattcagtaccaacaattaaattttaagtttagcttattaagaattttgtgaccacatttaatacttttaagcctattaaaatttgatcaattatatattaaatgttaaattttgcgaactatttttatccaattaatttcaattatttgaactgatctaacattagattggttttatccctagaatatatttcatgtatacttattagattagttcaaatttattcgataattttaaacttaataatttttggctcaatttgaattcatcattagacccaattcaattttttggattgaattccatcaaatgttattggatacatctgatacaaaataaataaataagtaagattttaatcctaatttttatatagatatatatttttggcacgtttactaaactgtaattggaatcagaataatcaatgaaagaaatgtatcgttttaaaataaaaataattagaaacaatatttttattatgat

SEQ ID NO: 317382 - DNA, 1240 bp, Cannabis indica
ggataaagaggaaacattggggacccgttgagattgaaaccgattctttggtcgttgttcaggcagtccaaagcacggtggagataccttctccttttggccttcaggtggcggtttgtcgttctcttttggccgatttgccgttagtctcaattaattttgttaaacgttctgtaaacaaagctgcacattgtcttgctcgcagctcttgtttgtatccagatcgtatttttagtgaggatgatgttcctcctgattttcttttgattgtaatggttgaatcttcttattaataaagttaccattttccttcaaaaaaaaaagtagttgtaaacttataaatttaaatatttttactgcaaattattagaaaaaaaaaaaaaaaaagacgtttgagtaattttttttttccttaactgcgtctgaatatatcgattattatgagtgccccttcccttgtcccaaaagacatttcttttatttcctattaattgaaaaaaataaataaataaataaataagagagagacttcctaggaccacaacgttgcatatatcaaaagacaattttaaccctcccatcccatgattattaattatactgacaaaataaagaaacaagttgtgttgtgacaacatttaatagaattgttgtttaattaattaattacatctctctaaccagtacaaattcgatctaaatgttattataaaaagataaataacgacatataataacatcaattgatttcatgcagtcataagtaataacgtaagatatatactaagatatatattatattaacaaccgggagaagtagatcttattgtaaggttgctataattagttttgtttattgacaaaattactttaataatcaaatcataatcctaatcatgtttttgtggagatggagacgtatgaccaacaattttggacggataagttgattgtggttaagattagggaagagtcgtcaatagaaatatatcaaaaataatacatatatgtacaataatagagtatatataaagaatatatatgttagttatggccaacttttttattcttgaaacaatattacactattttatgcaattaattattttagttcacatatatgcagtgataagaattatggggttgcatctcaaaaccaattggtaatgagtggaactcatattcttatatatatagctcaattctctaccatttattctatgtgggacaatgtctacaa

SEQ ID NO: 317383 - DNA, 1265 bp, Cannabis indica
aataaccctagaccacatttctattaaacttagggaactaatttaccgagtctaatctaattatgcattgagcgcataattctttattccaacatattttgcattgtataacacccaaaatctttaataactagggtaataaccctaggccatataactactcattttagggcaataaccctaatcacggttcttaattaatcataaccatagtataaaaggtgagcgctgccacgcttaactctaagtgcaaaatactatcttacctgatgtcccacaagtatggagattctaaatccctgggtgctcctgaccaagtgtcggtagtcctagtcacaatttttgggattcacaaaatagggttaatccctaaatctatttccacataattataaaattggcattcaattttagataattacatagagctcgaaacgagcaatccaacgatatatgaaactcccaaaacggagtctggatcaaaaagttataaacattcaagaacatgctcgaaactacccaaaaacaaatgggtgggtcgcagcactcccctcatgggccgcagcacctgggttggcaacccatgcctctaacagggggtgggccgcggcgcccaaagagtagggccacggcccctgggttccaaacccaggaaaccccatctcatcttcaaatttcagcccaaaaagcacaaggatcccaaccaaaacatgcatacagtttaaattcatactccatggatttaaaattatcatagcaaagcattagaacatataaatcaagcttttaatcctcatcaaattatgcatcaaaaaatcagattataacaacaataaaaataagctcaaaacttgagctaaatcatcaaaattgcccattcaaaagcttgaacacctaaactaaaactcatgcttgaaaacaaccaaaacaaaaccaatactaagatttctaacccaatcacaactttaaaaactcactaaggtagtctagatgcataacccaaagttccacaagtgcaaacaacataagaatcatcaatttaacttcaattcactacaacatgcatttaatcaccttgaacatcaagagcaagggatattatcacaataatcagcctttaaacttaaaaattcagaggtgaagcaattacctcaagcatttccaacaatcacaaatccaagcttaattgaatatgaatttttaagaattaacaaattggaagagatgagaaataaagatagagagagagagagagaggagatcta

SEQ ID NO: 317384 - DNA, 1240 bp, Cannabis indica
aaaatttgtgagtgtacatgtcgagaaatttatgaattttgaaacaggtcaaagacgccaacactaaaaactgacacacaatattgtcccaaatgtcccacatttagaggttaaagaaaagatagcagaagttttttgtttaaatcgtctttttggatcggcactttgggctcacaacggaagcgactctaaggagtagctcattcatcttatatatgacaatttatttctgcacattagcaatgtgggactaactctaatacatgtgactaacattatgtttaatttcatttcaaaaaaaaaaacattatgtttaatttcatttcaaaaaaaaaacattatgtttaatttcatttgctatggtacaaaacaatacaactaaaaagaataggctatttaggatttttatctccgaaccatgacttatgtattattgtacccattgaacttttcagccgttacaaataggccctgaactattcacattattgtaaattagtctttttgtcaaattttgtcacatgtaaaaaacaaaattatgacatgatcgcttagttaattgctacatcaacgtgtataatttaaaattaaaaataaaaattatgtatttttaaaaaattattaaactaaaaatcaagacgtaagcttttgtttgtcacacaaaacttaataaaaatactaatttacaatactgtgaatagtttatgaatagtttaataaaaataccaatttaccaagttcaggatacaataatatacatattataatatgaaggataaaaatcataaatagctaaaagaatatttttttagttcacacattttttttaaacacattcatccgtgattgaagaaagatgttgtttaattttataattttggataaatactcttttggactctgtgttttgcaaaagttattaattggactctctgttttgttaaatgataatatggaccctatatttttgaaaatggtaaaaatagaaccctgagctcaattttcaacaattttattttttaaaataaccaactttaagataatttctaatatgaacagatacaaaaaaaaaatagtaaccagtttaatcataacatctctagatcagattatcattatgtaagttttattttgaataaaaaaaaaatcagtttatggtcttatttgtacaattttaaaaaatacatgacctatttgtcatttagcaaatcagggggtccaatttataatttttgtaaaa

SEQ ID NO: 317385 - DNA, 696 bp, Cannabis indica
agattggcaagaataagaaaagttttaaactaattaatgagagacacaacaatctatagtacttcaccctctatatcgtgatagttatgggactacgtctatttctaaatgtgagaaataaactaagggagctctctttttataggtgaaggaggcccacaaaaataggagataaaatgcaaataaagtgttttccactgttgatgatgatctaacaatgaaaattatcttctggtagtaatggttgatttttatgtctagcgggtcccactgctacttaccccaaggttatttttgtaactcccttggggtgaattttgacaatgatagcttcaaatttttaactggtgtgggagactttacttgatagagggcttaaatagcttcaaaactcaagtagaattgcataaatcagatgaaaattgagtgagttatgaaagatttattgaagacaattcaggtcctagcgcccatgtttacattctagtgccaggttgctattccagcgttcaggttgacatctgacattaacctggacactgtaaaagtataaaaatgtccaagagttgaattatatggattaaaaaagaataaaatattgggcaaaataacttcatggttgtacacattaaatggccaatttctagttataattttgccactttctttcaaccacttattcttcttttcaataat

SEQ ID NO: 317386 - DNA, 1258 bp, Cannabis indica
aaaataaaataaaaattgttgacaattttctagttccgggaacatacctagtgggatcgtatgccccctagtctctccttcctgtaatggtctcttattattagttcttttgaagttccattcaagaggacctcttcctatatttggatcagtagattgagtcccttgggaatcttttccagggcaatgaacgatttcttcttcctgttcatcatcacgagtgtcttgagggatattattcataataagaaaatttaattttttcttttgagtagggaggtgtgtttttagagtttaattatcaaatgctctaattgaaagcaccaaactgttaacgtaaaatttaattaacataaatgaggcttgataattaatgaatctataataaaaatttaaaggcaattaattataatagaaagataaagaattttttatgaggttttgtagtaaaaatctacatactccacaaatcactcttatttctaggatttttgtttacagaatacaattcggtagaatttctctaagtcaggaaatcggtcgtccctctttcaatgcaatcactgctatttgtaggattgaaatagcaatacctcaatctaatctaaattacagttatgaaacgtggacattctccacgttttatttatctataaatagatgggaatggtttatactccatatttggaacgggtaactgttattctatgattgagtcatggaattcctcgtaaatagactcttcctcgtgatcaccaggaataagatttgaatgaattatttttctcctcataagtaagtccttttcaagttgtatctcttgtgcgaactgaagttaaaagtattaattctcacaacacgcttggtcttcctcttcctttttaacattcttttccattgtgatatgcaagacgctcgttattaatcttacatatgtctcattgatcaccttgattttcttaatgtttactgagagggtccttgcatgtcttcttactgcgaggagatcatttaatgtcttttttttgtacatgtgtcacgtaaatagacccgtttatttattgctcgaattacgggtataatagataaaataatataacacttttggagtaattaccatttttgaccctctattttgcaaaaattattaacaggaccctctattatgttaaacgacaattcaaaccttttattttttaaaatgatcttgaattaatttttgtcaaattaaaatttaataataacttgatttagaggt

SEQ ID NO: 317387 - DNA, 931 bp, Cannabis indica
acgtagaaaaaaactagcataaaatttagtatacgtgcctcgcacgtaactttttgctaagttttaattatataagattaaaaaatttatttaactgtattttataaattatttgaatataaaaaataattcatacatattgttaaaaaaatacacacttaatatattaatttttaagaaaaaataagtagtaattgcttcctcaacattagttttagcacaattttattcttcaaattatttatgatttgagcatctcactaggtccatttgtttcaatttatttaataaataaataaatttttaatattgtaagtatgataatacttttaaagagattttgggtgcatttttttttaggatttaaaccgcgaaatctaaatgttcatatcaataataagatatcatatttaaatctgaatataaaatatttaaactatttattttttttcacatctgaattattcaatattttaattatataagattaacaaatttatttaattgtattcaatttataaaagtattcaaatataacaaataattcatacttattgttaaaaaaaaatacacacttagtatattaattttaaagaaaaattaagtagtaattgcttccccagtattagctttaggacaattttattcttcaaattgtttatgatttgatcatctcaagaactaggtttttttttttttttcaatctatttaataaataaatattattttaatattgtatgtatgataatactcttaaagagatttttttttcttctattttctgtacacaatattatacactatattatttaatattatatatcatcaaattataaacaacttttgaaacattataatatatatagtgtgcctatataattgaattcttagtttatgataaattcatgggtgactttttatttatattaa

SEQ ID NO: 317388 - DNA, 1539 bp, Cannabis indica
ttatcttttaataattggcccccaagaatttaatcctgatgtagtacatccaatgacatacacgttgttgtgctttaatcatttaccttacacttccactattaaaattccttttgatctattttactttttcttcaacaaatatatagtgttgattattgtcgttttttagaatctgccattgtcgttttttaaaaatatttgacgttttaattacgactagctatcgtttttcacatgtcctttttcatttttcttctcattttattgtttttctttttctttttctttttctttcaaataattgtcgttgtcagactaattcaaagtgtagtgtataactgtatatatataatattgaatggaagaccaaaagaaaaacaaaggctaggttgttggcaacaacactttttataagtaaatagttctctaattaatgatatcataaaagttatattaaataatttgatatatgctataaaaattgatttaatcaaatacataccgtcacagtttaacaataaagaataacattgttaattacaataatattactattttttttaagtcaccaataatttaagtaaaaattgtttttggattggtgcatgtgggagtgtgtgttatattatttgttataatataatatagattaaaatatttaagtctgacatatattaatatgagattaatatatatgatttgttgaatgttgtattatatcatatatatatatatagtataataaatacacataaaagttgtaacatataattaaggaattacaaatctgaaaattaattgtaacttaaggataattatataaaagttatggaatcaatgaaataagtttctagttgttaaaaactgttacaatactcaattataccattttaatgaatattgagacgttggaggaagatttaattcgaagaggagttataaaaactaaattttgagttttctggaaacagttgtttaatggttgtttttatgttgttttatgggtgttttacaaatacctggaatcagtttttgaaaacgttcataaacagacataaattaattgaggatgtttccagctttcttgtctaacgtttttatcccattaaacactaattaaagtgttggtaacagacatataatgaaaggatttgattttcaaatgtgatcctcaaaatactataaatagaggtcttgagtttactttgaggtgaacaagtttctatcaagagagcacattgctagaaacactttaggcttgataaattccggaaactatttccattcttttttttttctcttagtgcttgtggtatgggaaaataagtttttgaacaaaggtgtaagaccttgttcaagttttgtaattttcctatgatacacttgtggtgtatgtggtaggggtgtgcagaaagtcatccaatccaattccaaccgaccaatccaatcccaatcgatccaatagaatcgaatatccaatcataattggatcgaatcagatgcaaattttaaaaatctaattggatcggatcggat

SEQ ID NO: 317389 - DNA, 1563 bp, Cannabis indica
ttttttatttttaaaataattaactttttttttaaatatttatttgcgtggattaataaaattgtgctacgtgtacttgtacacatagacattctacaatgacatttaacagtttaaaatagatagaaattttaaactgctaacagaacacgaatttaggagtaaattttagaattgagggttagttgcgaaaaaactcaaattggaaagcaattaaaaattttccaagcaaaaacccttgggaaagaaaaaacaaaatagcaaaaacccttgggtttggttaaagactgcggaagagaaaggacagcgatctatgtctccgtcgtaactggtgtgagctctcttcttcaaatctgcatttggtacgtattgtttgagttagttagtgcaaatatcagaagcccttataatagaagagaagacctaaacccaaagtcaatttcaacaaactctccatcggtcctttcttctgtcactgacgctgtaccataaaaagattttcaacctcgttcacagatcggagaggaggcatccgctgctgactataggccgttgggttgtcgaactcggcttcattacccggataaacaattacttcactcacaggtagctttcatctatttctagagacatttcttttgccccttttataatttttttttgatttctctttgttcctgtttgtttatatggttgtgtactgtagtgtaatgttatttatattctctgattagtgttaaagcaattaaatcaacctgtgttttgttctttaaacgcttagagttgagatgagactatcagtacccctctgataaataatcagtgaagtgattctctctgtttcgtataaagttctacattggcattcaattctcttttcttcaatatgttagtcaggtctgtcataattagtttataatgttttgttataagatttagaaccctttcgaatcgggccagtgctctctgaagatagacacctttctccaaaccgaccacttgattgtcctctctaaaatcagcctctcgacccttcctattgtcctcttcgaaactggccactcgaacccctttccgtttcgatcgtcctcttcctcacggtggtggtttgaagctttctactctaacgtaacagtggtggtttgaaggtctctgctctgacaaagctctcaacggaagcttctctccatctcatattgcccgagtatcgccccactagtcaggtaatataatccaaattagaaactccattcaagatttaatttttcatttccatacatttcgtggttgttttttatgaagtgctttatgggtacttgaaatttcagctctgtttctcagatttgatgtttttggtaatagaaattttgtcttaatgattctagcttagatttttctttcctagtagtggatgttatactaaatttctttccaattgccatgaactgtttggccattgaaaaaatacaagaaatgtagaggatttagagctgaatgtgtatatatatatatatatatatatttatactagataataactaggtgcaatgcacgctataagtt

SEQ ID NO: 317390 - DNA, 1096 bp, Cannabis indica
ggccagataccattcggccagaggacatcagagtggttcgggaatttttggatgtttttcccgaagaacttccagggttaccacctcagcgggagattgatttcgtgatagacttggcaccaggggtggaaccggtttccaaagccccgtatagaatggctccagctgaacttaaggaattaaagattcagctccaagggttgcttgacatagggttcattcggcccagtgtgtcaccctggggagccccggttttattcgtcaagaagaaggatggatctatgaggatgtgcatcgactacagggaattgaacaagctgacggtgaagaataaatatccattacctaggatcgatgacttgttcgatcagcttcaggggaagacggtcttttctaagattgatctccgttcgggttatcatataaataaggaaaaaagaaaacatgtatagcgcatgagtattaggaaaaatgaaagaatggaaagaaatattcatacctttttagtgggaaagaaaagaagagttagttgtacagaatgagttcaaaggctttcatttattctttttcgttctacaaatttctgaagaaaaaggtttcggaattattcggatgatggaagcttattgggtggatcgtggttagctttggttgttcgcctacctgtcccaagtcaaattcctgctttctttattacttttccgttcgctctttcaaagattttacgtttatttttaatttttattttatttagcggtgattctgataagttgtttccatttcttcagataagttctctttttttttaatagataataaaaaattataatacatacaaattaataaatatttatatatatacataataattattaatggaaacttttagtcaaaatctaccaattatatcaaagagaaaactacaattaatgtcatttatttaaaaaaaatattaaaaagttaaaatttaaaaaattaatataaggtaagaataaataaattaatctttatatattaaaagtgcctatctaacggcaattcttggtttaacgattctttttttttttaacaccaagagaacaatttttaatttttt

SEQ ID NO: 317391 - DNA, 2108 bp, Cannabis indica
aatttggaccaataatattttgacacgtgacaattttaaaaaactaaacgacttagttaaaattaggactaacggacaaataaaaaacatgacattgaggactattaccactatttttgaaagttggggacttatctgtatcaaactgaattttatgaggacttttgccgcaaatttttcttttccttatatagttttggttttacacatctaaatagttgtatacttttaaattttataaattttagtaatattttattttgccataaaaaaagtaaatttcaagttattttcccatatatatgaaaatttcccttcatgcttataggtcatgctagtcctaaaagtatggatcaagcctaacatattattatagagaacgtatcgggcttccattataaaaataaaattttgtaaatacaagtcgagtctacctacacttaacttcttataatattcaaaaaaaaattatttgaaaattagtaaaattaaaatttgatacaatttttactttttagttatcatttcataaaatacataatttatttgatatatcatttaaaaaaatttaaatatccactgcgaaaaagtttactagttatttttatataatagtatactttcttaaaatctaacttaaaaaatgtttgatgtataagtaattatgattaggagttattgttaaatgggaaatttgacaattcatgcttaaaaaatgctatggttttttagtatgccacattaaaattcattgaaatttaatactctaaaattaattaagtctagaaataccctcctcataccttccccttttctctcggccctctctccctctctctaactctcaccaaacccaactaatacccacgaccacagaatcagaccaaaccaatcccagactaaacccacgaccaccgcaccacctccggcgaaacctactctgaagacgaaatgtaggaaaaaatcgaggaggatatcgcaaaaccacaaagagaaattgtgaaatcaaaagccccaaaatctatgagctcaaccaccctgaaaaccccaaaatccctacccatcgttggagttctcaactcgcttgttttctaatttttttttcttggtttttgacgatgtcacaaatatcgttaaatgtcgcgaaacatcgctaaatgtctccaattcacagcatcacgaaatatatcacgaaatgtcgtaaaatcacactcaagttttcacgatgattaacgatatttttcgatctgctgtgcatattttagtctcatatcacaagtacatcgctaacatcatcgcaaaacatagcttaatacacaaaacatcgccaaatattacaaatcctcgctagacttcatccctaactttagatttgttctatcattgcagatacatcgcttaatatcgtaaaaaaactggtaaactagaagaaagaaatgcaaaacacgagagaggccgtgagagaatacgacggtcaggccttgtgaccaaggttctgggtttgtgtgttcgaaagtaggggttctgggtcgaggttaatgtcggagagtaagagagttagagagaagtttttttgaaatgtaaaggtatttttgagagaaaaatatattaaaagtagggaaatttttattaatatacgtaatacatataataataacataaataaccttgattaatttattagtcttcaagtaacgtgacaaatcagcatctctaccgtaataccaagaaaatctcataccgaaatccaaaaggaaacctgccatcttgctccatgaatgtgggtcctttgaacaacatgtgaaacacaataccagaaacaaaacctttaaatttactttcattgtgattatagaatatcaaaatcacaacttgaatcattctaaaaaaaaactccattaacgaacaaaaaagcttcgttcacaaacaacacaacatcaatcaatcattcataaccgaaatcgtttcttaaactatcgaaatgatttgcaaaatcgtttcactaagaatatatataagatcaaagtcacaatttaagaccattctcaccaacaaaaactccattaacgaacaaaaaagcttcgattacaatcgccacaagatcgatc

SEQ ID NO: 317392 - DNA, 832 bp, Cannabis indica
aaagggttttatttagggcacaaatcacaacatttacatgctttcggtttcaaaaataatacacataaacacataggacaatcgtaatatatcatgtttctactatgagatgcatgatatttaaactatgtgggatttctatgtatgacatgttattcatgaatgcattatcgtgttattaatcaataattaatgaatatttatttaaataccaaaaataaataatgattacaaactgagtaatattagaaatttctaattttacaactcttgataaatttagaaattaaattaccaactaagctccataatcttaatatgcttcaagggcaattttgtaattttgtatgatcactttaaggctctaaattaattaaatatttttaattaattatttctcaaataaaattatttattaaacataattttaaaacctataaattaattaaaatatttaaattaatttattctcaaataaatattttatttaagacaatatgattgtcactattattttatctttgttaacgtgatgtctccccttgacggaacacacgagggctgaatcgttgaggttggtaaggtaataccatttatcctgcacgacacacttactttagtcatcaagcagcaattatttaaaaggtcatttccactaagcgacattccaaagatggtatcctccacccaagtcttgtaaatattccacatgtcatctagagaagtggtggactttgtgccctaaataaaactctattacaatataatcttttctattcaattatcaataaaaaaacagatttatttttcattacttgtttagtgtgttatt

SEQ ID NO: 317393 - DNA, 902 bp, Cannabis indica
tatgagatgcatgataatataatgtgtgagatttttatatatgatatgtaatttactaatgcatgagcatgttattaatcaactattaatgaatatttatttaaaagtaaataaataaacaatgatgatgaatagaataataattagatatttctaattttacaacctttaaaattagaaaataaattacaaaattaatctccattgcagcaagggcaattttgtaattttgtaagatcgttgtaagcctcaaaattaattaaaacaattttaattaattattattaaattaaatattaatttaatataccttttaaactattttagataattaaaacaattttaatcaattaattgttaaataaactctttatttacgacaatataattatctttaagttttgtcttaaaataataatatatattatttatttttgggttaaaacaactttaatcttaattggttttagggttgaatttaaatttcaaatctaaaatcaattatatttattttgattcaaatataaattttaaaaaataaaaatcccacaaaactttattattttgacttaattattaaaagtagtaaaactgttttattatttataaattaataattaggtagttatttttttgaatttgaaattaaaataataactaacatatttatttggaatcaaatctaaatagatatcctaaaataatctcaattatttatattaaataattaatagataatatatagtgtatatatggggactagtaaggttagaactgtattttaccaatgaataagtataggaaaattttatttacaccccaaaacttttaaagtacaccccattttaataatttttattttatataaaatttatatctttaattgtactaagtatttttaa

SEQ ID NO: 317394 - DNA, 630 bp, Cannabis indica
attatgttcttaattgtgatttttattactagcaagtacgtgtacttttttcttatttatatatatatgcatgagattgaattgagaataagcttaatatgtacgtagtgattgtatttgaatttgttgtgactagggaggacccatgaatattaatctgggcctatagccccactgataaaatattgcattttaaaaaaattattaaatataaatttttttaatttgattattataaatcaaaataatagaaattaaactccctataaaatcaaataaatctaataaaaataattataatctacgaataaatatatattttttttatgataaataagttccatcaaaatttttaagtccttgttatgactaaataaaaaaatggcaaaaagtaaaaagtgaaattacaaggagcagtagtatagcagtagtatcttaattaattacttagagcatcaccaaggaggcatcaaatttggtgatgcagtagaataagccctccaacgtagctgcaaatatgacactaaattgctgtgtgtgctacagtgcacggcatatatgccgtgcactgttcacacggcatccctttttttttttttttttataactaatttttatatatgtctatat

SEQ ID NO: 317395 - DNA, 969 bp, Cannabis indica
aatatcacactatattaaaaaaagtttaaaaaattattataatatttgaagctcaataaataatgcttctctatatataatagcttcaatttagcttatttgataaaagactaattttactaaattttatttatattttagagaatgagctatgttattcgtatttttcgaacgaaggatacttgacatgaaaagaggaaattaattaggtcctcctaattggaccaggtcacagaaaaggcttacgagtttgggaacaaattcggcctaaaagctacgcggagattcgtcctacagcaccttcccattcgagatttgaaagtcttactatccttctgggattcgaagagaattagattcagagtgtgtccaattgacactcgaaaagctactcgaaagacctatcacgaacattgactgccaaaagaagccgaacatctacgaggaagagagactcaaatcggaccagcgacgattataccttttctaacataggatcaaatcttatcccctgtgttagactgtcgtagtacgcacatcccacacaccattttgcctgacggttagttcaagcatttactttgcaaggcgaaaccttttggcaacacgtgtccagtacctgcaatggtccctattgtccagctgcttttacgcacgagcaaaaaaccttcttgggggcccaacagtcagattattacatgtatattaccataatagttggcttatagaaaaaacctaggtgagtcctggacatgtccatacccgcactttagcctataaataccccttaatttccatacataaggaggataaaaaaacaagatagccaaaactctgctaaattttctttaagctttcttcttttccaagagacaccaagagggcaaagttagggtttcttgtgaacactattgtaaaaacattatacaagcctcttaaggccaataaactgactcgtagactaaggct

SEQ ID NO: 317396 - DNA, 1967 bp, Cannabis indica
ttaattccgctgcatcaatgtaaggtttccttaactttattgtttaaacaacatacttgtgagtagatctaagatcctggtaaaataaattccaacaccaacatagtttcatgatctatttcattgtttgaggcatggaacaaaaagggtatggtactttgaagttggtgccctagcagggagattaagattactctagctcaggcccctttctcattggacgcaccgtcgacatagactttccaagataaattgtcaaaaaaaaaaaacatttttctaattttattattcaaattaataaaatactttttaaaaatagcaaaatttttaaaatcttatatggtaagcaatttttaaattttagctagattatttttaagatttattaatattttaatttcgaaataagatcatttcaaattttattaataaaatgagtaaatatctaatcgtagaattaaaattaataaaacataataaaaataataaaatttcaaaataacaataaatacaagtttgtgtaaatatcaatttttcaaattcaaagcccactaatatctaaaactaatttaaattaattaaaaaacttataaaaaataattttaatccgataattagctttttatttcaaaataagattctacacaaaattctaccaaaatttgaattttatttcattgaaaaatgatttttaaatgttgaaaaaaattcaaaaacgggcaaaatagcggagtatgcattgcatgctccccttgggcgtgattggggggcaaaaaggagtgggaaggctgaacgcggggtccttgaggcccatttgttagtcagctggggcatgggagagcccttgttcgagaaaactgggtcatgggcttgtctgaagctcggtcttgatcgagtgatagcctattcactcgcgcgtccacctacaccatagcctaatattttttcaaacgtcaaaatatcataactaattcaataaaattccaaattgagttttgtaaaattttaaattcataaatttttcatctactttccaaaaaaatatacttttttaatgaacatacaatcatgaattaagcacataaaccaacatgaacacatccaaatcatcacaataatcgtcttaaatccatatttcatgaaagtaaatcattaccatggctttgaggctagtttttggaacttattttacaaggatctagatttattaagatttatgtttcattaactccctaaatatgaattctctaaaataatgaaattaaacacataagggtttagaaaaccttacatttatgggatccgaataatatgactccttccgtttagatctctaatccttgttcctttctgtcacaaagtaatcacaagatttgatcctcgatctctttctctcttttaggtttggttaacaaccgtctttcgcattatgattgagtacttaacttgttatgtgtgggcatggtactctatcactatggctcgaatcgatgaagattaatgaataaggattaaaaatccctaagaaaggagtctctcatctactagttatccgagaatgaaaactaggtttagtttggttgaagtgagttggatgagaatgagtgcatcatgttcattttatagtatttcaactagggtttaggatttaattatatggattaaaaaaataattggcaaaaatcaagctatagtggtcggccattgtagtgggcctcactagttacagttttgccactttatttcaaccatttatccttctttcaatagtgccatattttccaatttcaatactataaatgtcaaaactatttatttaataattataattaagtatcaaataaaatttccatttattttatttattaataacaccatacaaaatttcttaattaacaaatataccccagaaccacttttcttcataactaagacattgcttagtgaaaattcataaataagacata

SEQ ID NO: 317397 - DNA, 568 bp, Cannabis indica
attgaattggattggattgaattttggagtctaattaaatttgatcggataataattttctaaatttaattactaattagatcaaatcaaattatgaaaaaaaaaatagattggatgggatacccaaccttatttctaatacattgtagcggctagttatattacctgaatgcccccataatatttatatataatatacattcatacatatatacacataccaccattcactcattcatgtggatcatgtcaatatgaaacaaaacaaagtgatgcattcacacacattgaaaagtactatatctatctcatgtgagttcatcaaatcatccgtattgatgataatttactcttagctacccttcaggaaaaagcagttcttagtgttagacattgtaaattttttaaaacagtctaatttatttagttatcgtggttttgcagatgggattattttcaagtgggagataagatagtgaaagaaatggatcgttagtggctttcaaaaagcattaacaacatgggctaatggatcgattctaatattgatacttcaaggactaaggtg

SEQ ID NO: 317398 - DNA, 1288 bp, Cannabis indica
ggagtaggatttaaaccttaatcctaatgccatgagaaatagatgattttttcttagttttgaaaggaaaagataaaagataagtgaaaatgataaattttttcctgtattccttttcaaacaatttttcgaaaactcccaaacacaagagcaagggaatttgaaatcccaatcctcttaataattcttgaagaacagaaacaatttctcaagattgtcaaaatggataaccaccaggtagttttcagagaaacgggctctgttcacgttattaaatcaaccagagaaaagtaagaagttgactagggggcaaatgttaacccaaaaacgtatcctggtgacgtggacattaatgtttgacacgtagaaagaaagaaaacatctcagagttgagtagaaccaattcatagcagtcgacctgggagggttccctagccctatgcccaagttgacttcggcaactccgaactgggtgtttagatccaactaagttttttttgacgcactatccttcagtattctgtaccataaagacatgaagcattcaagtgcaaggaccaaaagtttaaaatacacaaaattcaactcaggggcctagggttttacccagcgccaaggttgacaacaaacctagggcttcaatttttaggaccgtcttagtgcaaatgagtgaaaacgttttctatgaaataaactaggcatgtcaagaaaatatttgagacatcagaatcaaatttggagaactttcattttttagcacctggagcaccacctggccactttaaatcatcaaactaaaaattcttctctagaattttctttgactagagggtaaccaaaaggccaaaacaagggaacaacaccctaattgacattttgtcaacttgggcttattttgaggagttttttgaaagaaaaaaaaaagaacttctaggcatattcttcgttttcctcaaaaattaagattgaagtatttctgtggagaaacaaaactgtctaagggcctgaaattggacccagcgcccaggttgacacatggcactaggcaaaatgcccaagttgacatattgttcacctagactatttcaaatcttgtttcataaaaagtgtttcgggcattttttttccatcatcagatttgagaaatatacaagtaaaccattgaaaaatgacatttccaggggcatcaatactgagcccaccacccaatttgacctagtggttgttgggttttatgctctaaataaaactccatttcaatgtaatccatttcattcaacatcaataa

SEQ ID NO: 317399 - DNA, 2466 bp, Cannabis indica
atatatatatatttatttattgatgttcatccgttgacgtgaagaggagccataactcaacccatcatcttaagtatatagttttactcttgaagccaaagtcaagaagagggtttgttgtgaacttgtaagtgaaacactacaagaaaacctctttgctatccctttttcatgtccagaaaaattagtgatatggacaagaaatagttttaaggagtttacatgtccaacattattcgatattaagattatgtttttaaaattaccaagtaaaattataaaacaatttaattaatgcggaattgtagtaaattttttgaacaaaatttatctctatttattagatatagaatctaacagaatagaaatataccgcagaaagtaaaaatgtagaaaataaaatgacacacaacattaattttatacgtggtatcagtaactctttcgagttgctcctgtccatggggccacgcccagagaatgaaatttaatagctgaatctcaagtgattacaaaactaaattgactttatacaggtaaagactccatctttgaatttgccgcaactgttgtaatctattattctaaccaaatttctgaagtgttgagaccttgaattcccttcaaattggcacttgcacacttcatcccaaagagtgacacacatgcaatcttcctcctgaagagtgctatcttgcaatcttcctcacgaagagtaactcacttgcaatcttcctccctaagagtgactaacttgcaatcttcctcccgaagagtgactcgcttgcacttttcctcccaaaaagtgactcacaaacaagtcttctcccaaagcttgatgaacaatatccaatgtgtttaacctgtacaatttcaacaagagacaatgcagaataacacaataagaaaacactaagaacttgttggactcaagttcttcacacaacaaagaaaatactctctaactttgaaagtaatttagaattgatacaccaagagagttcaccaataccaacgatctaaaggtgtatttatacactttagaaaccctctaggtcgtggttaaacaaccaagaaacaactaggtcaataaatgaaaatctttccaaatagaaaagtcaaaatctgtttaaatagacagtcagtccgttcacacaggtacagtgaacctgaacagtttttcagcaaggttttcataaacaaataaggcaactttaactacattaacacacacagctgcatacggtttcttggtcaataaatcgtataaataggaaataaatatgattaagaattttcttaaaaaacaaagataaaattaaataacctaaataagaaaaactcatatttaattcacacacatgttggaaaaagtaaagagaagaactctccttgcaaacatgcctaactcatatcaaacatgtaaaggaaacttaaacttaattccccctcaaaatgaaaaggtccagagttacacataacaaaagaaaacatgtttttgagtatctactctccccttttgtgtcttttaaagcagccaaagaaccaaaaacacagaagaaataaatatgccaaacctaagactaaagaaagtacaaatgttcttaggaatggaaacaaaaaataaaagacaagaaaaattaaacttttggggccttagacaaggctttgacaacatccagaactgagcgttggagtttttcaagtgtcatcactcgatcagtcaaggcatcaagggaagctcaaacaccagagagttctgcagagacagatgctaaagcagttagaacaggacgctacaacatatcaccctattagcggcggacctctctaccgctaatagcccctttttcggccgcaataagctattagcggtgaaagtctcctgctaataaatagtcgctaattctattattagcgacggaattgggctctgccgctaataatagtattagcggcagaccattagcgatgggatcccgccgataatggtcttcgttagtttcgaacttcacttcatcatcactgttaaagaaagatatttcacacaagaaataaattaaacaaaaattaaatacaagatctccctaagagtttagtaaactgctctgataccaaataaaattctatttttatatttaccaagtgaaattatcaaacaatttaattaatgcaaaactatagtaaattgtttaaacataatttctctgttttatcagacatagaatctgacaaaacaaaaatatactgcagaaagtaaatacagaaaataaaatgacacacaatatgttatacatggtatcagcaactctttctaattgctcttagttcacggggccacgccgacaaaatgaaatttattagatgaatgtcaagtgattacaaaaccaaattgacttatacaaataaagactccttcattcttcctaatttggttgcccaaaacctaggaggattcattcaggg

SEQ ID NO: 317400 - DNA, 1015 bp, Cannabis indica
aatattatataatataatcgtaaatataaatttaattatttttttatgtgagaaagatgtattctcctgttgattttgatgcattatataaggaatgcatagaaagtaataacgggaagaaagacgttgatcatggaaacaataagtgggatcatgggaacgatgtttaaaataaggaggagaacacgtatctctttacccattaattaaacacatttaaaaactattttaattaattgaataaaataataatttaataaataaatttttttcaaaaaataaagtgtcataccatactagctcaacttgacacggtcggacggtgcatatgcgtgtagtggatcaagtgtgcgtgtccttagccattcgcacaataagagaaatgcatagaaggtagtaacgagaagaaagacattgattataagaattttaagtggactttagaggtaggttttaagggcttttagcatcgcctttagcaaaattctctactgacgctattccaggtgacactgcaggagtaaaacaaccgacgacataggggccatatggcgtcggttatttcataataaccgacgccatagggcccctattgcgtcagttattataaaataaccgatgacatagggatcttatggcgtcagttattatgaaataatcgacgccatttggtcttcaactttacaattttgtgttttagcataattttttttacatatatattatattattttattattaatataattaaattaagtataaattatatataataagcataaaaaattgaaaagttaaataaatacacatcaacattaggtattgatttgagatggtgtagattttagttcgagtatgtgatggagtgcagaaagtgaggtgagttaagagcacttagtagctttcgaatggcataactttctcactgcttaactaatttagcaatgtgatcacttgtttttaataatttttcaagaccaataaaatgaaacaataatttaaggaccagaataaa

SEQ ID NO: 317401 - DNA, 887 bp, Cannabis indica
tatattttaggggacaaaattaggtaatatcgaaagttcaaattacaaaaatactaattattctaaaaaaataagtaatttgcggtaaatttttagttacacttttgaaatatttgtacatctgagcattaaatagtgtttgacgagatagtcatttttataatcttttaataaatacttattattagagtgaaaaagagtataagtaaagagagaaatgctaaaagttattttatgtgtcaatattactaatggtctaactatgtctcggatctcatataatttaatataataacttttaatgagtatcgctagtcaaccgcaaaacgacatgtctagtagtgctaggcaggcaccaatacgcgtaaggactgctaatgtgaatttatttgagataagttaatgaatattttttataattattaattaactaaaaataatttcacattaaaattaattgaaacatacttgcttttatgagaaatgtacccaaaatatcctcacataagttaatcactattaactcctgaagtagcctgaagtgttcaattaaatagacttgttgtggtatttttaacacgcaagtgtacgtatcgtaaacaagtaatagactcacaaagagtgaggtcgatcccacaaagattacagttaagtactttaaaattaaatttttacttctatttggtgaattcaaaattaagagaaaattaaatttaagaacactaaagagaaagtgaaattaaaaagcaagtaattcaaaagaaaaattaacaatgattaaagttagggcttcgatttcaattgtatctattgattatggcctaatatgattatcttcctgttaccaatttctatataataacaagtttactaaggtaatttatagt

SEQ ID NO: 317402 - DNA, 570 bp, Cannabis indica
gttttttttttttatgtcaattaatttctctcattattaactaattttaagatggaacttcatacattttaatatacactcacattcatcttactttcttcttttttttttgaaaataaagcgttatatagatagggaaattagacctcctggtaattacaaagaatagtaacagatatcgaggagggctccacaaaacctgtaatgttatgggcaaacacccatctagtcacattatgagcagcgaaattataacaacgaggaataaacaaaagtttacaagatacaaagtttttagatagttaattacataaagagacataattatcaatattccatatagaatgtagaccctttagcgctttgagtctacattctagtcacaatatagaatgtgactcctgagtctagccgagtcaatggcaaggtgacacgccgccgcctttccaatcaacgggtccctaaagctgagcatggaaacagcagtccacaaaacatcccctgtgtgatctctagccagggccgcaatgcacatagaatctccaccaaccctagcatcacagttgattt

SEQ ID NO: 317403 - DNA, 1054 bp, Cannabis indica
tgtgtgtgtgtgtgtgtgtaatagatggagtcccacatgggatatgagcccttatttacaagagtatataaggtgcaattatggcatgggatatagccccaagggggacccaattatgtgcaaatgaatgaggacacacaattaacccaccacatgcgtgcgccgtccaactgatccaagctggatggtgtagtgtgacactttattttttacaaaaaaaattatttaataaaataattaatttatattctatttcattactttatttaatttgagaaatttgtttaagtaaaattgaatacttatttgtatcaattttatgggacgcgttcagcaacaactccacgattcaaaaaacattcttcttcccattatattctcattccatttcacgattgaattaacgagagaaacgcatctttttcataccgaaaaaaaacataattttcactattaaaaaaatctgtgatatcaaattttgagggtatattcaacgattctctactatgcagtggtgatccgatgcagtatataactgtgttgttttatcttggagacgaccagcatttttcaactgcttgcacattcttgaacagtatcgcaaacgtcttaaatagagcgacctaatttgcgactgaacccaaaaatttcattcgataatatcattcatcttttattttcagaaacagtatatacaacacgaattatagcacaaattgtttccttttaaacaataattcccaaaacagcaacccaatcctaaatgagagagttccttgcttagtgatttcacaatctccttcattgttcttcaccattcgaaccatagtgatgagtgtcatgcccacacatagcaagtcaagtactcaatcatagtgagtaagacagttgtaaccaaactcgaatgagagaatgagatctaggttcagatcgtgataatgctctgctagagaaaggaatcaagggctagagatcttaaacggaaggtgtcatattattctgctgcaatcgatgtaaggttttcttaaactcttatgtgtttatttcattgttt

SEQ ID NO: 317404 - DNA, 1538 bp, Cannabis indica
gaattgatagcaggtgctcatcaagttcgtttttgcaattcgggtacatagctgtagtttggattactatgctaaatagtagctggttttgaatttttggttgactttttcataggaaattgtcagaatgctaatcaattttactcttttaattattagctttgagctgtgatttatgtcgacacgaatgatggtaccagccctttttgaagtattcacattttgaaagtttaaatactttccagcaaaaaaaaaaaaactttctgtgtttagcatgaatcttaaactcttttgtcacattagtcctaattagagagattggtatcactttgatctgtgcaatgattattgtcttgtgaatttgcagagaaagcttggtgtttatcttgctccttttcttcatgggaatcggtatacatcttatggtcgtcatttcactaaagtggataagcttaaggaggtaaattgattcaataaggagcaatttttttttctcgagccaacatttttattatgtgtacagtttttcagaattgtaacataagaatctgagtagcactagcaagtagcaacttgcccctatgagaatgacattgctgtttgtttatttttcaatttgcaattttatacatgtatatatatatatatcaatttatatatctacctgagcatattttaactatatatttatactggtttctcgtgtaaaataatcaggaagactgagaaggcttaatagttaaaaattatgaagctgatccttgtattcttcttttaatacatacaaggaaggcagttttgttttaaaataattataataataatggtaaagattttgaagctaaactcgcatgcccttttaggcataataagtaatagttgataattacctgccgatgctagtaaaataagctccatggtacctccaccactacagacaattgtttaataatcaatgctctagtttttattaatggttagtatttttgaggaattttttataacctaatgggcgcttcttagttctgagggattttgttcatcctgtattgtttgttgaagattgttcttggaattttctagtcttattctactgtttctatattcctggaatggctgagcctttttctactgaattttgtttatatgactggctatgtaatatgttatatgtgttgtttatttatatattttgatgtgaaagctaatagcataatacaactctacaggttgttaacaggcttcatttttatgttcaaaatggagatacagtgagttattttcaatttggctgtgttatcttgatagttattgcattttctagtgcaaataattattgtgtattttaacgaaccagtaataataaattttatatactacagtacagcttaaagctaaattactcaggaatgtatacttcaacaaataaattgacaataatctttctttgttgaacagatagttgacttttgctgcggctccaatgacttcagtcttctgatgcgagaaaagcttgaaaagacaggaaaacagtgctt

SEQ ID NO: 317405 - DNA, 862 bp, Cannabis indica
tctatttattgatgatccaacattcaaatgacaatttttgaataaggagtgatgatacctccgttctttttgagattagaatttcgaattgttgatacctctgtgtaagcagatttgatcaatgagaatttgttgttgatggattcacctctgttgatatttgttttttgttgctgtcaatctgattattcgagtaggtaagttttttgttgatttttcattgaaatgttattgaatttttgttttagaaagctttgtcgaatatcaacggctgctctattttattttttcactgggacgagaatggttaaggtgttgaagaaggtgacatcgtattttatgtaaattagattacacacttaccatatataagttgtatttagcgtgtaaccgtatttttgttaatctttttctaatttagtgcaattgtgaaaattttccctttttaaattccttggcgagaacatgaataataggccgaatttttactaaacatttttgatacccactaatatttttttacatgttttaagtagtttcaatcacacccaattacacataaatgagtataaaacatatcccttaacaactataatcattataacttttaactttcaaagagtaagtttgtgtagcttcttttgcacacttaattggtgatatttaaagtagttataaatttgttgtcagtttttgtacactcgtcaaaatattacaataattgacaaaaaaatcaatttgtcacatattatttatctaagttatattatttagggaaaaaaataggaaaattccaaaaagggtaaaatattataaaaatactgtgggccggcccaataaatatttatacaacccacattga

SEQ ID NO: 317406 - DNA, 1004 bp, Cannabis indica
attaatataccaccaatatagtagaaaatatatatatattaaaaacttaatttaatattccacatgttttttaagttatatttttgaaacttttgtaggtatttcgtagttaagtgtcaagtcagttgacacgtgacaatcctgatttgtccaagccaataaatttaattttttatttaaaaattaatttaaatatattaataaaaatataacacgtggatcatgacttaacacttaacgatcaggtacctacgaaagtttcagaaatataatttaggtattattactgtcaaaaattaaacttagatatttatctgtaactgagaattaaatttaaatatttatgccgcaaattactcaaaaaaaaaatttactgtaaattttagtgtaaattcacttataggtaacttacgtaatatgcaagagagacgttttgtatttttattttaatcatgaatttaataatatattttgaaatatttatcacttaaataaaatacaatttggcctctcctaatttttcatcttggctccgcccctacacataataatatatatccataataaattaattaattaaaattatttgagttaaaaataattagaaaaaaaaagactctacaatattaatttatttttcttgtgttatcaatagtaaaaattgaagatttaattagtagaaaagttactcatactattaaaacaaaaattgtattaagaaatattaaaaatttgaaatttaatataattttatgacttaattattactaaacaaaatacaaccgcacgcgaagcgcggtttactttctagttatattaatatgaatacaaatctaaaatcaattaaaagttttatttgcaccccataaaataataaatacatctcattattaaaaaaatataaactataataatttttaaaaattactcttaatagtttttttttaaaaaaatttctacattattttatgttaatttctaatacttattttgattttcatttt

SEQ ID NO: 317407 - DNA, 1120 bp, Cannabis indica
taaatagatagtgaaggcttcaggaaaataacacactttctgaatcagaaaaacctgagcctccactctcttctctagccgccactctctctctcttttcttcctcaatatttcgaacctctcttagtgattagagtagtgcccacacacatcaagtgatacctcaatcatagtgaggaagatcgtgaagaaagatcatcagcaaaggagattcagcatcaaagattcagagaaagagatccaggttcagatattgataatgctctgctacagaaaggaatcaagggctagatatctgaacggaaggagtcatattattccgctgcacccaatgtaaggtttcttaaactttatatgtgtttattttatcgttttagaaagttcatatttaggatgttaataaacatacttgtgagtagatctaagatcctggtaaaataaattccaacacttttgccgtggtagaagttggaaaataataagaaaaaaaataaccaagtagttagatactcatactaaagaagatagtagggacacgtgagaggtccccaccggaccaaacatcccaaaatcaaagtctcaaagagtataaattctagacaatcaaattggaaacacaaaaagccaatcaaaaggaaaaacaaagtatcatctggaatcatatgggtcctagacagaggaaacaaatgtagccatccctattccaaaaaactaggctatttttaatcagaaataaaaaaggatagaagatcttttcagtgtggtgaaagtgcaaggataataaagtgccctcacccgcataaaattcaaaaaatataaaggattggccaaacatctcgagaaatggttcggtgtatctcaatagcataatgatcaagtcgctacctgagaattaaggtagtgagacacacccgccatttcgaaaatttagtcaatcctcgcaaagtataagtcgcacatatacaactaactgtgtaccttaagaaatggctgggggtgaaccagtatcccaatgggcatgcattcctcacatgaccattgagttaataagacacccccactgttggaatatttattttaccaggatcttagatctactcacaagtatgttgtttaaaca

SEQ ID NO: 317408 - DNA, 639 bp, Cannabis indica
aaaaaaattggatattacatgaaatgctaataaaagactcatatggtagcagttattacataatgtgcctatgacaacagttattttataataattgtagctatgggattttatggcaacgattattacataataaccgttgccataaagtctcatatagctatagttgctatctctttttagcaattgctaacggttttgaatttcttcaaaattgttactgaaggattgaataaattgcctataaaaaccattttgtagtagtgatatttactaaatatgtcactaaaaactttataatattaaatggaataagtcaaaatgtgtaataaaattatcttgaagcatttttatgaaaatataactaaatagttttgttattcgtgttttcaacattggacacgtggattccaggtcagcactcaagacccagtgggaccctcaaggtaaagtgggttaagcccacttggatatgtccttctaggaacgtatcttagttctgcaatcgcaaagccttccgccttcggtgagtcgtgtccagaagcatgtctagtaccatgagatcggagggacgagatagtgcgttcttgaaaaatctttctagtttccttttttattcctgcgcacaaataaagaaat

SEQ ID NO: 317409 - DNA, 994 bp, Cannabis indica
ttgcaaaattgcaaaaagcaaggcccagtccactaagccatgccggcacctttgtaggtttttaagttgattttttcattattttaatgccatataattcaaatctaaccctagtggaatgctataaatagatagtgaaggcttcaggaaaattacactttctgaatcagaaaacctgagcctccactctctcttctctagccgccactctctctctttcttcttcctttgaatttcgaaattaccttagtgattagagtagtgcccacacacatcaagcaatacctcaatcatagtgaggaagatcgtgaagaaagatcatcagcaaaggagattcagcatcaaggattcagagaaagagatccaggttcagatcttgataatactctgctacagaaaggattcaagggttagagatctgaacggaaggagtcatttaattccgctgcacccaatgtaaggtttcttaaactttatatgtgtttaatttatcgttttagaaagttcttatttaggatgttaataaacatacttgtgagtagatctaagatcctggtaaaataatttccaacagtggatagtttggtagaagacgatttctcagtcgaagagaaattttggggagatcgtcaaagtctggattcattcactacaaaaatctctcattgagctttgctctcaagaaagttcaaactcaggcgaatgaaagtttataataggaagaagtggtaagtggtagctttcaggagtatttatacccaaaatggtttccacgtgaagaaaaaagaacgatccagatcatttctccaaaagcacaaacacatcctacagcccgaaagtccagcaatcaagcatgtcaagcatttaatgcccttggaaccgagacataaatcaatgatgaaagtgcttttcttaatttttgtgccagtaatcaatagtcatcgaaataaaagcttttctagaaagtgttggaagttattttaccaggatctta

SEQ ID NO: 317410 - DNA, 653 bp, Cannabis indica
aatagatgtcattttagcaatttctattcaatcaaaataagaatccaatgttgtcccggtaggcgagcatcaagcttattcttattttatgagcttctactattgtttcatatttgtaaattcaattctaagtagtcatcgtagggatgagtctactagaaaaaaaattacaaaatacttatcttttgagatcttacgttgctaatgttcaatggttggaggacgaaatctagcgcctccaggtcccattgaaaaacaataaccatgtaagaccaacaatggagataaaatgtcttaaaataaaaatcattattttaaaagattgatgacctcaaatttgggctaccgatagtggagtcatattaatgttgatgcttaccatgtgttacacaataaaaacaagaaagtaaaagaacacaatattttatagaggttatgtcctttagttagcgggtaatgacctactccccttttagttgtattgataccaagagagaaaactatttagatcgctataggtgggatctgagataactctcttaagattacaatataggaatcaaagatggaaaatctcaagtgaagagaggagaagtggtgggcgtgacagagagagagagtgtaacaccctaactaccataggcgtattacgt

SEQ ID NO: 317411 - DNA, 1003 bp, Cannabis indica
tctgggtaggattagttctttctacatgtctatatctttgtgattttttgtaagtgttccttatgtttcttccatttttgtctacaactaagccaattgatgacatctttgcctccttggatgctttaagtcccaaaaaaggcaataccattccgcttgctgacttctcgagggtcatctcctaaaggtccaagcacgacaagggcttctgatctggaggtcgtatgtgtggatgacaaggatgaggcagctccattcgagcgtaaatagaagaatgaagttgatgaatccgtatcctcaaagaagctcaaggcggccaagatgccttctaatagcactaaagattcgagagtcccttctgaggcatagacctttcgaggcgtcccatctattatgctgactcttgtccatcctgacgaggctcattaatagcttaggattgctaaatgttatcccaatttttcccacttgacgtggcatgtccacatggccgatatcagtgccacgtggcagtacaagtcaccaacaaggaggtcaagtcagcatcctagccaacagggggtcctggtactcaaccgggatgacgagctacaaaccagccacctgaaaagggttggtcggccacccatggccgatcctatggccgcatagcttctggaaagcacaaggtcggcgagcctgcatcctgtaggtgcatggccagccaaaattagacctggcagggctttggtgcttaatcttacacgtgggttgtaagctagactatgaatcgggccttaattgcccacaaaagtagatagaaaatacctattttaaaggatattttagtcttttgtatttcagcaatttaataggtaaatatttctaattttatctgctaattaggatttaagctctcatatataaagagccttaactcaaccctaagaccctaagtcataattaagtctcattttagcctaaagctctaagtctgataactcacttcatctctctctctctc

SEQ ID NO: 317412 - DNA, 1313 bp, Cannabis indica
atcaaataaaaaaaattatattttaaaatgtttagaaacaaataaaaaatctaactgaacgaccatttaagagagtttaccacataaatttccaaataatatttacacacttaaaataacacttaatgattagaaaaagacaccacataatctaaatgtgtcatatagttattggtatataattaaatatcattattgttatatatattatttttgtaatttttaattaaatattacaaaatatataaataatttttataacaattaagactgaatacatttttaaaagattgtcaccatataaacaaaattaatctgaatattattttcaaagatttgaaatgaatttcataacctatatagctatatatagctttgacccatgtctctataaattctttttttatatatatatttttaaaaagaaaaataaataaatagtgtgattttacatagaaggtttttttaaaatatatatatttgtaataattattttattttgtagctagggtttccatgtcaacaaatatcacaatcaaaccaactttttgatagaaacaattttaataaaaaaatacaaaaaaaaaaatagatgaaataactacatcaaaatcccctgaattcagcatgtaattgattgctattttatagctgattaaactatatattatattatatatatacatgtacacacatatataaatatgtataattctagagagtaaacccaatcacaatcttacacgtggcaattaataaaaatgtagtagatataaagataaccactattaataattactaaattaattattgtataaaatatagtatatatatgtttgatatgaaatttgaaaaggaaacaaagatagagacaagaaaattgataaaaacctcttcaaaggtcaaatgtgttagtgattataatcaagaatcttgaagaggtttcatatagagaaattatacaataaattaataataataatagtctatgtctctccaaaaaaaaacttagttgactaatatttaattagtttggataattaataaattaattaagagtaattatagtatttttctatatatagtagagttcaacacaaaagtcaataaataggttaatgaagatgacatagtaaaaataaataaataaatataaaaagttaaagtcatttattggatttttaagctgtaaaaattggaattgcggcggtacataatagtatacacaataattaattaacatatttatatatttatctatagaaaaaaaataaagaaaaattaattatacatgtatagaagattatttagag

SEQ ID NO: 317413 - DNA, 975 bp, Cannabis indica
cagtaaaccatgtaaaaatccctttttttataactagttttttgggattgaagctaaagtccaatttttttattttttgaacaccaaagtccgaatttcagtgttgtgaattattgcaagatttgctgaattcatcagtgacttctgttttatctttcttagctgcatatgtgttattattatgagaaaattatattctatatttttttttatattgttctcttttatttttactttcttttttaaagtttatcatttttacctcttttttttaaacattatactaattttgcccctatcacttcaagatattctccatgtgactctcttatgttagggtattttaggtacaatacatataaaaagaggtatgttttaattaaatttaaaattagagataaatttaattaattgattaataaaagtggtatttctcaacttactcctattattattttgtttttttggtagaatacgtgttatttttattaaagatgatcttctcttttttcaggcgacacaaaataccaaggatgtccatatcaatctttattataaacaacaaataagaatttaattttttattttaaaactttaatggaaacaatttttattttatatttttttagttgcatattaaagtattataatattattttaatagagaaatttgacaattcatgtttaaaaattatccatagtcttttagtatgctatattaaaacgcataggaatttaatactataaaattaattaaatcccaaaataccttccctctttctcttggcccgctctccttctctctctctaactctcaccaaactcaaccaatacccacgaccaccgcaccacctttggtgaaactcactccgaagacgaaatgtatgacaaaaccgaggaggatatcgcgaaactacaaaaagaaatcgtgaaacccaaagccccaaaatctatgagttctcaactcgcttgttt

SEQ ID NO: 317414 - DNA, 813 bp, Cannabis indica
ttagctttttcaaaagctatgccgaacggactcttaaagtactcacatcagtttctttactttattttttaaaatacatcgtcaaaccttttttctcttattttaccacacttttatattataacatacattaacttctttatttttttgtactatttaaatattgtaatttctaaaatattttattatataaattaaaaaaatttaatgaaaaataatttcaaaaggagagagaaattaaataatatttgaaaaatgaaaaatgcttattcacatgtaaagaaactctattcatgaccttaaggtttgagctatttaactcacttgatggagtcattttttaacaacattttttatatttttacaaattttacagttcacacctttgtgttttccaaaatttagaaaaaattaatatgtcgaaaaataagactttaagagtatgttgtacccacaatttttttatatatatatatatatatttgaaataaattatttcaacattattttttgtattgtaatatttaaattttttaaaaattttataaagtatcttaaataatcatgactatgtgttacataaaaaaaattaagattaaaatgatgtgaatgtccaaaatactaatagagtttatcaagtgcacttccttttagaagcacccatgttattacttctagcacttaatactaggctaattatgattttttcccttcgaattttgacatgttctaaatcatgtctcctgaatttttaaggtcgttaaaaatgccccctgaactattgagattgtcgaatttaaggacttttgtcca

SEQ ID NO: 317415 - DNA, 1863 bp, Cannabis indica
attgcttggttcatgcttatatgtttatatataaatctgctacaatctcgaatatatgactattcatgatttattagtatttatcaatactaatgaaaaaaattaattgtgatcatatactttcagacacattttactcttgagatttatcagtgtactggatttacactgacgtcataatcgacgatgtcatttactcacacttggccaagtggaatgtcttttaccaaggtattagccaagtaatcttgtatcagatgtagtattcgcttatacattgaacttgaccgatattaacactggaaaaatatcataacttactgttatatcatttctaagtcaatatcatttcattgactatagtttaattgatcttaatcttaaaatggttaagctttagcctaattgtagtatttgaatgctttgatatattcattactagcttacctacctgtctagcctacacttacatcttgggaactcggtagtgcaattgaatgaaagtgttaatcatagatatggacatctataacttctatgtttgtttaggagtgaaatgattgttttctttgagcttggctaaatgtgataaacgattgagcactcatttcaataattacattagtttaccaacatatcatttacaaggatctaagtattttgaagataaaatatattgaagtttaaaacattaacgttgacggtgagaactcttctataaagttatggttgaaaatcaaaggttttacgcaagattgtattaaattgttttattagtaatcaagaacatgaaaaaatggtggagaagtaatggagaatatgaaataaaaattctatatttctctcaatgtgcctttcttacagtgattccaaccccatccaaatctaaaatgggggtatttataggtgagcaatattggctctcatttacaatatagtttcctagttttctgaaggtgacatatgaaggacatcctacctttgcaggtggtagctataggaggtggtcttgtgccatgtactgttgtcgattgtcaggttgtcctagggtacagggtagtggctgcaatatactctttgtcgcgtcgtcagggcttgcaagcgaggtgtctccattgtactcgtcctctcataatgtccaagttttgtaggtagcatggccatacccatgtgtgatatccttttgattctcttccttacaacttactaagtgttggccatctccctgagagatgtgatcactaattggaattacccaatgtgtgtgcactgccgagatgcatgcatacaagatgtcgtcgagaggaatgtatgcatgctgtcgagaggcatgcatgcaacatgcccagaggctacaggtgaatgagtcgagaggcgcaaaagcatgtagttgagtggcatgcacacatgtcgttgagagggtatgagaggccttgttgcaagagaccatggtgcgaggtgcttcctacgagaggccatgctgcgataggccattctacgagaggtgtgcagcgacatgttatgctacttattaaaggccttaatgtgagaggcttgatgggagatgcctattgagagaggaaatgctacgagaggccctactgcgaaaaaggggccctatgaaagggtgcagtgcgagaggcatgtgttgaaaggccttgctgcgagaggccatagtgcgataagtctgatgcgaaagtccccgctgtgagaggctaattgcaagagacctcgctattagaggcctgctacgagaggccttgcttagtgaggctttgctacgagaggctttgctgtgagaaaccatggtgtgaaaggcctgttgggttttatgccctaaactaaactctatttcaatgtaat

SEQ ID NO: 317416 - DNA, 1797 bp, Cannabis indica
aaatcttggattattttacattggtgggtagtcttatttataggctaccaagttgatgggctacactaatcagcctcaatgacagggttaatccccaattaacctcactaattgaagaaattacatctataaaatttgactattttccctaagcgaaggtcggtgacccaacttggagagtaatctttgttgccctatcttatcttgtaatagtgatacagcaagttctagttgtatcacctgtgagtctaaagactgtgcatttgtcttgtcttagagtagtgcgtgtatgaatttctaagtttatactacttttgggaaatttattattccagtaggacaaaaggaacaagctacaatagagttttcctctgtacatatgcgggtcatctaaacctttctaaaatatgttagatggaatccctttcagtaaaggctccttccaagaatccaatcttttgggaatgattagtgtggccttacatggtaaggtttatgcagtttcctgaagcattttataaccgtgtggaaaccttcgatccatctataacacatattttgttattcagacatggactcgctaggaaagttctaagcaagaaatctacgcttttaactcttcttagatggtgacacatgtcacatttaaaatcaagaataactttaataataaaaattcatatgtaattactaatttatatataaatacactttgtgcaaagcctaataattacacacttacttctaaacataccataatattactcaataaaattagtttaaattttacttttaataaaattctcctaaattaaattttatttctccagcttatggtttggcaaaacatacccttcaattagataaagatttatccttgttcgatggcggatgtcagcttcgtatattctaatagtgatcttcattactatgtcaaaaaaaaatatatataattaaataattgaaaattttgtggcataaataccatatatttttaattttatagacttaaatatcatttgtttttttttgacaaattaaatatcttatgttacattctattactttcgtcactactagtactgttaagtgtttaatttagcaagtgggatgccacatgttatccgcatttttgtcatcatgacacgtggatttttaatcaaggaaagttaagaagtcatcagctggcccacttcctcaattggtgcttcgggaagtaaaaggcaccaactttgggggaagagcctctgtaaagaggagttccccgactgctaactacacggagggtatacgtgagtcgaagtctccctccgttctaggaactaaagccatctactctgaaaaagagtatggatcttctttgaagggccatagcattctgagaaacactaaacagggccatgcctgcagcccgcaaagcctcacctaaacgtgtcagactatggacctggtggccaggctatctcgagctcaatgttagttgtctcccacgacacgctattgtacagagcatgtgtgtcctgaccaaatgatccaatgactagggacgaggaaagtcaaatagagaagccccgaagcgacacgtgtccgaggttcgctcgtacgatctgacacctttaaataccatatgggaaaaatgccacctaccgatccaacggtcggatttcaccccaacgatgttggcctataaatacctagacaaagcacaagggagatgaccttctttcataggaaagacccattcttcatcatccgaagcaaacacatttctgtaatcctgttggatatattttacca

SEQ ID NO: 317417 - DNA, 1764 bp, Cannabis indica
gggtgtgatcgtatgcctgtaaaagatagttacttagttatcattagttgaggagttcataaacttgtgacagtacatatatactagccaaatttggtatgaattatttatttgttattcaagaatattgtgaaccatttccttcctttttgtacacgcaatattgttgtaattgtgctacttcttcattataatcccatttttttttaaagaattataatccatgttatgtcaaaaaaaaaaaaaatcccatatggtatttggaaataaaataaatttatatatagtgcctcacacgtgttccacattctatattattacttcatatttatttatttatttgataattacttcatatttaattagttataaatatataaataatcagatttatgcatttacattagttaacttataatactctaggaatctagtatttttgtttaaagcaatgacaataagcaaataatgtttataaatgttaagaactatatatctcaaaagaaaaaaaaataaataaaaagtgatgtaaccaaattatttatttatccaaaaagtatgcacaattaatttatttgcaattatattatgtcgtcagatttatatgaatcagagacactcttaatctcattaacatatttggtacattctctaataatgattttagatcacgaaaaaagaattacacaactactaaggagtcagaatcgataataagtacaactatttttgaaagaaaaaaaaacatatatccaacatcactaaaattgcttcacattctgcttaaaaatttgaaacatctttcacgtactcctaagttaagagacaacgcttgtttaactccattcaaatattccaaatgaaaataagatgtttcaaaccgtaacaaaaaatatatatatatttaacaactaataaaaattataaaaaattatttataatgagactaaaattaaatatattattctctagcaaagtaataatcatattatttaaatcgccaaaactctaaaaaaataaatactctaattaatatgaaagtccaaaataactataaaaaataataaattatgagtcaaaatacacatgcatatatcttttatgtcatatgtatacaaagaatgtaaatgaagtatataacactagaattggatgtgaattacatgtgattcattccgtatgggatcggtttaaatatatggtatacatcatctttgatgtatacttagctaattatttaacatttgttttcctattacgtacgagctttatataaatgttatatattttttaacaatataaatatgttatatatatgtacatagttatattatatatagtactggcaacattattatacatatacaaactgttgtaccgttaatttagtgtgtttctatgttacgtgtgaaattgattactattctcatgtaattcacatgttaattaatggaacatgtttgatatattgttttaaatatatagacgagttagaaggaaatatatagtttacttattccatcaactccatatcgttggtacttagcatcaattgtttaatttgaaaaggaaaaataacaaaaataattacaaaaatacggtttgtataaaattttaaaattttatacgattttttagattctatttacatgaaatatatatgatatttttatgtatttttatatttactcttataattttattattaattttttattatttgtatattattttttatcttatttttttgttatttttacgtaa

SEQ ID NO: 317418 - DNA, 1481 bp, Cannabis indica
acttgtgacccttaactttgaagatatcaagctaaatactgcttagttgttggatggagttacactcaagacaacatgccaaacttttcattgggtaactttcacaatgactgttgaccctttgtttttgaattcatttattgagtgttgccattgtagctttcctggttgagtaattcatataatatggcatttttatgtttacttatgaaatgaggaaatatagagttcactttattagcttacaaattcacactagatggcaatattttggcacttagttctgttctcctggatgaagtatcaaactctagatttcatcaaagagtagaagaactattaatattgttgtttgcctcgtctttctgataattgttgttgttttcatctattgtctttctgataatttttgttgttttcatctattgtctttctgattttattgtattgtacttttcataatgtctctactttctttgtggactggtgaaaatacattttagacaaccatagtagaagaaaagaaagtattttatctttttaggacacataaaagtgtacctaaattcttatttcaacttgtcatctacagcttgatattattattattatgtagagaaggttgtgtttgatggtgaacaagttgaaactttattaattgcatgagacctatcaatttaggatgaaattaatactcaaactgcagcttatatacttgccataagttaagaaatactttttttttatccattaactaaaaatactcatattatatttcattaaaatgtactcacttttgtgagtgagttgttcaatatacatttattctttatttaattttgacacatagtttacattaacttaaggggtataatgggaagatcatttataaaagttagtatatctctaataatataaaaataaacataaaataaagtagatatacaatataattttcttatactttatatatatttgctaagaattaagattcatatggtaatgtgattattatgtatttaagcttttttcttattggcagataccttttaataaaattttttttttactaaaaaataaaaaagattcatatggtgaatctgtgactgattatttgttattttcttttaaataacaatagaaaaagaagggtgtgctctttttcaattaattattaaaagcgaaggtaagttatagcgtagacatatatataatgtaatgaaacaactaattgtgacaatccaaaaaaatgaagtctgtgccctgaactgaaatgtatatgtttaagtattaagtgcggaattaatcaaacatatatacactatgaataaggatcgaaatacctccagccattaaatcttgagcttcaaacccacataagctttgatctgcaaaggaaattgactaccatgggtaatcgggcttcctcgctctctcaactctctttagatggaatttgctgttatgacagaatgagtgag

SEQ ID NO: 317419 - DNA, 1778 bp, Cannabis indica
ataacgtattaggaggacaggatgattgagtcggactctcgggtaagttgaccagccaattattgtggatgatgcaaatcttgaatcaaccacccggaattgctaattattaatcattcattcctgtcgaatggggaaactctttcaacttgtcaattattgcacattattatttgttccaatccaattcagcccaatcaaattactcctctcctcctcatgttacagttggagttattagtgtgttatttcaacattcaaggctaagtttgctttaatgttttctcttccctattgatttatttaatgaatagcgttaaaggtttggatttttgctcttaaattataatattatcctccctttgaacttttcaaactattaaaactatttaatagtttaactatttgtgccttttaactaattgtgactgttacgtcaacactatatgtgtaatttttttatcatcaattaatttttaatttaataattttttaaaaatgcataatttttatttttttaatgttaaattatgtacatgacacttacttaactaagtaaacatattattattttatttcccaagtataacaatatttgacagaataattaaatagtctaacttaatacatctccaacggatcgtatagaaaccaacaaaaccatcatcaaagttctgcttttacgatttattactcagttagatagtaaataatgactctatcttgggtctaatgcaaagctgtatgacaattgtttgtagcttcaaactttaaattttggacttttggtaccataataattaattatttatgtcatgataattaatcatttggagtaaactaataaaaacaatcacacataatatagaatttaactgtttgttttatttgtaaaaaaaaaaattagtgtttagaagaactatgtagtaatataataattaaaatagtaattacatagttaaataattacactataatttaaaataatatagaatatgagaatgtaattatatatgaattgataatattttctttgacaaaataattagtaataattatacaaaataataatattgtttaatagttaatatagaaaataggaattttttaataattacattcaattttcaagggattagaacctctcaattacatctaattatataattatagaataattacataatcaaacaaatataaattacatataaattacgcacaaattcaattataccgtggcttttcaaaccacaggaacactattacctcaaattgcacacattccatgacaccttagcttagcaaaccatagggagcaccgatatccataaacaagaatgaaagttaccataattggaaaaaagatcaaatcttatctcatctcaggagtaaaataaaataaaaaaatagtaagttcaaatctccattaccttctcatttttcctttccaaactctttcccccgaaaatgtcctttcaattccaaattctcactgtttaggcaacccaaataaactggattcataatttcattctattaaaagaaattagcaggattcttgtaataattgttttaagcttaatattagtttacactatctaagggatctacaactacattctggaaacactcatttgaccaacttcaatagtagcacacaaaagataattgtgttatacttagatcagtttttaaaagcatgtttgatattgttttctgttttttgttttaaaaaattgtctttagaaatgagagaacaaaaaatagtttttaaagtt

SEQ ID NO: 317420 - DNA, 1655 bp, Cannabis indica
tgtaatctgtgtaacaagaaaaaatagagtcaataaagtgtttgatgttacccaaaataccattgtgaacattatcattccttgcacgccggatagtatccaccacaatagaggcatacagaaacacctcattaacatcaatgcccctatcattaaggctccaaatgaactttacctagtcccacatacgaatattagaatcaataataggaaagatgccccaagaccgccataagtgataagccaagttgcactggaggaataagtgctccatagtttcagtctcattttcacaaataaggcaaagtggagtttcgatacgacatctcttgttaagaattgacctgataggcagcgcgttagaaatgatacaaaatattcttcattaaaataaatatttcttaatctaaaaagattgtttcaagcaaaaaaagaaaaaaaagaaaatacaactcgcaaataaagaagaagtgcttaaacaatgcttatactcttacttttagtagtaatcccacattgtttagaaagtatagtgggacattacatatccactataaataaattaatttttaatataacttaatcactaaaaaaatacaaaaagtatggtcataatcactaagtcaaacgcataaaagaaatatcaaatatcaaacacataaaagtatctctataaatttcgatatacttcttcgttttctttttcttgattttgtttcaaaattggttttgaagtctttattgttctgtacttatcgattcttgtgctttgtagcttcattagagctatttatacttgatataaatctgctcttatcatgattatggtatctgtttttggcatttgataattgtataggtatacattattgtatgatagtataataaaatcttattgattgcttttaactgctaaacaatgtcaagaaaaatctgaggaataggcttgaggcagtcaagacttggatgggaaaggctgcaagaatttcaatgatcatgcaattggtgggcgtatctttgattcagagcattgttgacaacaccttgcagatttcgtggaaatttaggttgcttttagtagcctatcaagcagtactgaccataggctatcctctctggttcgcttacacaatttatcatgttgaggccgctcgaagagttttcgtggagtttgttgagcatccaagagtgagtccttacattatttttcatgatgttgatcaacgcgcacttgaaagtcacatcccgaagtacacgtgtattttcgtgtcttacttcttggtcaactttgtggggctcctgcggctgatttggtagtttttctccaacaatttaaatgaacactatttcatcaactcttttagtgttgggtatttgataagggaatttttgatatggaatagaaaatttagccagtgactttgaaaaatatttgcactatatattaacttttgttcaaagtttacatttatattttgggctaaaatgcaaaataaatttaaatttaaaaactaagttagtaaatgtctttttaaagaaaaaaaatagaaaagtgactaaatataataaattaagtaataaaaattataaaaatatatttactacacattatttttttaaaaaaaatatataataattaaattaagttacataat

SEQ ID NO: 317421 - DNA, 2428 bp, Cannabis indica
actttctcaaacataaatttaaattctaagaagaatttaaaatgaagacacaaaagcaaggattgtaagaacattttagtaaccgttctcatacaatactaaattcaataaatagaggcatatgaagaagaagagaaaaaccaagtaaaagttgtcaaataaatgcaaagagaaaggagcatattttttttcaccaacaagatctttgtatttaattttcttaattcaaaactgctatgttgttcaattccattctccaaaacaggctttttagacataataaactcaacaataagaagaaaaaactacaaaaaatgtgtctatcacaccttttcttactcttcattcctccacttggatacatcccttctcgctaacatagataccatcgagaaacttacgaatatctttgttcttgacatggcatttctgtacccaaaaagaaaaaagaaaaaccatcttgaaatcttagaaaatgactgctagcaatttaaggttagcaaaatttcacttcttcatttcatgtgtgtccaatacataggcaagccaattattaaaaggcataataaacataacaaaactgttgttaagacagttatcaatgaaaaaaagtataaacatatgtagaggaaaaagcatggacctggtttatgagggcagcagaccgagacacaagctcaatatcgttgccatccaaaacaagttcatctttaactttttcagaccttacaatagaaactccatcaagcatgtccacctttcttacctgattgcatccaaaacaaaaaagcacataataatcattatatacatatacatatatatagtccataaatttagataatctgtaatgtgcaatgttccaccatgtctaagttaaaacaatacaaaagcagagcatatcaaatcaacttctctatccattattattcaccaatggtagtagcattcaaattcaatacacagacaataaaatgagagtacctttaaacttgtactaataatagattattgtaatttgtagatgaaaatgaaatggagtaccttcttctcgcccaagaagtttcgaatctcaatagaggtgccggtattggagatagaggcattgatgggaaaatgggcgtagacgaatcgcatcttgtaacggtatcccttagtgacgccggtgatgaggttatcgacgtggctgagagccgtacggatagcggcactggtcttcctggtaccgaaccaagattcaatcttgagcttacgagttccggtggtgtgatcagtgatgagctcgaaatcgaggtttagatgcttgaaattgcggacaagctttccccgtgggccttcaacctcgatgaccttggcgtgaaccctgatctccactccctccgggatgtccatcgtctccgatgagagaatagtcttcattttagttttccgatgacagaatagagaaactgagaaagaaacagcggctactctgctctcctctcagtctcatcaaatgaaggaaaccctaataagtcatatcttattctttccattctcatcaaattatttaatttcacattcacccctattttatgtcaaaattactgtggaaccctttatacaaaataacatctatggttctttttataatttgtttgccatttataatctttattaaagtaaaatatgtgagatttaatattaaattacattattaatgatattatatgtactaagcacataagtattctttaacatttctcaaatagcatattattttctttcacacaagataagactagatcataccatcaatttagaaggtcaataacacaatcatttcataccatttcaatcaaatgtaggtgacaattaccaaactaaaataagttagtgtatcaatcaaaatggagttagagtaactattttctctacaaacaataatgtaatagcatttttatcaaaacctttaaaaggtttgaatcatctattaattaaaatagttttcctaattgacgtaaaagattaattaaaatagttttcttaattaacataaaagactaacgcaaacaataaaagaaacactcagttggataaaagcaaataattggcagaatgttcaagtcgaatcagattgtcttaatgtcgttcatgcaattaccagcaaagtccacatgttctctccatatggaagccttattaatgactccaaaaatctgctttcttttcttttaaatgtttctgtgacttttgtaaaacgatttgcgaataacgtggctcatttccttgcaaaggacacttattctaaagttgattgtactcttagcgtgtcttctattcctgctaacttatcatccttattgttgaaggaccttgattaataaagactttatttttcaaaaaaaaaaaggcttttcctttggttagattagtcttaggagtattt

SEQ ID NO: 317422 - DNA, 656 bp, Cannabis indica
ctagcgctgtatccactttaaaaactcaaacgtaaatttgaaaaaaaagttaaacaaataatatatggcgtaaatttgaatattaatttaatttatcctaacagtaaaactttattttcttaacattcgatttataatctaattacattgaaccgatctaattacaataaacacattaaatccaatccaattacaaaaaattagacatctaaatacagattggattggaagtgagtagttgtattttataaattgaataagatcggtctttgaaagaaactttcaaaatctataattaaaagccaatctaatctaattacatgcatgtaacacatatataaacatattatatttgttcatataaataaaaaaattatttaaatttctttttaatttatttattatttattaattttcgaaaaattctattatacaagaatttcttaaaacaaatcttaagaactcacatacttatacttttatttttatgtgtttttctagttaatattaaaaattaagtgttgaataaaaataatatttatgatacttactcttaatataaacatgtgagatttttttttttttatttaagtgtcaaataatcatgttgcgaatatagtagtttttttacagttattattttataatattttttt

SEQ ID NO: 317423 - DNA, 696 bp, Cannabis indica
cttgttcaagtcatggtgatccccactaatctacactcaagtttgtgagtgagtatatatatatatatattatattacatgtgttcttatcttcttctacatttcttatatataatatatatagtgtatatatattgtatattatgtattataacatttatttaatctctttgtttgtccttgtattatattgaaatagagttgtaatacatcttgattttattccattgtaataatatctctaacaaaaattgtaaaaatacgatgtggtacggtatggtttaagagatttatactatttttatatcgaatattataattaaaatttaaaaattaatgtataaagtcttaacaatgcaagaaaaaatatttattaaaattttaatgtcataacatttatactaatttatttatcattaacaaaatctgagctaacactttctattattatttatataaatagataaatacaatctattttattcaaataattagtgcaactaatcagaagttgataagaggtgaagtgtttttggaggcaaacttacatactcaagttttctcataggatatattctcgatcagaggctatgaatgtgccatcttttgagtttaaaaaatcttttggagatttgtttcagtattgaagttgatcctcaccagtccattaagaggattttaggtaattcacctttt

SEQ ID NO: 317424 - DNA, 563 bp, Cannabis indica
tttttaatatttttattatttaaataatttttatattgtgaaccaataaactttcgactcgtggaaattttaagaattacaaatagagctattaaattgggcacctacggactaacgagaatgtcgagcttaaggaatataactacaatttttcgagattagcacttatttgcatcaaagtaaattttttggggacttatttgcattaaaataaattttttggggacttaccgcactttaatatcaacacataatattttagagagaaattaacggatcagttaaaaagaggactaacagacttaccataatattgagcttgtgactattgcagctatttttcgaggttgaaacttatctgcatcaaaactaattttttgaagaactttaccgtaattttttttaaatattttatgtcttttaaggggattatatattatctcatgatttaagcatagacattcaaattttcttatatttactcattttttaagaagttttttcatttttacatttcaaaacaattttttttttttgcatttttacggaattatacataaaaa

SEQ ID NO: 317425 - DNA, 1528 bp, Cannabis indica
ctatttcttgtgtatggtggatcgatttgaaaagactaacggtgtgagtttccaatttaccttaaaaggattcaacttacgagaagttttgagaataccctgatagtcatcaagaggtatattcttttcatgtaatttatgttttgatttaatgtttatacatttggagatccattgagaatatggtacaatgataatttgacatacaatttttccttccgtacctgatttagtaccataaaaccaacagccccagccccatacaccgaacatcgaaaacggacccagaccaggctctcgaactctagactcgaaccctggacccaaaattgaacatggtctgggtctgggtccggcgtctgcatcggtgttgggtccgggttcggtgtttggggctggggtttaggtttgagtgcgggtctggggttcgggttcaagtctggggtctatgtcccagttcgagtttggggtctgggttcgggtccaagttcgagtccaggccgtagtcagggttgggccgtgtttactatatataatttaatttacacaatatattagtacaagtcaatatcaaacatagtattgtattaaataattataatataatataattcaatccaacacaatattatacaatacaatacaatacattatgatgtactaaacgaacccttatttatttttaataataataataaagtaggctgcaactataaatttacgggatgatgaatatggaaggaaataaaagtccacttggttttggaaaaatatttataattgttttaggaataaataaactctattagagttagtcccacattgctagtgtgtggaaataaattgtcatatataagatgaatgggctactcctcccttagccaattagttttgagatggaacctcattcatcttatcccatattctaacatggtatcagagccagttgtgatccgttgtgagcccaaagtgccaccggtctaaaaaagccgtttgtgatccgttgtgagccaaagtgctggcggtccagaatgatacttctgctgtctcccctttaacttccatttgggacctttcggccaatgtgtgcctagtacgtttccagtgttcgggtcttcgaccttgttcaaaatgcataaattcccgacgtgtacacccacaaatttctcgatatttagccttgtgggattctttcaaatgtcacgtttggccttgtggtctcttaaagttcgttcgttatacccacactttccacgcccaaacattaggagaatgcattagagttggtcacattgctaatatgtggaaataaattgcgatatataagatgaatggacaattcctcctattgccaattaatttgaagatggaatctcattcatcttatctcatattataacattgtaattataaaaaaaaatcatattttggttgaattaatataattttttcctacatatgttaaaactataagttcaagtttccactatttgttttgtaaattaatttcccttaattatatttcaaa

SEQ ID NO: 317426 - DNA, 1592 bp, Cannabis indica
ctctgactctgaatgtaatgtaaaaatacgacaggtcgtttcaaggattgacagtttgtcgttacttgacataaataaggtcattttttttaacaaaaaagtctaattgaaaaggtttggaaaagaaatatataatatctaaaggcaaaacaatatgatgtcgtttaaatataatatgtaaaggcaaaacaaaatgtaatattgtcgttttagggctcgtttggaatgccgtattaggtcgtattgtattgtattgtattatattgaattgtattttatacaatatttttatgtaaaactatacgtggtattaacttttatggacacctaaatatataatattttagtataaattaaagtttaatatagtattaaattgtatgttgatagtcatttcaagttagaggtacgtggttttaaaactttaaaacaagagtttcattcatataatgatttataataatgaaccaatttgatagccataacatttaattttctcttggtatcactatttgaattattctctataaatcaataaagattttctgtaaatttatatttatgtttttataataatatgtaatatgtttatttataaaattagatcttgttattctatattttatgagtgataaaaaattttaacactcctaactaaacaccaaccttaattttctttgtaaataatacaatatcatcccaaagaacaatattggaaatactccattgacaataattttaatcacactacgcactaaagggattggaaaccttagctagtttgccaccaaaagacaactattagtacttaataatgacaacaattttgtcataatgtataacactatttatatatatatatatgcattatttgtatgtatttacatgttaattgaaacaattcaatatatccgacaaagaaacttgcattattattatatatattgggtccataactatgtattgatgttattatagatgagataattatgaggagagccaaagaaaaagaagtgtactcaactctagtttgagagaaaaggatgtatgcatgtctcatgcctaagtgggatgaaacatgaccaatcaatatttatatataacaaatagactgatcgatatatatatatacgatcatgatacaagaaaataattatgaagaaaaaagtgtggagagatcactttgagtgatgaataagtagtaatagtttcattcaaacacactgatcattgccacacattacgcagacaagtgcgatcttcacagaagatatattggctccaactttttattaaaacccaacaaaattaaaaagctaactcaaatggataatataaagaaaaaaaattgggtaaaaacatctcattattcaaactagaacaatagagaataacataacaaacccgttcaaattaaaattcctgatattagacctgctcattttttattggaagatcttaactaataaatctagtattctcacattgttttgatgttttatatcgctggctggcggtttatggattatttagttgaagttgttgttagaatttttttgacgttgaggaatatctcactacaagaaatgtca

SEQ ID NO: 317427 - DNA, 1137 bp, Cannabis indica
attatctaatttgcactattacaaatttaattagattaaatgtgaattattgtttgaattataatagatacaaactataaattatacacttacatttagtacgaattgaattaaacgaacatgaacattccttcaattttaacacacaaaaattagagtatggaatctttatcacaaatttcactttttttttttttttgttttaatatctttattacctcaattccattatgtatgaataatagaaaaagcaaatccaatcttaataccgtttataaaataaaaaccaaaacaaaataaaatgtaaaaaaaaaacatatatttttattaatttgtaaattatctatataaataaagggtaaatattattttagaccctatgttttgtaaaagttaccaattgaacaatttgttttgttaaatgataaaacggaccctgtatttttcaaaattgtacaagtaggaccatgaactaattttttgtcaaaataaaatttaataataatctaatctaaagatgttataataaaattagttacattttctgtatctgttcatgttagaaattgtcttaaagttgattatattaaaaaataaaattgttgaaaattaagcccagagtcctatttttaccattttagaaaatataaggtctattttatcatttaacaaaatagaaaatccaattgataatttttgcaaaacacaaggtctaaaatgatatttacccataaataaataaggttttaaattattagttctttgccaaaatattttaaaaaaaaaagataattatataaaatatcactctttgcaatgtttaggttcattttctttacattgttacggtattctataaaaatacaagaacacacactataagaaatgtcacttttaccagcacagtttgctactgcgctggtaaaagtaacttttaccagcgcatttcgcaaactgcactggtaaagagatcaaaattttaccagcgtacatttacagtggctaaaatataacttttaccagcacatttacgcgctgggaaaagtcttttttgtcagcgctttttattttatgctggcaaaagttctaataccaacattgatttgccaacccacttttgccaacacatcataggta

SEQ ID NO: 317428 - DNA, 742 bp, Cannabis indica
atatagtaatgtatgtatgatatatgtggatactaattcaaatttatgataaataacttaaatttctttataataggtgtgtgaggccattttgaaggaaaatttccagatcgaggcaagcttcaattggaggacttgatcacaataaggtatattgtttgtttatttaaatgttttaataatggatactgttttttgttgttgagtattttagtcagttagtatattcataaataaatagatacaatgttttttttcgtccattcttctctgatttatataaatatatatatatatatatttatatatataatatttcaaaagatgtttagtaatacaatcctcttatattactcaaatccaaactttgataaaaaaattgatataataaattcatcttgaaaattattcaaaaattcttcaaaataaagtaccaacttcaatcaactaaaagttaaacctatacatcatttcagatttaataagcttcaaaatgatatatgtaatgactcatttacagagaaagcgagagaattacctgctgtgctcttgagataagagcgtgggaaagagactgtaatgccattgagagaggctttaactaattatataaagattaaaacacatataatttccaaaaaaaggaaattaaaaataatttggtaaaccaatgtatttagaatttttgacagctttatgtagttgtctagacttgtatactaataattgttgggttttatgc

SEQ ID NO: 317429 - DNA, 533 bp, Cannabis indica
atataaaagtttaattaaatcacaccaatgaaaaagtttcatggcagcaagtttgtactgctatactcagattaagtctagaaactgattacaagggtgtgaattctgaagcaaaagtgttgttcactatgtatgtaataataccaagttatacacatgtattttgaagggactatgctgtttttatttacctgaaaattgaaaccaccagttaccccatcaacatttagtacctgaaacatatttcactgtgtcaataaatggatacactatggtcatgggtttatgaacattgatattagtttgtaaatgttgatcaaattttctcatagaattagacccacaaagtcttgtatggatatttacctccccagccaagaataaatttgaatgaatcttgctttccattgtattcaacgaaatcttcagaggatgaacataaattcattaacatttgtacacagaaaattcaaatgtacttcagcaatagatacacgcccacacagatatatagtatacacatatatatatat

SEQ ID NO: 317430 - DNA, 1082 bp, Cannabis indica
attatttgtatgttattttttgttattttgatgttatttaaattttatttttatgtaatttttttgttatttttataaaaaattgtaaaaaaaaaaattctttaaagggtaattttttttaaataataataattatctaataaaaaacccaaaacattcattggtcactttccctcagcctccataactttgcacaatactctcctgagtgatgtaacaaagtgattggtaggattttaaatatattagaagccttctatgttaatttataatatatgataacaaaatatttcctcttgcaggaatttatttcatacacactcttggaatttggaatcattgtggatctgatccaacaatatttgttgcatttctcccactttagaatttaatatttctaatatcattaaatcttatgcccattaggttttgtaacaagaataatatatatggttttatatgttagttattatctacgcagttagaagagtaaaacatattgtagatacgtttgatattttggagagtgtcttcaatcagataattgttctgttctctatatcagctttaacttacccactgtataacaattttatcactttgattttctcttaacttttctctgttgcttagtgaaattaattattcttccaactaatatttaaactatcttttgatattaccctgctttcttaaagtcatgtggtacaaaaatttttagtcttttgaagaggagaagacatgaattggtttgtgtaaaaaatttaggggacttagaagaaattcggttattattttttactaggaagtgaggcttgatttgaaccttctttttgtagcttcagttcaatgcatatatttcatttgtgtatcatcttattcttatttggccctctcgagagctttttgttatgttaaaaaataaataagggaagcattgtaactaaaagagtttgtctgatcttgatctctcattggtaaggtttctttgtttataattttagaagcaagacttgttggtgcaattctcttgtctattctatataaagtgtgcctatataaccgaattataactgaatttt

SEQ ID NO: 317431 - DNA, 1838 bp, Cannabis indica
aatgtaatatgagctatatgtggaataaaaatattttcaggtttgatgaccttggagactcgatcgaggtcataacgggtttagttgatagaattgatgggaatattgtgataagttgataaggtaggtattagggtaattaggagtatgtgaaatttaacttagcgccttagaagtaaaaatttctcagtgactaaaaaataataagataactattcataataaattttttattaatattattattatattattaatataaaagttataattattattattataatattatttttttatatataaaaacttataagtatcgatagataagtataatatatattataagttttaattagtaaactaaatagacaaaattctcgttctcctcctttgacgaaactctctctccctatatccatttcatttaatttttaacccaaaatctaccgatgtatgctccggtagtagcgggatagcacattctcagagcaagaaagcttaagggaaggtttaattttattttaagttagaaaaaattggttttgtatagggtaactatgaattagaatagttatggaagttctgaccttataggattgttctcggggtagtcatgggactagctccgatgttttcttgctgaaattgaggtgattttgggttagaaattgagtttggaactttttatagcttaagtccgaacattagtcatgttttccaattaagggctcgattttagtttctattacataagtatggtagtatgtattgtaattatgtgccctatgaagtttgcagtgatttggacaaatttcggtcgcgtttcaatgagtgcgtaaaattgagaattgaagttttttccccctgcccaaaccggtcaactggttgtgaattggtcaaccgattcttgtgagagcgcttgatcggttctcaaccggtttaccattcatgggcacttgagaattcgggaatcgtatttttgccgtaacttttcactcgagtgtttgctttggacgttctatataccatttcgaagcttgcaacaagctctataatatgatgtatgttttagagccaaaatataagttttcttttagtttatttgtattacgagatttggtgggaaaccctaagttatcctttacaactattaagtagtattttgggataaatacttattagtttatcattattatgatatagggcccgggatcatcgatcattctccaagcaggtcagccaacatacttgaactgaaatttgaggtaagaaaaatataatgtaccacatggcatgacagattctgaaattattgattgtttgattagggaatgataatgtgatgatactgtggacctaatattagatcccacctataacgatctgaatagtattatctctaagtatcaatacaaccaaaaggggagtaggtcattacccgctatcacaatgggggcaaacccttatgacaaatatgtgtgttctatactttttcattcggtttgtgtaacaaatgacaatcattagatctatacgaccgcactgtcagttgatcactttttgaggtcaacactaaatatttgagaactaaagaaataataaaatgcagaaataaatgagatggagatttttacgtggttcaggtgttatttagtccacgatttgttctattagcctctaaaggcgtatttaatgtgtttataatattttgaagaaaactctaactctatattcgtagtttctcttaaggaagaggaaaggctagaataatattagcagagcttagactatttagtttctaatcccccctttgtatggaaatagaagggtattta

SEQ ID NO: 317432 - DNA, 602 bp, Cannabis indica
tagggtgttaatcaacatacttttgagtagatctaagatcctggtaaaataatttccaacattattagtcttctgtcatggagatttcatatctgttctgctgctactcaaagggctgaaattattttcagcttcatctggtttgcaaccaaatgagcagaatcagtaatatactgtgcaggaatgtaagaatcagaagtgaacagaatcatccaggcatctaaaattacaaggagtacacttccatttagataccttggtattcttatatgctcaaagaagatttctagagcagaatgtcaaagccttctggaaaaaatgacaagcagaataaggatgtggagcactaggaacttatcttatatggggagagtaactctgattaactcagttttacttgccatacatacttactgggctcaaatctttatattaccaaagaaactgttggaggacattgaagctatttgcagatattttctctggaaaggcatacaagaaggggctagtcctggattagtggcatgggattcagtttgcagacccaaggcagcaggggggttaggatttcgaaatgtgcatcattggaacattgcagcctt

SEQ ID NO: 317433 - DNA, 919 bp, Cannabis indica
catgctcaacccatgccgcggcacctggattgaaaacccagaaatcagcaagcatgaacacgaaaaattagcaacaaactcaaccatttcacttcaaattcacaaccaaacttccaaatcaataagtaagattgttagcaattaatagttggccaaataaacataattcatgcatcaattcctctaataaacttcaaaaatcagattactataacaactcaaaatcatacacaacacataacccttcaagctcaaaaaattgagctttaaatccattaatcccttaacatttttcagcagccacatatcaaaaataacatggattcaagctaggaaataccctatagtcttactccatgctcaacaacataactctcaacccaatcatgcattatcacactcaattcatcaagatcacaacaaaacccaataacatgcaacttcaagagaataacaactcaaaacatgctttatccccaacaaattcagcaagaattttagtactaaatttcaaataaactttgcaagaaattacctcaattccaaacttaaaattcttccaattcaaagctccaaaatcaagcaaactccaagcaattacacaaattaaacttgaaattgaaaagagggttaggaagagagagagagggtcagttagagagagggataaacaccagaaattgatctccttttttctcaaaaatcaattttatcaaacatagtaaataaaggtcaaaagaccaaaatgcccttagggcctcaatgcacactcatacacatacaagggtacaaatgtcatttcatgcatattgaataccaaataaaattcagattatcaaatatcaaataaaatgccaattaattcaatctaattggcccgaaatacccgattgtgactataccgcgctaacctgtcaga

SEQ ID NO: 317434 - DNA, 1009 bp, Cannabis indica
atgggctaccgaaaaacaagatgcttcttgttgatataggtaataccaatcaatccatttaagctctcttcaactgtgcagtcccatacctacacagtctcagattcatcctacttgaccttccccaggcgatgtgggattgcacaacttacccggtgtttcctcttatggatcacgggactactgactgtcacaacagtgtctcatgagtactgcaatgcataaatttgttcatcctgtagaatctaatagcctactctattcttgagtgttgagattggcttgaaagattacaatgtgaatttttttaacgaaattcttagattggatgatcgttattaacttaaaagatagcgaggatcccctgatagggtacaagaggtattgtctctctattcattagtctaaatttaatttatatatattatgttgagatccttggacttatgattcatattgaataaaattgtttttatcaaatccgcttttacttttctaactctgatatggaccataaaaactatcaaccttggctttaaaaatatggagcattggaatattatagcggtagggaacatgtttgggctctttctcaaaagaagaataatttgtgagttaaatgggttcatgctgtgtatttaaaagagagtgattggtgggcttatataaagccctgtaagattgtagttggtacgggcttaaagtgttaggatttatcaaaatacttaagaaatacaaataattacagatctaatcatatttcaaaagtgctttaatatagaaaaccctataagttatatttttatagaacctttgttaaattaaaaaggaaaaatatgaatacatatgagtagaaacactaatctgaagccattgttggagattgttcagaaagttattatgatcttctaagaatacactattccttaaggggccgtttggtacgcatgattggattggattagataaactaatttgtccaatccagtgtttgggcgatggcagaagt

SEQ ID NO: 317435 - DNA, 1422 bp, Cannabis indica
tcctccttctttatctgcagaaatcggtctcgtatgcaagcttcacaagtcaatttatggactcaagcaatcatctagacaatggtataaaaagttgaccgatgctctaatccttgaaggtttcactcagtctcaagcagactatactctcttcaccaaaggcagcaacgacacatacattgctctgcttgtttacgtcgacgacatcatcatcacagggcctaatctcatgctactgcaacaacttcaaaactccctacatgctcaattcaaactcaaggccttagggacactaaaatacttcctgggatttgaaatcgcccgtgctaaggaaggtctattcctctctcaacgtaaatatgctctacaactcctcgaggatactggatacacgggaagcaaaccttccaaaactcccatggatcccaaaataaaattagatgaccaacaaggcacccttctcgatgatccttcaccatatcgacaattaattggtcgcctcctatatctgactttatccaggccagacattacgtttgctgtacaccaactcagccaattcatgtcagcccctcgaacaccacacatgcaagccgttaatcatctccttcggtacatcaaaggacaaccaggacagggactgttatacaaccgcaattcatctcttcatctccgaggcttttcggactcagattgggcctcctgtccaactacaagacgctctactactggtttttacatatttttaggagattgcctcatttcctggcgcaccaaaaagcaacccacaatctctaaaagttctgcagaagccgaatacagggctctcgctgctacttgcagtgaaacaacatggttacagtaccttctcaaagacttccaaatcacacaaagcacaccagccttcatttactgtgataatcagtccgcaatacacatcgcaaacaacccgacatttcacgagcgcaccaagcacatagagcttgattgccacttcatccgcgagaaaatcaaacaatctgctgttcgcttaatcccagtcaacacgactcttcaacttgcagacatctttactaaaccattgacttccaccattctccattctcatattcacaagatggctgtttacgacatctaccatccatcttgaggggggggggggggggtaacaagattatatacttctcttattagtgtcctgtgatggtataaaccattttattagtttagtgttctgtttaggttggttaagtggttttcttgttgttatttctgttattttagtcccgtgttttctggttctcctcattcaaggagatctgtttacttctttatttgctgcctatatataggcctcatccttctgtaattggtcccaatttaatgcaaataaatctttttcttgtcttcccttttcttccg

SEQ ID NO: 317436 - DNA, 871 bp, Cannabis indica
aattgacccgtggattgtaaactaacagaactaaacagtaaattgcaccattttttgcattgacgctaactagctcaatgatgcagtgatcttctagccgagcaaaggtcaactagctcataaccctggaagtggcctttgtgcatggtttggaccccatgccaaatagggcgttgtactcccactccacccttacttccaaagggtggctaattagtacaagatctatctaacacagatcaactcaaaggggttaaaatatttatctacactgtacgtattatatgcacaacaagggtaggggagccatatctccacaacatcaactggtttttcaacctcaatcgaatcctcgccataatgggtctggctaatttcacatcttacttttgagttacccatggctgactaacactaaggccattacaaagattggagggtatgccgagatgattttattactctgggcgttgaggcgatctttctatttttctaggttgagagacgttttcaccatcctccctcaactctggctacaacgaagaattttgcgacgtacaactaggggcgggcagaaagtcatctaatctaatcacaactaacatatccaatcctaaccgatcctatggaatcggatatccaatcataattggatcagatcagatgtaaattttgaaaatccaatcagatcggatcatatcaaattgaatcggttattggatgagacatctggtccaatggataactgaacaaaactgatccaattatcatccaatggtcatcaaattatatatatatatttttaaaatacatttataatttaatatatttaatatattttatttaaaaaataaattaattgatttaatat

SEQ ID NO: 317437 - DNA, 1347 bp, Cannabis indica
gggacccgtcagtattaatagggattccgccagtattaataaaacggtcagaattatttgactaataccaacggaacctacctctactagtctaccggtattagtcattttaaattttgggcggtcaaaatcccgcccaaagtattagaggcggattttctgtcggtaatactataatttattaaatattttttttaattattaaaaagtaatactggcagaatacattttgcgccggtaataaccccattaataccgacggtttggctccgccggtaatactctcgcctgtattgaatcaaaatgttgtagtgtaatccaattacttatacttgtcactacaagaatgatgggcattaatgaggacaaattttgttggtgaaaatcctctttttcgtcagtattatctctatcaatgaggacatttcgttagtgaaaagtcgttaggaataattcgtcggcaaaaagcattatcaacaacaacatttaatgtcgttagcaaaatttaatatcaacgacgacaaagttgttgttaataataattttttttttattaatatggtaaatcaacgacgacaatatcatcattgattatataatcaatgacgacattgtcgtcattgataagtaccttaaaaaaattattttatttctacttttaaaattatattaaaatcatttaattaattaataagaaaactaaccgttaaaggagacgagagatgagggagggagcaagtttcgaaaggggtttcaagagagggaaaagagagatgagggttttcagaagttgtgaaagagggtatcggttaaagttggtgttaccgtatgtttaaagtagaagagagatgagggagggatcaatttttagaagttgtgaaacaagggaagttgagagtacttggaagttggaacagttttttagaagttgcgaaagaggagaagttgagagtacttggaagttggaacagtgaaaaaggtttcagttcaattaccgttgtgttagggtttttaccgtgtgctgtgaggttgggttgggttttcagttcagttcaagttggtgttaccgtgtctaaagcccaaaattaaatggctggccgggttcggttgatcagcccacaaattgtacaccccaatttatatacactttatattgtgggcaatttcattttgtaaaaattatttggaaagttataagagttaattttttatggcatagacaaataatgctaaaaaataaataaataaataatgctttgagttatgaattttttaatttcttttacattagtgtggacttttttagaaatctcatattttaagttttttttttgaaaaaattacatt

SEQ ID NO: 317438 - DNA, 1692 bp, Cannabis indica
tacttgggccaaattgggaaggaccatatgaagtcgaggatgagatcgctccgggacctacaagctaaagagaatggacagaaccatggtgcctaggcttggaatgccgatcacctccgaaaatattaccaatagttaaaaagcaaagtttatgttctgtaaaggaaatttgtaccggacaagtatatgcaacctctaatttaattttgtgagactaagtgacttataaattgattttcatgtcatttaggggggtactaaggcatattcacatggataaatataaaaaatcaagtttaaggaagttaaaaactatttatattcgagcatagtgtaaattgtttgaacaaagaaaaaaaacaaacccttagaaagaaaaaaggcttggggacgggccataaatgtctccccttaagaaaaaaaaagaaataaattgtcttaaaagtggggggaagaactgaatatgtaaataaaaaaaatgataatgatgataacaaaggagataaacaaatgattcaatcagcccgaggaggaagacgaggacccctgcgctcctccagcactgcatccagcctcttcttcttcttcttccagaagtgagcaagaccttcttcaggcttgggataaaaattgaggttaagattttgaccattggttttctaggccacgaagactccgtcatcaaagcgcttcttacagtgctggcaagtgactggagccaggagggcatctctcttcgccttagtcgcctccttctgagcctgctctttgaattcacgaagccccttcacttcaacagttaggttggctatcatttgcaaatccacttggtgcagctcttccgaagacctcagctcggcggtcaattcttactctgcctccttagaatcccgcagctcctgcctcgctgtggccatggctgcatcactggccttcaatgcctcgtccttagtcctcagcgcctcttggttgctccgctcagtaagagccactttttgctgggcttcctcccggatagctcttttatgtgccttcaagtcccgaagactcttcatggcctcctccatacccccaaattaggacatggtgtacccatgatcaataaaagtcttcgaaagacgactagtctccgcagcaatctgacaacaaaagaaaaatatatatgcataaggaatacatgatgttgggcaccaagaaaaaaagaagcctgaaggtacctctaaacagataggaacttactgttgtcatggcagcgctcacgtgctggatttggtaaatgagattagtagaagcagacaccgcgtatctcttcatggggagctgaaccaggccggcagaaaattggctcattgattccaaagcaaagggagccaggctgggtctgatgaagcggttgaaccagccagtcaagggatccaaattcaaatcccagacgttcccggcatactcactacaagtaaaactgtcatgggcctccctcaagatcttcttcaaggcttccacctcggcgttcccctttgtgtacttcgccgtggcataattgtgtttggcgattcggagttgggttctttcctcatcggtaggaatgggggttaggacgatacccggaggaacagtgtattcgtccacctcgggcgggatccttaaattagagctgggagccggagtatctgcttgttgggttttatgccc

SEQ ID NO: 317439 - DNA, 683 bp, Cannabis indica
ttttttattttgagggtttatttaaaaggatattacaaccattgaaatcacttgcaattgttataaatgtcgtctttagacaaaatttcattccgttaccattttactgccgtagtgtcctttcagttgctaattgccatatcagagaaatatgtgcatggacaaaagtaggtgtagattagttagggctattgttcatgttaaaattactaaagggtagcggtaaattttttttattatttttaatacctaaataaaaaaaaaaagaaaaatttacaaaactactaagttttgaacaaatatttacaattttattgtcacacggtaaaaattacatttatattgtcttgtctcttttttttttttttctttttatactgttaacacaaacgagacatctatcttccacaaccacgaatagaatcaccacaataacaccagaatagcccaattattaattctaacaaaatgaagaaatattaaaactattaatatttgggttgacatggtttttctaatgttatttttggattattctactgttatttttgttggttttgtgccctaaataaaaactcattttaatataatcagatttactaatgaataaaagatcacaaatcgcattttatattgcatggttcacatgatgtattttatgattatgtttaatgtataaattc

SEQ ID NO: 317440 - DNA, 1512 bp, Cannabis indica
tttttattttttttttctaacgattggaatattatatactacaaacaacttataagttacgatgactagcctaaaaaaatgactaacaaaacaataataacaataacaataataatatatgtagatattttgaaaactttatattttgaaataatttaaagtattttaaaatagtaattttagtttgaaataagttaatatctatagatatttatcagtttaatgtatttttatgagattaatatagttttagttccgtgagcatattattactatgtagacttatttttcatcaatctaaacacttttgtatgagatcaacaaattaagatttctttttttcttttttgtcaaattatggatgatttggaggtccatgatttatggaagaagctcattacaagactaaaagaatttgataattacaaacgcagcggttcagtgaaagaaggtgagattgagaaacttcaagagaagggtttacgtttacaaggcggattgtttgaaaatctttcgaaattgaatgaagaatgtctcaaacctcattctaagaagaaaataacaaatgtgaaacaactcaatcgtgttgtggctgatattgaatctttgaagattgatatgaagagacaaattgagtatttggataagtgtgaagagaggtttcaaaagtacaacataccaaaaaggtaccaaaacaagacaaaacaacctctaaacatctatgttcaaagattgaatgagtttatggaatcaacttggagaaaacaaaccaagatgaacagagcaaaagggtatttcaatttgattgaattgatgagaatgattgacttgaaaaatccaagtaataaagatggtctttttgctttcacttctttaaagaattctctttttaaacttggcactaaaatctctaccttcctcattgattatgtctttttactcgttgttgcttccaatgcaagtcacagaattgtttcccttagtctttcagagcttaaaactgtcatcgaatgcttatctttggaaggaaaaatttgtagctctcttgctatgagtcatgttgtattaatggtggaattttttatcaaggctttggaccttgaaggacccttgttgaatagcgaaaagagcgttgacaaaggcggtgatagagtgttttatcttagtgatgaaatagaagactatgtagttcatcatatcattattgaagttcttcgtttggaggtgagcttttgtagtcctgattttcctatgatgcttacaaatgatgtgttattctctatgtcaaggcatctagttgataatgtttttgaggagaaattgaagaaagttgaagatgtaattactgttgtgcgcaagtatgttattcaattcgagtatgatcatctttctaaggagttaagtgtttgagaaaaagtttttgggagatggggttcatgggttatggactcaacaagatcctatatgttaatgactttagattagtgttgattagcagagttattatgaaac

SEQ ID NO: 317441 - DNA, 1534 bp, Cannabis indica
caatggcaaagttgagtgaataacctgattatataattaagaagaagattgaaaagaagatgaaatataattgtatattatgtaagattcaccataaaatacttctttagaaaaacaaaaataaataaataaagaaaagagtagaatgataggtatatgattcgccacaagttactcttactaatatgtaaaagcataactttttaaaaaaaaaaaaaaaatacatattatttttaccaacattttaaacttttgtcattaaaattgtatcatttctacaaatggcatacatatattttagtgatatttttgaattcgatcaaaactaaatattttcaaacctactcgatcgctatagattaggtagcagaaattttctactcggtagatcgctcaaataaacctttggattgctatgacgctatgctttcaaacttactcgatcgttatagatcaggatctaccaatgcaatgtgcagtaaatcttggacgcataattaggaggtattttagaacgatcatacgatttgattaggtagcagaaacttgcaactcggtggatcactcaaataattttaatgacgttatgctttcaaacttactcgatcattatagatcaggacctactagcgcaatgtgtagagtaaatcttagatgtttctcctaattaggggtttcgaaacgatcctacagtccaattatgtagcagaaaattgctactcggtggatagctcaaataaaccttcggattgctatggcgctatgctttcaaacttgctcgattgttatagatcagggcctataccggtgtaatgtgcagtcgattttaggcgtctctcctaattagggggtatttcagaacaatcctacaatccaattaggtagcagaaactttctactcagtggatcgctcaaataaacctttggagtgctatgacgttatgctttcaaacttacttgatcgttatagatcaggacctaccagcacaatgtgcagtaaatattggacgcctctcctacttagcgggtatttcacaacgatcttacggtctgactatcatgtcaaaccctagaaaggacatgacacttatctaaggtgtaagtatattttatcactgattatcatgtcagtataaatctagtgtactgacaaatcatgggacataaacttttgaaatatataatcatgattatattctactgtgtcagcaatactataatcatgaataactatatgttctggatttaatagaatttatatattaaacatataatcataaaataaatcatgcgaaccatgcaacataaaataatttttgatcttttattaattagtaaatctaattatattgaaatgagttttatttagggcataaaatcccaacaatcgtgactttctatctaggaacattagtggtatttatctcatcggttgtgtcaatacaatagaggcaatgggaccatcttatataaaatactatgatagaacactttgaaattgaatcaaatagtatctcatctacttttctacttt

SEQ ID NO: 317442 - DNA, 1275 bp, Cannabis indica
ggtccccgtggctttgattatggcctgctccgccttctctaatagccaccggatgctctcgccgtctgactccagccctaattcttcggtcagctggaatattcgtgtggcacatgctggcggcattcgaatccttcaaccacggccctccaccttcgtatgtcggtcctttaatttcttctttgcaaccacagccacagacgatgtcgtcgagattggtacaacagagagagatttgtcatccaactctccttcggtttctgaaatctcttctttcattggaatcattgttggaaatgcttcaatagccatgtaatttgacaccgatgtcgccgcctgtggcagcagatgttctaccattgaggtttcagaggctgagatgtcattgctagtgttaatgttttgttcgtcgtcgtttgcgtcaattatttcatttgtttctcgattactgtccattatttttcgaacaagccaaaaatctgaacataccaccggattgggaatgactccgaagaattcaaacaaaacctagataaaattatacaaatattactaataaacatcaatcaattaaacaatggaaaaggttaagaagtatgaatattggtaataaacgtacttttcaagcagatgtgaaggaaaaaaaagtttatgcaacttggttttgaatctttctctgctacagtcaagaaaaaatttagaatgcgaaattatcttctcttgttttatcttcttttgttgatggtgataaaataaaaataaggagaaaatgatgagagtgtaccaaaaaaactaagctgaagacaagaagaagaagcagccccacttatccagtttgatagggacccccaaacccttttatatttacttggacgagatgggactttaatcgagggttgaacattgttgacgcaactaaggatgcattagattgtgcgacgtggtagatcagtaatcgtgtcttcaaatggtcaaagctatcgggtctacaattattagaaggtttgtaattttttttttttgttatttaattgccaaaaatacatattttaatggcattcgaagtttttgttatgtttatatcaaaaatgaaagaaaatgctacggtgcacttgttgggttttgtgccccccattacaatctgattagctatcaatttagaattttgaagtgatttatatttacatgtattttacatgtttatggtttaatatacatatttaatatatgcacaaaatcagttaagtccagaacatatatgttggaaattatttt

SEQ ID NO: 317443 - DNA, 1977 bp, Cannabis indica
tatatcatataattgtatcacataatcaggtgagcccgtgccacaacctaacaccaatatatcgcatcgcctaatcagacgagcccgtacctacgcccggtacataattgcatcacctaatcaggtgagcccgtgccacaacttgacaccaatatatcatattgcctaatcagacgagctcgtacctatgctcagtacttatcatatgtatctgacgcctgtacctacgtctgatacatcgtcaggacgaaaccctacaacgatttcattttatgccataacctggcaattttcatatcactaacgcccgtacctattcttgatacatcaccaagagtatcacttcacctaatcagatgagcctgtacctacgcttggtactcatattcatagaatcattatattgtcattgcttaatcaattaatcttttcattatataacaataataaccatatcttagtcttaatatcaaccaattctcaataatattaactgcattacaacataacatgctatgaagtaaaatatacttttcttacccttgatccagattcatgcatgtcagctaactcaatttaggagttactttcttctaagcctcactttcaatgttcaagttaaagaaacgaaagaaaatggcatattgaaagataatgcacggtggaggtgatgcgctaccacacaagaaatgtggcagtgcgtgacttaagtttcttctatttagtcgtctattattttttttaaatgatataagaaatatgataatgaagtataatattgaaaaatgagaagggtgactaggtttgttaggtgtcacgtatatagcttaggtttataattctcaattgacaatataatctaatctgtcgccatataaataagaagtttttgcaccagagaacctaattttgcacttatttacggatttggcctcgccttaattaatacgattttataccgtttattttaaaaattttcatgccatgcataccgttttctttgttttattatttcttcatatcttatacgtctattacacgtttataggctgtagctatatatccctttttcagttagtcccaatcagtcacgctcatttctttctttttctttacttttttatctctcattgtttagttttctcaaggttctctcccattgcttaaccactcacgatctcagacggtttattttcttctctgtctatatattttgagttgaatcagtaagatttctttcttttttacattttatttttattttatttttttctttgttgttcttctttgtgtttttcgaattagaactgatttttagggtttggttttttgttctgtaagagtttgaatgtgttgctacgacgattacgagaagctcgatttctccatcaccttctggttcaaaaagaaaagatgttggtgatgaaggaggcaatgtgaggaaaatatctttgggtgatgataagagtgatgataccgtgagcagggatgttgtgaatgagaggaggagtaggaagagtagcgattctatgtgtaaggatgttgtgaatgagaggagtaagaaaataaacgagaaagttgctgagaatgtgaaaaagagttcagtgagttctttggcgaagaaaaagagtcgtgtgcctgatgtttctcctgatgatcgtaaatcaaagaagctaaagttgaagagtgtggcagaggttgatgaaggagatctagaatctgaggatgaaagtagtattgcgattcctgcgaaagccaaggtaattttggtgttttttttttttttgaagatgtgttgttttttttatttttacttgattagtgtctgttttgtttatattttttatttattataattttttttgttgtttcagatttttataggttctgttttgatgttatgagttttggtagttttggtttgtatgaattatgagaggtttgtttttgtttttttaaaggtattttgtttagaat

SEQ ID NO: 317444 - DNA, 1537 bp, Cannabis indica
aatattgtgattaattgtaataatacatagaaactaccgaaataactaccaataaacccaattcgttgatttaaagaaaaaaaattaaacaatagatggaataattctcttttttttttctcaagaaaacatatcctatttagagaatgagtttatgtataaattatgggtattgctattatacatatacccaatataatatcaatataatatcaatacaatataatatcaatataatatcgaggtgtgaatttaattttttgaaaagaaaataataaaaaataataatatcgagttgtgagtgattaacgaattcttatattacttattaaaaattaagatatataaaatttaatatactttaaaatgtgatttaattagcagttaactctcaacaattatatattgagcattgctattaggcaacagtagtgcctagcaccttctcgacatgtcgtgtttcaattggctagcgatactccctaaaagctattatattaaattatatgagatccgatacttagttggatcaatagcgatattgacacataggaaggtgctaggcaccactagtgccctttaacatttctcttatatattgttatgaccaaaaaaacaaaaggtaaagcatatgagaccaatagttggaccaacagcgatattgacacataggagggtgctagacaccactaataccctttagcatttctctttagtattgttatgaccaaaaaaaacaaaaggtaaagcatatgagacctagtcaatattcacatatcaactttaattagtgtcaacctaccaaacattttcatgcctcacctagaaaatggttgcaaatgcaattattatatttacaattaaatatttgttttgtttgttttcctttgatataatcggtttatttttcatttggttcatgtatatgaaagactcttaatttatgatattattaaactgtttctaatgtggataaagataagagaagaataatgattagcaattaacattaaataatagaagtaatagttacaagtcatgagaagtatactaatcctataccctttttttttttctcattcaaaaacataataatttctactaattcctatgtcctcacccatcgatgatgacacatatataaattgatacatataataatatgattcctttttcattagagaaagaaaagatcattgactttttttctctagagaacacttggcaatattcttcttttataaatgaattgagaattgtaagagcaatatatgaactcaaacctactccttagtccttaggatattcaatggtgaaaataataagacaagtacattattaaattctatctgatcatattttaggatttggtgccaaaaacttgagaaatactacataatacttaaaataatttagaagtcccaattaaaaagaacctttttctctagaggaaattaaaaagtactttagaatttttaaaatataatgttatttttgaaaaatattatatattattgtccttttttttttttttttt

SEQ ID NO: 317445 - DNA, 650 bp, Cannabis indica
aatgtagattccgaagcaacagttctaacaggcacaacatatacatccttagcaatcatactcaacaataagtatttgaggcccttcaccttccaatagttgcatatatcaaataactcttcagtcctagttacccagttctcctctaaatataaatctagttcggacttcatattctctactcgattggaagctttaacaaatctctcaaagttagaaagggcatccaatcaccgtattgaagacaatgttgatacattttcttcgtgaacccttctttctctcaaatgaggaaacttagacccgtactcctccagtagctcacaacaaagctcacaaacctttgcaatttcagttacatattactcatcttcttagattacaagaaaataatattcgagaaatatgaacttgtacctcagatctaaaacaaccgccacacatataagcccgtgaatctttccgcaatatttctggaacttggacatcatttgagttgccatgtccttaataaaaggcacatctgatgacatccattattcaatgtttgtcttaatttcacatatttttgggaaaaaaatattggcggtagggtactttgctccaaaaataattctgttacttcaagaaacaactctaacttatcacac

SEQ ID NO: 317446 - DNA, 815 bp, Cannabis indica
tagggcataaacccaacagatttatggtggggattaggccagatggtgagtactcaactggtagtttagatgagttgagttgagaattggcataaggaaaaacaaaatcatcaaatattacatctctagagatgtaaattctgccagttgggtcagacacttaaaacctttgtgattaatgctatatccaatgaaagtgtaaggtgaagacctaaattggagcctgtgtttgttgtatggccttatgttagggaatcattgacattcaaaggttttaaaagtgttgcaatcaggtttaatattgaataaaacttcaattggtgactggttatttaggacagatgttggtagcctattgtgaatatacacagctattctaaagccttcatcccaaaattttaagggcatagaagcatgtgctaagagagtgaggccattttttactatgtgcctttgtttcctttcagccaatccatttcgttcatgggttgtggaacaagggtgcctgtgaacaatgccagattgagtgaggtagggtgtgaatgatctgtattcaccaccccagtcactttgtaaaaccttaacgtttttgcctagttgaagctcagcttcagctttgaaaaattggaaggtttttagggcatcttacttgtttttaaggagatagatccaagtgaatctagtgtaggcatctagaaaatgaatgtagtaaccattggtggaggttatgtgagatggtccccataaatcagtaacaacaagttgtaggggttcattatacactgtttctgtaatgaccgctctagtaatgtgga

SEQ ID NO: 317447 - DNA, 1032 bp, Cannabis indica
gaacagtcgcatacaacacgatcgatctcagccacacagtcgatctcctctctctctctctctctctctctcttccaatatcgatcacatttctctctttcctgatctcgtctttttctctctatatttagggtttttaaataattgtgggaaaataaatttagagttttcaaatattagttttgcggctgattttgtatatacatatgtgtgttcttgcttatttgttagatttggatttgtttgaattggtttgttaattttggggctgacattctcaattcatcaaatttagtttgcaacatggtaaaacgtaatctttttgcatcaatgatacctttaaaccgagtttgaaggatttttcacattttgtagattcacaagatgatatcaatttaataaagccttcaccaataccattaaaaatagcatgcaagactttattattataaccaacaaatttttcattttcagtagtctaattaagttcaagttttatcttagaattaccttcatcatcatttttagtaggtcgagaccagcctacaagtatagctctccatgtttttttcatcttgtgacttaatgaatgctttcattctgaccttctaatatggataattcgagtcattcaacaagggtagttgattaatggagcttcctaaacaacgacatctcacacaaaaacaaactatacagaataaaataatctcaatatctcacactaagagtttagtgacaaactttgataccaattaatcaattaatcaactaattaaaaatgaaataataaatattgtattgaaacagttattttataactatagaacacaactctgtaactactagggttgtacatcggtcgatttagtcggtttatactacatattttctaacccaacgtaaagatcggtttgtaaaattctgcatacaacctacccaattaaaaaaaaaaatcttaacccgaccgacggtttgggcggtttggtcgggttaacccgcccaaactgaaataagagggttttttttttt

SEQ ID NO: 317448 - DNA, 1139 bp, Cannabis indica
tttttttttttgaaaaaataacattttttcttttctctactagcaaaaattggccaattgtttttcaaatatgagtagtggtgatggtacaattttattgggaaatttactcaaagtattatttttggtaaaattgtcacatgtttacgttttatataacatgaaaataacaaaaaaactacataaaaataatagaaaaataatattaaaacaatgtataaatgatatattttgtaaataaaatcttaaaagctgtaaaaatatttaaaattctgataatttttataaattttctattttacgtatttataacattatcccatttttattgcactatgtaaaaagaaagaaaaaatgacaagcgattagttttaatttagttcagcttattttgtgctcactcaaacgaaatcatttttgttacaactaaactaataacagtgctttatgcgtttcatttttgttgtccgtatttttgtccaacaaaattatttgacgaaaagccactattactggtattattgcatgacactgtatttgatttgaagcactttttcattatattatatgtaactcaaacaagttctggtcctgctcaagcaaaagagccttggaaccatgtcaaaaaaaattaactaaagtgatttgcaaatattttaagtacaattatgttactaaaatttcttttgcaagagaaaaaaaatactaaaattcatttcttttctaaataaatatcaacaagtctatttataatatttatatatatttatattacctttataataatagcgaccaactgacaaaatctagtcactaatcaccaataatttaattagtatgaatcatctattcctactttttttttttttttgaaagtcaattccacctttttcacaataccaaaattttatgtttcaacaacaattttaccattatgtttacccagaataaacgttcaaaatatgtttatatttgtgtttcaattattttatttgagtaaatacttctttagactcggtattttgtaaaaattattaattgaattttctattttgttaaatgataaaataaacaaggtatttttttaaaattatacaaataagattctgaactaatttttgttcaaaataaaatttaat

SEQ ID NO: 317449 - DNA, 727 bp, Cannabis indica
tataatttaatttaataaaataaatttcaaaaaataataaattttgaaaatctgatatgattagccaatttgaaactttaactagattatttataaaatttattaatattttaatatcaaaataagatcatttcaaattttaataattaaataaataatattttatcttataattgaaataaataaaataaacaaaaataatcaaaattttcaaaattagccataagtatagtttgtggaaaaattaaattttcaaattcaaatgctactaatatctaaaactaattataattaattttattctgataattaaatttttatttgaaaatttggattctacacaaaattctacaaaaatatgaattttgtttcaatggaaaatgatttttgaatcaaaagatatcacaaaaataatttttgacatagggagtatgcaagcgcgcgtttgtggacggataggcgtggaatgggctgtagtgcagccatcttggccgaaggagcttggtgtgataggagcttcagacagcccgtgtccgagaaacctcgaacatggcttgtctgaatgctcggtcatgaccgagtgacaccctttgttcgcgtgcgcacgtgttgctcagtttcatatattttcattcaaattgaaaaaatcgtaactagttcattaaaaatccaaattgagttctgtaaaagccgaaatttattaatttttcatctactttccagtaaa

SEQ ID NO: 317450 - DNA, 1353 bp, Cannabis indica
atgaaaatactctgtctctttattgataattaaaagataaatattacattaaaatagagttttatttaggacataaagcccaacagttagatatttacaaaagaccaaaattcccttaattctagatattattcagctattctgttgggcttggggcccaatttttaacccatctttgttgtccatgtgcaggagtgtccagtgaggcctatagagcatcccttggctggccagacccctgtggtggccaggctagctggccatggtaatgtcttagggttgtttggcctcttgagagagagctcgtttgtcacttgatccctatttgagtgacggggtcttcgtttgctcgagtcctgactttgccttccttttagtgagttgtactgccacgtggcacagggtctatccacgtaagcatgccacgtcatgaggataaaaattaggataacatatagttaggtttttaaaagaattttaattaactaactatcagacaagataaatgtgcatttaggttagtttaaaataatattataaaatacttttaaaaataagtcataaccactcataattagtttttaggaaaaatagttaatttattatataattatatatatataaataaccaccctatttattcaaaataaataattattcataaaatattataggtttataataaattttaaaaaatattattttaatatatttaaaaatttattttaatatatttttaaaaatattatttttatatggtatatatattatttttatataatatagtttgaaaaataaaataaaataaaatatctagatatttgtttatttgaaaaaaataataaatatataccaaaaataataaatgctactgatctgcctcaaattcttaggtggataagtagagccaaggtgagcagctttcagaaaaatgttcttgctacagtagttgctggtttagtgtactgcatttgggagactcggaatagaattacttagcaaggggaacaagcaagttgcagccaactggtagaggacttgacgtggagaattaactcgaattgatatgtttttgtccaagaaaattagttgtaaagatagagattaattttatggattgtaaggatgtaatacaaagtatgtatagatttaaattgaggagtgctcttaggttgtaaattggttttgggcaatataattctctgattcatcaaaataataataataacaacaacaacaacaacaataataataataataataataataataaaactacctttttgaaaaaaataataattttaacatgttaaaataaaaggataatgcacatatcaaaatatcccatatttt

SEQ ID NO: 317451 - DNA, 1513 bp, Cannabis indica
atatgtttattgaactttgtcaaaggaactcaaaaaaaaatttgcataactttaagtgaaattgcatatccttttaactaaaaaattacattaccatttttaggcattttatataaatccttttaccgacaagtggtcgacaaaatcaaatcatgtgcttcatgtgttctagaatgtcaatggtagtatttttccttacatcgaaacctctagatatgtctttttgcttcattttcgttttattatatatatattaatcacttttttagttcatttctcaattatttatatattttcttcttgcaaaacaaaatgttcacaatgcggaaaaaaatgttcacaatgcggaaaaactttcaaacctttggaggatatgttgtagtgtacacctaaaaatatatgagaggtaataatagtcctagtagaagatgaatgatgttatataggttgtagtagtagtagtagtttatgatgttgttgatgtgggagaataattgatagtttattataattctaagtaatattttacaaactatagttccatcttttgattcccctttatttaatcgtaaatcaaacaatttatgataagttagtacattgttactttgttaatatatttaattttttggtcataagtcagtatttttggttaatatatctatatatggaacatttcttgggtattaccattttgatccaatgacaaatagtagaagaaaaatttaaatttttatatttaatttagctacttaataaaaaaaaatatcaaaaagtatctctttttatattatataaaaaatatttaagtcaaactcaacttatttattttttttagtaaagaatttattttattatttttttttcaattgaaggagcaatctcagtccatataaaatatctcttactagttaaatgttggatatttgaaatcctatgaccaagttcttttatggttgagttgacacaagagtctctaaggttaaaagatcatatcaatgtgccatggactgtgacagcataaaataactcattataaaacagactatcatttaaattaaaatagtttgtaggctgtattttagtccaagttaggtcacggttatttatattttcaagtctaataaggtatgatattgaataatgaaggtatgatctccagtattattattattcccttgaagcatagagttaataaggtttatatagtgttactgtccaatctttatttacagtaatcacccaaccttttgaagagctacaaaatcgtttatcataaggcataacaacttttgacttagcagtagaatcgctttgagaaggtattagaagcattggaacttgatgatatcgatatcggttatgtaatgtttaagttcgttgaacttgattatcttttattacacagcgccattctgaacaaacagttccaaatcgcaatgagtttggttaattgattgagggagggttctcggcaatgaattggtctccgagacattctcaatgagtttgg

SEQ ID NO: 317452 - DNA, 3461 bp, Cannabis indica
ataaattatattttaccagcgcaataccaacttttgcacaaaaatgtgctggtaaaagtgacatttcttgtagtgttttagtataaaacctcgacatccaatccaaacgcaatatgaactcggtgaagacttcataccacggtcttccagattagcctcaacactcaggaacagagtttactgtacactacaaaaaattttatttttagtcacaacaaaatttgtgactaaaagtaaaaaagttgtgactaattataaattatcatttctatgttgtgattaaaaggtccgtggctaaaagtattagtcacaaaaattacaatttgttgggactaaatgtgtttttagtcacaatacttattgtgattaaaactaattaattggtgacaacttgtactatattttagtcacaagtaagtttttgttgtgactaaaagtcacatttagtcacaaaaaattatattatgactaagaaattgtcactaaaagtaacagtttttgtgtgtcaactcatgagacactgtaacctgaggtgagggaaaacaccaaacctctagagagagagaatggcgtgagagagagagagagatttcgtctaaggcttctagggttgaaaactagtttttcaattctctgttattccaccaccactgcacctattagatgtgagcccttagtagctaaaatctttagtttatgcaaaattagtgtggttttgttagggagaaagaaagagaatgaggtttgtgagtttgtgtgaatgagttaagagagaaagagaaataaaagagtagtgtatggaggggtattataggaatacaattaacctattctctactttagtttaagtttttattttcacctaatgtatgcatataaagtcaaattgcccatagaaaattaatattttaacatgaatatccttagaaagctacacacaaaatttatatacacataaatgacactaacgaccgttcgtaattgtaataatatatattctattattttaaacaaaaaatacatataatttataatagttcactttctatgtcgtacgtgattctaatggaggtacatttaatttgaattttatttttcacgagaattacaagaaaataaactaattaagaaaaagaacttagatttctagagagagattctctcaccgaaagtttcctaaattaaatatacctactacaaattataaacatagattacaatataaaaagaataagtaggagtcacagaagaaaattgagaatagaattcttttgatcaaatgcttaagttgaattgaattttggagatgaaaatgaaaattaagattaatagaacaattatcaatcaaagtgaattgtgaaatgaaaatgctttaatattagtgaagaagaagaaaaagaagaagaattaatggaagtgcttgaagttaaggttgatgaggttggttttgacagagattcaaaaaacaacctcagattcagattcgcctttttgtttagaccagaatattcttctttcacccatacaaaaattatacacgaattaacaatattactttaaagttaaaatcattattaacaagttgtaattataagcaatatggttaagaagaatgttgtgcaacttttcctagtagcatcacttttgttaatacttaaacagtctcgtacactattttactaaattggtgtggagtcttcacaccatttcactccaatagtacgtacatttagttatgcaccaaatttgcgtggaatcgtgagactctggagtggttctatgaggctaaggctactattggaatggatgaggtggctgctgaagtctatgcttggcttatctcatttcaatgggccaaacgtaacaattgggatgattttgccctggtaaccgactcttttttcgttctcaaggccttctctagtgagagtttctctacttggaaatgtatcccttggttctctactgccatcaagcttaaacacagtttttctaatgtttctatgtattctgttaaccgcactcatttagcttttgtggactttggctaaaagtgcttgttgttctgagagcgacactccttattgtaaaggggagggatttacccctgtggatcccattttctcagttgctaatttaagatgaacactttgtcttttcaaaaaaaaaaaagaaaaattggcatgtaccaaatccaacaccattaatgatgttagattttgaatttacactattttagtgtacaatttttttacattctaacccttattttattttattttaatcctcatatttaaatttatcacaaaattaataatttatttaaaacactaacatatttaaaaatacaaaataacaataaaaaaatactaacactaataaaataaaaataacatagcattaagttataaaactaaaaagaacaacattaagtataatgataacactactacaaaagtcataatttgcgatggtcttaaaaacacttttttagggaccgtcgctaaaaaaattaagtaactgtttaaaattgtcgggaaaaatcagtattctcgacggtttatacaggaataggcgatgattttaattggaatttgttaattttttgggcccttatacacgacggtttaaaaccgtcgcctataccgtcgggtataagggcccaataataaatcgttacctacttctcgccacattttccacgttcccacctacttcttttctattttccacatgcctacctattttttttttctcatcacctatttcttgtccatttcctacaccctaaaacaaaaaatcttaactcttcaaaagtccacccatgcctccgcaccatcgccctcctctctcgttgtcttcctccctctctcgatctccctttcttctcgtctctctcgtccatcgatctccacccaccctcctcccgtcggtctccctctcctctccgtcgcatacgtcggaccaccaccacctcccgttggtgtgcctctcatttgcgtctcatacgttggaccactaccacctcccgtccttctccctctacctctttctctctctctctgagctcggtataaatacatttatttatttatatatttttttatttattacatatatttattttgttattgtataaacttaatgtgttttaaaattagttgttattgtaataaaattaattaattattttattttaatttaggtaaaattataaaactaatgcaaaaaaaaaaaaaaataggaaaaatacagatttttctgccattaaatctgtattttttttttacatttccgacgaaccgttggctataacagggtattttgcagttttacatctaaggataacacgataacattagtccacactcattgtaaactttcaaattttatttttttttgcatggaggacgagaatgttgatagatgtgctacaaagaaccgaaagagagagagagaga

SEQ ID NO: 317453 - DNA, 1197 bp, Cannabis indica
agtgtatactttattttttttttttttttttagatttttgacttttttaccgtatttcattataagtttcatattgatactgtagtatattgtgttaagtgttttactggtgtttttttagttattctactagtgtttgttatattttgtgttctactaatattttatacagtatttttataaacttgttcgtgtgacaatatttttataagagttactcaaaattacagtattttttaagtttccctccctgtatttacatttttttttttttgaatgaaaagcttcttcttcaattgaattttgtaccgctcagttctcacgtcacacttttccaatagcaaagcatgaacacctagtgaagcagtgaagctgaagcatttgctcactattttcagttctcacatctgcctttcagtcatgagtcgaggcagcggaggtggctacgatcgtcatattacgattttctcacctgagggtcgtctctttcaagtcggtacgtgattacttcatttatatatactaccatatattttgttctttgaatcgccactctatctcagatgtaggagttttcaatactttttctttggggattttcggagaaactgattctgaaacccctagctgtatgtccttgctgctctttttgttttaccaaagaactcttagattgagagaagaaatgaggagtttgatttatttctgccttgttaaagagaaggaaatgtctcaattcggtgtctaggggttacgttcttccgtcgatgctaccctcaaagtcattaggtcagtgtaaagttttgttgttgggttctccgagtattagtgttattttttttttttttgaaggattccgagtattagtgttatttcagcgatagagagaagatcaccagattgaatgttctagttattttggttaacaacggttgaggaatcagtcgtatcttttacctaagtagagattataagtttgaaacaagtcagctttttactaaatttcttgtcattgtttttgcaaaaagaatgatcaaattagaaacatctacattgtatttgctgaatttcgatgattttaataatgtaaaatgaattatttgttagtaattacgctagcttatttatggtagcctttacagacgtttaggctgtgtagaatatgttaaataaattaacaattaacccaagatctat

SEQ ID NO: 317454 - DNA, 957 bp, Cannabis indica
cattggatttttgtttttttttttttactatttttatggacttttttataccttattcttgtagaactttttttaaataccacattttaacttttttcttaaatttattattagaatttttgaaaaaaaaaaaccaacgagacccatgtttttcttgtctccccctatcttcttccccaagtcatcacctccatagccacccggaccaaaacacgttgtcccttcttcggtctccagcacctcgcacacattccaaagatgaaagcagaaagtttatggtgactcaacctagatcacatctgaggcatctctgtcagttatggagagaatcccgaaccaagatttcttggtactgattgtttgattgtttaggtctcgctattctttcaatttccttgttcttgtcgtgccttattcttctttgactttttatacttctgttggttccagacaatgttcgtcattgatgatttcgaggatgttgaattcgactggctagataactctgatgttggcttcgctgctaactacgaagtgagctcaatctgtggagagaaggcagacattaactcctcaacctaattctttagatttgagacattttatggtctttggtctgacttcggtgttttataactttttattttttggtctttttgtagaataacacaacctttgtctttttagaagctattaagtacatcagattcattcatagtcaaattgaggtgatgtttgtttattccctttctccttttttatttttctcactaacaactatgcttacattaaactagtttacagttataatcctcagacttcattcccagcaaatcaattgatttggtcgataaatgcattatcgacattcgatataggctgcttgttgcaccaccagatcaagattgttaacaaagatggttttaggaagaagaagaaagacagagagagagagag

SEQ ID NO: 317455 - DNA, 634 bp, Cannabis indica
gtaaaaaagaaaaaaaaaaaaaaataaaaaagtgatcttctaaaataaaaacattaaacaaaattcaaaagtccacatcaataaaaaaaaacagtgatcttgttcactaagttttgccaaataataaactactttatttctatcacagaaaacaaaatgacatgaaccaatatgataaatattcataaaatattgactgtctcgagtaatgatgtcgtccacagaataattgcaccgaggttgtatggccaaaataacgttcaagcaatcactgtcaaaggtgaaaataagaaggttctcccgatagcacgaataagagtctccaatatagccacaagttcagtagtaagtgacaacatttctgctgtgccgtaaaaacacctaatccaccgtcccttttcctatcaaaccacctagggtataattcttttctccgtcccttgctttattttccccaaagtagagacaactgttgggatttattttaccaggatctagattactaacaaatatatttcattaacatcctaaatatgaatattataatacgataaaattaaacatataagagtttagaaaatcttacattgaatgctgtggaataatatgactaatttccctcacatctctaacc

SEQ ID NO: 317456 - DNA, 1435 bp, Cannabis indica
ggtgaatcttagaactggctctacatactggattcttcaccttcagattctagaatttttttcattattgctgatgtttggcactctagacttggtcacctttctaataaatacttaaatttacttagcaaaaaattgaattgtaatgctacttctttacataaagatactccttgctatatctgtccaatggctaaacaaaaaaaaattaccattttctagcaataataactttgcttgtaatgcttttaatttaataattgtgacatttggggatcctatcatattacttttcattttgggcatagattttttctcattttagctgatgatcattcaagattaacttgaatttatttactaaaacaaaaatctgatgtttttaatattatcccacaatttctttcttatgttcaaaataaatctaactgcatattcaaaaggtttagatcagataatgcccctgaacttgtcttcaaagaattgtttttacaatatggagttctacattattttacttgtgtggaaatcccaaaacaaaatgtagttgctgaaagagagcatcaatatttgctcaatgttgtcagtgcattttattttcaagctaatcttcctatttgtttttagatagaatgtgtgatgatagttgcttttttaatcaatcggactcctactccaaatttaaacaacaaatctccctatgaactattgttcaagaaacaacttggctataacaatttgagaatttttggttttttagtttttgcatctactctcacagctcatacaacaaagtttcctccaagagctagaacttgcattttcatgagatacccacagggtgttaaaggatatagactttatgacattaactcaaaataattttttatattacgaaatattatttttcatgaaaacatatacccttttcataaactaaatgaagatatcacaaatattgattcttttacagaacttgtgtttccatcctctgaggtaactaacacacctattaatgattatcctacaaatctaaccctccaggatctagttcaccaactcaagatgataatgctataacatcacctgcaataccaccatcaccaacgatgcacctcttgtttcacctgaagcaccaccaattgtacccataagaacaagcagaatcactaaacatccaagctaccttagagatttcaaatgttattctactattcaagatcaatcttctaatcctcatccgcttaacaagtttctttcttacactagacttgctaattcttacaaaacttttattcttgcagtaatttctcaaaaggaatctcaaacatacaaacagaccatccaatttaaacaatggctcgatgccatgaacactgaactcacagcccctagaatcaacaaaacatggtctattgtgttgggttttatgccc

SEQ ID NO: 317457 - DNA, 1715 bp, Cannabis indica
attaacataaataactgctaatttccaaattaactaagcgggctttacaatttttgtagtagtgtcaacttgctttggatggccatctagagaacaaagctatgttttggagcgtttagcctacatctgtaatgaccgcataatttatatatggattagtgagattataatactaattttattattatttatacttttattgagggatatatgtgaacatttataatttttgcaaaaatatcttgttcttgtaattttaggtcggtggcgatggaaaatgcgacgaaggatattttagttacatgggtaaacatagagcctttttagtgatagaaaatatgttatgtgagctcaatggttggtgttggcagggttgtggtattggactatttttttcctaagttgttccttgtgtttggtataaatgtaagggtagattagtaaatcagttttttttattaggtgtcccccctttagttgacagctgcatttaattaaagtaaggttatttagttaaccctttttatccaataattcaagaagaaaagaaagaaaataagagattagagaaatggagaaaaaaaaacctagattgcctactcttcttcttcttttttcgaaccagagatggagatttgaatattgtggtttattttgaagattcaatttaggtttgaagcctcggattgaaggtatgacccttgaaaccctactctagatgttcttaaggttttggttaattaagagttgaattttgggagttttggttctgtttgtatgagttttgattaagagtagttttaataagttttacttgttgaattagggttgtttgtgctactgtaattagctagtttgaggttgagcaagtttgagttcacggaactcaaacttgactcaacaatggaatgttgaattttattgtgtttttcttgctagtgttgtgtgggaattgttctagattatatgtacagatgttctggagagtttggttgcatttgagaaagatttggttgagttatgctatttttgtggtttgctggtgcaaattggtcgaccgattttacagggtctgtaaaaccggttaactggttgacatgccaggaccccccgaacttgtaactttttagaatatgtgttatttttcgagcgtagtttggtttcccttagtatttagggtagtagtatattgtatgtgtcattaagattacccttagttataagctggggtttcagaatggtttattcgagttatttacccaattgtgtaatgtgacttaggacctccttcagctaaaagatttttcattcaagtcgaccagcacgcttgaatctagaatgaggtaagatagcataaagtgtatacatgtgattgaatgcttgttattatttgtatacactactaacaccgagatgtgatagttaaaagaagtgttagtacagtgtaggattttagggtagttacagtgttaccaacacgagtaccagagggtatgtcgtgcatgtggtacaacacttagtaattctcgaaagtacaataatggccctaccatcatgagtacggagtcagtactctagtgtatatggtacagaggtcgtacttccgttgagaaccgttctgaaccatttggtgagtttggtaattgggctcatgacggcttaggcattaagctggtatcacattgcttatacaaatgttatgcatatcttactga

SEQ ID NO: 317458 - DNA, 966 bp, Cannabis indica
tcaaacatcaatacccaatttttacctattacatagatcaccttcccctatttatagatcaccattgctgcaattttttttcagtgtctaataatattacggtataaagtttaatttttgacaataatagtatttaaattatatttatggaaagtgttttaagttaatggaaagtggtgttcttgatttgaccaagttattaattttttttttgttttaaaatttatttaaatatatcaataaaaaatgacacgtggataatgatttaacacttaacgatcaaatgtatatacctacgaaagtttttagaaatataacttatgtattattatcgttaaaaattaaacttaagtatttatctgcaaccgagagtcaatatgtatttactttgcaaattactctactattattaaaaaatagagagagaatatgtaaaagagtgtttatttcaatttgaaagtttgatattgaggagattttttttttcttttatgattggttaaaacatcaaaatctaaatttgtcctattacataaatcaccttaccttatttatagaggagcattggttcattaattagtgcaatgtttttcactgtccaaaatacaattatgagataatattaaaggccaatttagtataactacattgtgagaaaaaataattctagttatgctgttaaaaaaaaacatttacaaatgagttgtgagaaaaaaatatgatgaatatttgataaattataaatttaaaaatactgtaaaaaaaatacaaaattagaatatgaaatgtgctttaggggacaatattattgtgtttatgaaattggctttaagggttaagcatatttctaatttcaacaattaaccttaatcaaaatatgcttaactctttgcacattaattagaatcatcgagagtattggagaacactgtcccacatgaattaaatgtaaaagtattgagacat

SEQ ID NO: 317459 - DNA, 1135 bp, Cannabis indica
attactgacaaagtcacaagaagggatgttagagatgtttttcttggtcaagaatttctcattgatggtgatgatgtagttgagatgggtattttgtatttactctcttgctacttgtttagatttacacatgacaaaaaggtaaataattttctttttgggcttgttaatagtgatgattatctagatattctaaatggttttgcatttggaaaaatactttgggagaagacattctactatttgataattgcaattaaggatgataattctatatttgatgaacttgaagcaaatggtaagaagttcaagaaatacaaactttctggatttgttgttgcttttcatttttggctttatgagattattcctagcttgtcccctgaataagtactgagtttcgccgaatacttaataggcaaagtttcgaggttcctggttttgtgactttagtcgaaaaggtttttaataaccctgaggtaaaatagtctttgcaactggttttgctatttgatttttttttatttggctttttttatagcattgaaactgatttttttaacaggtcattgaagatgattttcgtcttactgatgctgagagacataatcgtcttttgaagaattttaagtttcaatcagtgtatcttcctaagagtctggatgatgaaaatgaaccagttttcatatattttggttgcagattgtttttctaacatttcatattctcttttttaatattttttgtttcttttgtaggattttgaggacaagtttgagaatagttgtagaagtttgagaataattttgttaatattctcaagtagggatttgtaatgagatggcaatcttgagagatgagtttttttggggatttggctaagttgagtgagatgattgaaaaaatgaactccaaaaactatgaaaagatggacacagccgatttgtttggtgcttctgatagagaggtaaatcgtttattattgtttatattaacaaaattattattagtttcttttaatttgtatatgaaattattctttagtataattgattttcacactgatactggttttttttttttaagttgttatcattttttgattaatttttctttttgcattgtattttttttt

SEQ ID NO: 317460 - DNA, 600 bp, Cannabis indica
tatagtgatatgatattgagagagaggaatggctagctgggattgggtgcaaagtcgttgttttcggtggtggtgggaagtagaaatagtaatatgtggggtatatatatatatagatatatatatagagagagagagattgagtttaacacgcacaacagaataggcagaagggtgttgtcatgtgtgtatgtataatatatatatactactaactacgtacatcatcacagtcacaccatgtatattatgtatgtatatatctgcattattattattattattataatattgttatattgtacgtatagacgtactgctatatatataatatatattatctatatattcacaaatttgataatttcttgaaaactatgatccaattttcaattttgactaaattgtgttggaatattttcctgaattattaaaaacttcatgaaaaggtgctatgacatcatttttattttctggtgtaacttttctaacaatctcaataccaaatatgctatttactaaaatattaaaagggatatgattttgtcctgtgatatactttcacggaatgtattcagtggtacattagatgggtctcag

SEQ ID NO: 317461 - DNA, 579 bp, Cannabis indica
cggtagctactctggtgactttttggcatcgatagcaaacttcagaaaagttgtcgaaattttcttgatgaatggagacttttttgacaacgacagttactccgatgacattcttaacaattagttatataaaacatatcgtttataacataatttacaattagttactaaattcttaaacaaaaaccactagaacttatataaaacaaatatttacgtggctcgccacgtaactttcatctagtttatgtaaatacctcaataaagaatgtcacaatagtgggtgtgcgtctaaaaaggtgattgtgtcagaggagtgccacgtgggcctttttcaggacactgactgttcttagccttttcgtattctattcttggatgacccttgagagcaccctcctactaaatgattgttgaatattcaagatttgacgtccaattttattgttgagaaacaataattgagtaaccagaccgtgcgtgaatgggtctggcttccttgatgggcctccatattgacccatgtacttgttgggttttatgccctaaataaaactctttacaatctgattagtaatc

SEQ ID NO: 317462 - DNA, 1427 bp, Cannabis indica
tacagaatgaattaataaaaatgacaaaatgaaaatataatttaatgtagaagccaattgcacttagttgtccaacataccataaacctacaatgtcaacgaatttaattaagacattgactaacgtgaaatgttatttttgtattaatggcaattacacttcataatagagttttattaataatgttttgtatgagaaattaggcatcatgttaacttggattattatcgtccactcaaaatactcaatcatctctaatctgtaagatataaatattatattaaatttgacacaaaaataaataatattatatttagcacaacatttataattgtgcttcaatacaaaataatattttaagatacaattagtctaaaaaataaaatatcattaataattaccaataaattagaaatcactccatatactattttttaacttttttttttttctattttacaatttgagttgttccgatggttgatgcatgagttgctccgttagtttttccgtataaaagcaaaaaaaaaaaaattagtttttaaatataaaaatgaaaaaaaatccctaaattaaatattaaaaaacctattaaatatataaataaaatataaaaaagttattaattacaatgagtggaaaagagtaaataaaaaaataatatttattgtggtgtaaaatttgatacatgctatatttttattttgtgccgaatttagtacaacgtttaatgtatgtcaaatttacactatcattggaattaaactttataaacatgggctaaaaaatacatatacattatatttatagcactctatgatttatgacacaaaatttaaaactactgtaattttagtcaccaacaattatttagagtagatcaataactcaaatagggataaaaggttgcacctataagtcatctagaagagcaattgcccttacaactaaagaagaacccacggatgtaatattctaaaaatgagacatggattaacatttctaattaacttatttaccaaaaaaaaaaatctaattaacttaattaatggggaattatataattaattatatgtgaatatttgaatttaagacctcatttatgtgtataaggatgttttccataattttgacccgataagagtaaagttgtaattttattatgttatttgctagttgactatattattatgtagtgtgttcgttttattgtgttataagtaaggctaattatgatttttaccttcccgaactttgacatgtactaaatcgtgcctcctgaactttgaagaccgttaaaaattctttctgaactattaagattatttgattttaaggacttttgtctaattttagtaagaaaagtctaataaaggtgaaagttcagagagcatgatttgacaatgtcaaagttcgaggaacatga

SEQ ID NO: 317463 - DNA, 1769 bp, Cannabis indica
tcttcttaaattatcagtttttgacattgaaaaaaatttggcaagaagtttattaaaaagttgatcctaagtagttatggttcctgttagaagtaagtttaaccaagctttgactttatcttttaaagaaaaagaaaacaacctaagtttgaccgattcatctgaaaaattttgaaaataaaaagttgagcaaatatcaaagaaatctttaacatgcatgtaaggatcttctttttttaccataaaatgaatgcaacaattgaatgattgaaggtttaagttcaaaatgagtggcattagtagtgggaaaaacaatgcatgattgagcattagatgaaaatagatgaaaaatattcaagtagtattttcttgcgctacatttaggttcttgttccattatgcttaaattttcaaaaatactttcaatttcacataaagttactacttttttttaccaaacgattttttgaatcacgttgccaatattacatacaatgttacaaatttcatcaagtgcacaaataacacacaataatctcaagaaaacaaatttctgatatggaagatcagttataaactgcaaccacatagcatacttatagcatgaagagattatgatatattttaaaaattttcaatttttttttatttaacttgttcttaggcctatttgattacacttactcacaacttaataacaactctccagagataattattaagtgtggatgagaactttgccaaatttcttttaaacaaaaattacttatgttgaaagaacaagctttgtttaaagtattttttttaagcaaagtaaataaaattacaactaactaaatacaataaataaaaaaaatgacaataacaaaaattgatagttataaaagttatgaggcacaagatgtcatcaactaactataataacagtggtagtagtaacagtaataataataagattttaggagatacaattaaaatatcatcaactaaaatgataaataaaaatagaagctaggaggcactaatgctatcactaaaggagataagtaataggaggcaaaaatagattcaactatcaagaatgtaggaggcacaaaatgccatcaactaccaagaaacatatatataggagatttcaatggttacattaaatatgtaaccatcatggttacattttttttaaccaatagattactatggaatgattgtgattaatttagaaattaaataaaaataaataataattaataacctaatagtcacctaataatttatttccttataaaactttaatgaaaattaaaatattttaaacgtaaattaattataattattaattaatttttcataatttattattaaataaggatcttttaacaaatttttttccctaaattattaaattttttatagcaaaactctttataatttaaaattataaatgtaacgccctaatctatagggacgtcatgtgtgtgattttataaactaatttaatactagtagaataattaattattaaaaacgtgataatattaaaaacttgaccaaaacaaaatactaaaaacggacattataacgacataaaaagtatgtttcagggatccttgttataaaaagttttgctaaagaaatatatacgacaaccatttaaacacaaaatcaaaatacacaacagatacagctagcccaaaacaactcttgacaactcggcacgcatgccggtggggtcaatatgtacattgtttgagaagactgtcacctcatgg

SEQ ID NO: 317464 - DNA, 684 bp, Cannabis indica
aacatacttgtgagtagatctaagatcctggtaaaataaattccaacagtttgaacctagtatgaggaaggcttgcttattattgggtgaattgttgatagtggattgaatgagaggaaagagagtagtatatgggaattcttgttcattaaaagtaacacttcttgtcacacctgagggatgaagacacctataacttttgatattgacactataccctatgaagacacacttggaagatcgaaaggcaactttgtgtgattcataaggtctgagaagagggaaacaagagcaaccaaaaactttgagcaggttgtaatctggtgtttgctgaaagagtgtttgatagggtgtttgataattgagtgttggagtaggtaatcaatttattaagtaggcagcaaaagcaaaagcttcccaccagaaagattatggcattttggcttgtgacagcaaggtgagtccagtgtcagcaacatgtcgatgtttcctctcaactcgaccctgttgttggtgtgtgggcaagaacttctttggattatgccaagattattaaaaagtttatacattggctcatattctttactaagatcagattgcactgatttgattttagtttgaaattaactgtatagacatgttactagccttagatttgtttttcataggaaataaccatgtaaa

SEQ ID NO: 317465 - DNA, 636 bp, Cannabis indica
aactctttgacgttgcccaagcctcaatttgttttatgacaagctgtggacgatcaacttcttaaaagagttaacttggtaagattttagattaagatggacatggttaatttcctggtttatgctacaggaattgaaatgcgtgaaaaactttgttcactgttctctatctatgcatttggtcaagcatgtcttcaattggttgggaaaaaatggttggcccttggacttcttgggctggtttaattggttggctctgtctcccttgagttaattgcaggctatagatatctctattttggtagccagttgttattgtatttgggtcaatagaaataattgtatcttttagggctattctaatacagtgtctcatatagttaaagaggtgaaaagtgtactgacttatagattacaaattgttaaacacaagaatgtttctagagaggaaaatgtatacttgaaccaaattcttttgtattagggtggttgctgagtgtgtagtcaattttttcgtactagtcctttaggttgtatttgtttgtcgattaatgaagattcttccttcttgatcaaaaaaaaaaagaaagaatgaaatagcaattaccattaattcatggaataaaatcaactaac

SEQ ID NO: 317466 - DNA, 802 bp, Cannabis indica
tggagtgtgaccaagtttcccataatggtaaattagaaaactccggagggccagcagaaataggacatgaaggcgagcaacttcgcacaactgttcaacattaaggtatgttcttttatgttttgcatgttttgtttatttaggttttttattagtttttagtcgtttagcaacttttcgtgacataaaccgatataggtttgcgatgtcatgttgtcttttcattttaaatgcttttaactgttaacttgcgacgtgtctgtaacatatcgcgatataagatggacacacatgttattgcaacttggtgtcttatttagcgacacttttctatttgcattgcgacttttcttgcgacatattatgtaacgccctaaataattaggcacactacccaagatacttatgaaaaccctaatcccataaacgggattactagaaattagcgcggaatttaaactttaatcataaacaaaataaaaataaaacttgtaataatttaaactttacaatctaaaagttacagaaattgggatcccaaaaatatttaaaaaatattattacaagtcttttttctttcagccggcctaagcggcaaaacaaagtctcaaaaatgcaacactgctagacccccaacccgcttggtctgatgtggcccggacatgtacattctttgtccagcttttgcactcatggctgatcaacaacagtcttacccttttttgcacagtagagcactcgtgagccaagcccaataggacagtataaaatatatcaaaaatatactcatcatataatataa

SEQ ID NO: 317467 - DNA, 1037 bp, Cannabis indica
ctaaatccaattactaattggattggatcggatgaagaaaaaaaggttggattagatcggatcgcccaacccctgtccccacactctacactatactatatatactctcttccctagaacaagatatatatgtaattaattaattagaacacagaaattgaattttgtttttgtttaaacatatataattaaagtacttaattaataataatttgatgatgatgatgatgagtgttatatatattcaaaggtatcaggtagagttatatatataatgatatcgaataatacttccgtattcaacaagtactctattctatatatgcctatatacctatctatctaattggaatttttaacaagtatactttgactcctagctaatatatatttaagctaattgtggtgtgtttagtatttttattaagtgactatattataatttttagagagtatcgttagccaattataaggcgatacgtttagaaggtattaggtaccactgatgtctaataacaatactctatatttacatatagagagtgacgacaaaatgggtttcgacacaacatacgaatatgacataaattttacattatatatgatataggctaattattaggaccttaatttttcaggtcgttaaatttttttccttagctattgagattgttaaatacaagaatttttggatgattttactaacgtgataattgtccttttacaaaatcatacttcttaaattttgagatgtaaatcgtactacaagaactttaacatgtaccaaatagtgtcccatgaactttcaatcacgtcaaacttcaattagtaaagttggacggaagtccttgaatccaataatctcaatagtattgagggtgaataaattttaatgggtaaataatattttagatgcaaaaattatcgattgaatcatctgctttgttaaataacaaattagaccatatattttctaaaacggtacaaaatagtatctgaactaattttttgtcaaaataaaattaattataatccga

SEQ ID NO: 317468 - DNA, 669 bp, Cannabis indica
attaatatttataacaaaaattattatatatactaatttttctaataagctttgataattacttttaatttattaataatttttgatgataatgaaaatgttattaataaaaaaataatataaaaatatcttaaacaaaagacaacatagtgtaccgaaaattaagtttttgttatgtatattattttcacttttcataatgttttgaaggtttttttttttttagaaagagtgaattttgttataatgtgttgaagttaaagataatagatataaatattttaaaaaaataataataaataaaataagaataagaagtgcacaaaggaggcaagaaggagacagattctttttttaaaaaaaaaatggatgattacacgcaaaaagagagagaataaaattacaaaaaagaaaaaatatagaaattataggaaagaatgataaataccattttaaattctgtgttttgcaaaatttactaattgaaccctgtgttttgttaaatgataaaattgaccctcaattttctaaaatggtaaaaataagattctgagcttattttttgaaaactttttttttttatataacaaacttgaagacaattcctaatacgaatagatgcagaaaatgtaaccaattttgtcataacacttttatatcggattataa

SEQ ID NO: 317469 - DNA, 1853 bp, Cannabis indica
tcgggtcataattaccaaaatgcccctggctcaccaacggggtcttaacatattaaaattcatataatttcacatatattgaactatataataatataattcctcaatgattcataattatttaattagggttttgctaatccttttcttaatttcagggtattacaacacttgtatcctttatagctgggactgtaaccaagaaacaagcaatgagtagttcgaaaggtaagcttatgttgttggtatggcttgagtaggggataacaagagcagccaaatgttttaaggaatttataatcgggtttctgatgaaacaatacctcaaatggattttgaaattgtaaaacaggagttggaaggcgatttattgtgtatgcagctgtagtgaaagcatcccgccaatgtgttaggggcatttgtgcttgtgccaagaaagagaggcccatgtcgacaacatgtcgatgttttctttcagcctgtctctgctgctggtgagtatgggcacacgggtgtctgaaagtgatgcccaaagactcaagaatagattgcaatggcctatattcacctccccaatctgactgtatagccttaatttttgttgtaaattgcaattcaacataagacttaaactgtctaaaaaatagaggcacttcagatttggttttcatggggtaaatccaagtaaatttggagaaatcatcaatacagctaacataatatctaaacccttccattgaactgtaagatgatggtccctatacaacggtatgcacaagttgaaaacaagatgtagttttaggaatagaactactgaaatgcatactatgtaattttccatattggcatgcttgacaaaatggaagagagttacatttagtggatgaatgtagactgcttagtacatttttaactattcttgaggaggcatggcccaatcgatggtgctaaacttgagcttcagtaaatgttgcagcagggttttcttggatgcaattgtatgcagcaggcagagaaagaagccctttgctgagctgtgtagatttggcactcgactgagagagatccaagtgataaaggccatgcttaagatggccctgcagaagtacttagcccgaaatcttgtccttgattatacatgcattagaatcaaagagaaatataatattattatctgttgtaagcttggaaatacttaacagattcttggtgatattgggagcaagcaacacatcattgagtattaattttttgttttgatgaaaagtagaaaattcagtttggcctatttgagagattgaaagtttagagccattaccaacagttattttggctttgcctttgtaatcatgagtggtattgagagtttgagcatcgaaagtcatgtggtgtgtggctccactatccacataccagccattatcttctactaggcaattagaatccgaaataagtgcctgtgggttgtgtccttgaggctgagaggaggtggagctggtttggggatcattatcataacgatgatagcatttttatgcaagatgaccaatcttgccacaaacgacgtgtcgttttccacatggaaaatgacatgtcgtttttcatgttatgttacagacgtcgtttgttgcaaacaacatgtcatttttcacactatggaaaacgacattcgtttttcatcttgtgaggcagccctttggtgagtaaaccgacgtgtcatttttccccttaggaaaaatgacgtgtcgtttttacgtgtgtttagcccttcaaaatggaaaaaacgacgtgacattttactttttgcaaaaacgacatgtcgtttaggtagtgccttttttcaaaaaaaaaaa

SEQ ID NO: 317470 - DNA, 1179 bp, Cannabis indica
cacttggcaggaaatgcaagaaactctcctgagtttcgacagtaagttggaacgactaaacttactcactaatactgctaaaaactccaattccacaggtgctggaccatctgcagcgtttgcaaaaaaaaaacagaattaccccactggcagaggcagttctaactacaacaacaactacaacaacaatgcaaatggaagaggtggcagaggtcataacaatcgtggtggaaactcaggccgtggccgtggtagagggggtagaaactcaaagcccacatgtcaagtttgcggacgatatggacattctgcagcattctgctacaacagatatgatgaatccttcatgggtttcactcctggcagcaacaatccacaacaagagaagaaagatcctagtgcttatatagccacacctgaagttgttgacaatgagaactggtatgctgattcaggggcaagcaatcacctcacttctgatcaagacaacatgagcaacaaggctgcttacaatggtaaggatcggctaacagttggtgatggtaaccaacttgccatctctcatattgggtctggtactttaaagtctaatcatggtaatgtgctgtacttaaatgacatgttacatgtgcccaaaatagcaaagaatttgattagcatttcaaaactcactgctgataataaagtgtttgttgaatttttctctgatgtgtgttttgtgaaggacttggcaacaaagatggtggttcttcaagggagtcttagagatggtttatatcagcttgaagcttccacaactagatccaacctgtcctcttccagtttgtcatcaacaaataaccaacacttgagtcctgagttgtttttagctactgctgttaaacctttttctggtgtagttggaaatagtagtgagtctgttagctcagtaggtagtaatttcaattccaagaaaaacttatggcatagaaggttgggacatccctcacctcgtgtcctgcgtcaagtgttaagagctactaatgtaaaaatttcaatcaatgatcaattaacttttcgtgaagcctgtcaatttggaaagtcacatgcattaccttttactcgatccataaacagagccaagcatgctttagatttggtgcatacagatctttggggtccagccccagtcatgtccaa

SEQ ID NO: 317471 - DNA, 666 bp, Cannabis indica
tcattgaaacagtaaaattgaatgaaattagacaaaagtccttaaatttaacaatctcaatagttcggagagaatttctaataattaaaagttcgggggaaaaattactaattagcctttttttaagaactatattttatgcaatttctacaaatttcgttgagacatttaatggaccattttaacattgaacgggcccaaaattttaatttggttgggtggagaaaaagcccatttatgattattttttgaaaaatttgaataatacaccaaaaatttgaaaaaaattataaaaataccacaacacggattttttttttcatttttacattttgaactttttatttacaaaaatatttctttagtaaaaataatgaattatttttttggttgttattttatagttgtattacagttgatgtatggttgttgtgaagttaatttcttcttattttttacttgttttcttacattttgttgagcagtgtatttttgtaaataaaaattttaggttataaactttataatgtatttttgtttttttttacattttacaagtatatttttgtaaataaaaactttaggccataaatttgtaaataaaacacaaaaaatggaattttttaaaaattctctctctctctctctctctctctctatgatgca

SEQ ID NO: 317472 - DNA, 1946 bp, Cannabis indica
tcagaaccccaagatgcttcacaatttctagctctatcgtacccaaataaaagccaaacctcaatgtctgagtattttcttattgctagtctaacagcaattattttttcaaaattagaatagctggactaaaattaagctattgtactcaccaatttcagtacatttcattaactttctagtcattacatcgtaacagatacaaactcgaaccaaaagtagtcttaaagcgcaatcaatctaatctcaaatgaatccacaataaactgtttcgaagatttcatacatagaattaatcactccactaaataccaaactcaaaataacgcacaatcccaaaatgggtaacgcacttaacatcttgatttgtgctaaatctaactctatcatagcaccacaaaaagtaagaagtgctaagtacaccattgacatacaccaatgaaacatgggatctgaatcccatttcatcttaagctaatgaaagacctggaaaacccagaagtcaattcttaaatcatttccaaaacaagtagaaggaaggtaccaggtgagtagttagagaaggagatggagattgaagatttcgaaagcttgcagattggtcaatggtaatggagcttctgggcaagcaaagagaggacaaaactaaggaaaataggttaaggctttgctgtttgtgataatccaaagattgtagctttgacaatatggtattgtacggacaaaataatggcggaaaatagactagtctcactctcactccctctcgcacactataccacaatatatgtagttttttagcggatggactaaaagaaggctcactcaaattaccgactttgtcgaatttgagatgagagagactagtgcgatgacacctataactgtagaataatcatataagaatataatcgggacaactaaattatattttaactagagaactaacccgactcttcgtgctgtattattaaatttttgtaattttttatatatataagcactgactggtgatgtacttttacggaatgtatttcgtaagatattagatgaatttcaagatacgttactattttttaaccctaattactcctagattaaccccaacactcagatcaaataactctctcatctaacagctgtcgtacatcatgaaatacattccgtgaaaatacatcacgcgacaaaatcgtgtccccatatatattataatttctagtgagtgatataatttaaaatataatatatttttatgtatatattataaataaattaatagtattaaatttaaaaacattgttatttttaaaatatataaaaaaatataatttttgtaataaatattatcattataattattaaaaaaatatgattattatgatatttttttagtattttttattttagaaatgcataatttaagtagttgttaatatatataagtaaaatattataaatcatgatcatttactattttttaatgaaaatataataatttgttaattcctattctatcaacttaattttttttgttatttcatttaattattattagatgttaattttttttttttttgtaaaggtagatgttattaataagaaagataattaattaaaactcacatgaatatttgaaaagaaagaagaagaaagccttgattaagaagcctaaactttttttttcttcaaatggtacagctataaaccaaaacatatataagtaaaatatataaatttacaataaacatatccatactttcagtagtttcatggcaataatttttcattaaaaaactaacttgatcaacattaagctcctcagtgacgaagtctacgccctcgaccaggacattgccatccgcgtctactggctccctagcctcgttgtatcccccaaagtttgggggtgcggcctcctcctcttcctccgcctcggaaggactacc

SEQ ID NO: 317473 - DNA, 679 bp, Cannabis indica
gaagcaacattgatgatacgtacccttcattacaaatggccctttaagccaaagctctccagttgttaatggaggtagaccaatggcagtcccattttcagggtccacaattttggctatgaaattcgacacaagctttcccgttgctccttctactctgctctctttcaatcccactgttgcaaacactcgcccagttgactccgttagcccatatgcctttaccacataaacaatatatacacatgagtgtatgttgggtttgatgacataattggaccagcaatgatcaacacatgccatataaacaaaactctttgatatttaacattcaacgtattatcgagttttatataatttaatatataattttgacacaatataatttaccaatagtgatacttctagaaagtattgttagtgcctaatagcgatgcttttaaagcactcccaatatcttctctactctattttttaaaatacattaccaaaattttacatttactattttacaccataaaatacatcacaaaaattcaatttttttttaaaaaaatttattatattttattcatttaaaatatatagtattaatatatacacatataacaaaaataattattaaaatccaaacaattaataaaatatatttagtagcaatgaataatattctataaat

SEQ ID NO: 317474 - DNA, 2151 bp, Cannabis indica
aaaaaaaattcaagtttcaacaatgcaataattagtagacttaggttgagccttcatatattagacctaaataaatataaaaattggtatttttataatatgcggtgtggtgcggtttgaaccgcatattaataattcaaaaccgcaaaccgcatcgcactgcgcgatttaggaaaaattcaaatcgcgaccgcaccgcaaaaaatttcaaatcgcattttttttgcggtatagtgcattgcaggcggtttgagcggtttgatgaatacccctatgcacatatattaatatatgggaacaaattataattcatttagagcataatatatatttcagtagatttatatgtgaacaatgaaattatattttttacttttaatattattgaaaattctgtttggattattgagatcgttgaatttaaaaatttatgggaattaactagtatttattaaagtttgaaggatataatttaatatataaataattactgaattaataaaattaaaagaaattaaacaaaaatttgtaaatttaacaatttaaataacttatgaaaaaattttaagggcaacaaaaatttagaaagtatatacattttaaaatttaagtagtaaaaattttaaaaaataatcaaactaaaaaactaatctgaattggagaaactagataggaatgaatatgatgaggaatctttttaagtgtatatattatatatttatataatagaaaagcaaggaataaagtggtgaagaggtagacacctaaatcctaatcctatgtatgaacacacacacacacacttgacacttgatcaagttgtgggtggctgctaattataaatgaatattatattgtgtcttgatttgacaattctatggatagaatagtagtagtgatcatagccatgatcatgaaatgttacatcgtacgtacacattatcaccctctcttacacatcacatgcacatcaataatgtatgttttatggaaaccaattataactgtacgtttggtcactttaaattagattataaaaatttaaatacaaccctctaattaagaaaaaaaaaatagtaacctgttctgttcggattggtcgagttaatctgttcaaaccgatcgctaatatttttttttattttcacatttaattattatattttagttaattgtaataataaaataaatatatatagattaaatttaaaattcaaatcaaccaccataaaaaacgtattactttgaactttatattttttaaataatgatataaattatatgatatataaaaataaataataaaaatatataaatatatataaaaaaatcttttgattgggtttgtgaggttagttagggttgattgagtaggttgatattatttttagtctgccttttctattgggcaggttatatttttatcaagtttttcgattttttgttgggttatctcgatttgatttgggcaggttattcggattggacggtttacaaaagtttatgtacaaccctagataatattatataatgggaaatttgactgtattatcggattaaaattatttttctaaacctaagttattctatatgggtagaataagctaatattttataaaacccaattcttaccttcccatttcaaacacctaaccctctctcttcttcccttatctctctcgctctctaaactcaccccagggactcgactcacaacccaccacccacaaccttgatcccttctctccacgaccatagacccaacgatccacggacccaatgactatcgcagtcccaacgacctacagacccaacaactttctccatcaatcacagtttcaccattgacaatatttgttatctgtgtgtagatgttacatttagtgtcgaaaatagtcagatctgagttttagacaaaaaactagtttttttgccagacccgatggtaatctgatgccttcctgttgttgaaatgagtaaaggttgaagacaaaggtccgatggtggttcgatgatatggtccgatggtagttcgatgccttcctgacgagcttaatgaatagagcttaacatttataaatgtagaatatggtctaatagtggtccgatggtagcctaatgctattttttatgtataaaaatataaaaaaa

SEQ ID NO: 317475 - DNA, 1267 bp, Cannabis indica
ttgaggtctataactttagaattgtgattgagtgtgaggcatgatattatagggcattgaaatagctttgacactcaagtttaatcgtgttaattggatcaatattgagtgagttatgactattttacttaagcttgttctgggttgagcgcccaagttgacataaagcgcccaagttgacataaagcgcccaagataacatttcagtgcccaagttgacatctcatcgcccaagttgacatgtgacatcaacctagaccttgggtaagtgaaaaaatttctagggcctgtactttatgatgcctaagtgatattttgacatcacttaattagtttttgtgttctggaaaatctagtcgccagttctcagagatgatgctattttgcagaaatgagagacccaaaactcttcatttcttagttgttttccatgttggaaatgagaaatgtgaagttgtgaatttacttctctaacttcatgactcttagttattttgaaaaacaagatagatggtccaaacagaataagaatcggataagtaggaccgagcacaccaggccatttcttaacctgacattgtgtgcttatttcagagcttccaggatgtcattttgatactttcaaggttctagaacttgaggacaaggactcttaccctatttttgaccattttggattgaatggtcgaatcaaatttttggcatttgattgataaaaactagcaccaggcctttgggtttatggttctctctttgagtttacatgaatcttcattatttcggatgattgaaaaaattcatagaacacttttttgagaacttaattggaaacaacccaagttgacaatatgtttactagggcgctagaccaaatgccaagtgtcaagctgagcactggatcccaatttttgccatccaaaagttccattttgtcccaaaaaatagttgaatcttaatatttattgaaaataaagaacatgcttgaaataattctaaaaaaatatcataggaattaacctaggttgaaaacctaggtgttgggctagccccaagagttaacctgggctttgggccttgcttccctaaaagtacctatttccccattttttatgaagatgaagatgatgcgagatttgaattatcaatctgatacttggaaggtactcatattgataaatttttaacctgggtgttaggtgcccgggcacaaggttctttgggtgctaaaaaatgaaatttctctaaatctgattatgatgcctcaaat

SEQ ID NO: 317476 - DNA, 1005 bp, Cannabis indica
tagtatgaagaaattctactgggatactcaattaatagtcaagcctatcgagtattcaataagagaattggcacaataatagaatccagcaatgtacattttgatgacttagaagtatatgaggcgactcctactggtgaagaactccttgaacccgcccttcccatagaagttcaagtgagccatcctcaagtagttcctacaagttcaaatgcaatagcatttgaagcttaatcagattaatctaagacctctggaatgcctccaaaaatagttgttgatactgaagtcactagtgcaactcctcctagttattcacatgcttatttgtacaagaaaggacctccttcttggattcaaaaagcacaccctcctaccgtggttattggagaattgaatgttaccatggttactcgacaaaaaattatgaatgctattgcttttgcctgctatgtgtcaatttttgaaccaaagaatgtgaccgaggcccttcttgatgaattttggaataattccatggaagatgaaatgggacaattcaagaggaaccgggagtggatcatggtttctcgacctgatggtgtcaatatcattggtactacatggatttttaataaaataacagatgattttggcactgtcattcgcaacaaggctcacttggttacacatggttacaatcaggttgaaggggttgattttgaagaaatgtttgcaccagttgccaaaatagagtctatcaaacttcttctaacagtggcatattttttaaagatcaaattgttgggttttatgccctaaataaaactccatttcaatgtaatctctattattcaacatcaataaagaaacaaaagtatttttcactcatttgtgtgtcatatggttcatgttatcatttacttgtttatttgatttataaattcatccaaacccttatcacatttatgttcttggttattgtgtcgtcaacacagtagaaagtaatcaagattatgtgattaa

SEQ ID NO: 317477 - DNA, 3834 bp, Cannabis indica
ggatagtttcaccacaaatattccgtttttctttttcatttttggtaaattaatattaaaaaattaaaataacttcaaaaacaaaacgaaattgcacatagagtcaatttttttttttttactgtatccaacaaaatccaacagaagaaaatgttgcatttttatttctttacattttctttcctaaaaaaaaaaaaaaaaaaaaaaataaccacactccaaacaaaccttagaagttgatgggaaaaaaataataaacaaactataaattataaactaaatccactgggctgcaaaaatatttcacatctaaaagcccagagttatatgttctccctggaaaacgaaaatggtatacttcccttaacaccctcggtcaccggtgagtacgttcgcaagaatgaaactcaagtaaaagcagtcgagtatgtagtttaattcgatgcaaagcaaaatatacgattaaatttcgacaaacttacatgctgcaacaacacaacgagccttgcaaacccgagaaaagggcattaaaagaaaaatatgatttgaggccaaaaacacaagaatggattataagaaaatacctttgcaagtaattgatcaatcttcctccataggaacctctggaatatcaaacctatcttcttcaatagtcttattgatcacagaaataggggaaggtaatttaaagtcaaggaaacaataaattacatcaccattgaatctatagggacagctaaattatttagtcataagaaactatgaaaataaaaacaaataaagaaaaaaaaacagcaattgtaagacaaagaatatcaattagcataagatcatcctccttctcaccccgagtaatctacatttaaccagagaaaatgattacatatcgatcttagttatgttaacaaaagaattgaatatagaataaatgaaactagtttagataaatgttctcactagtttatgattttgcttttcaagaagagctctcagattaactttatcttccttctgcagttcattcttgtacctataagcaatgacacccaattgtaaagaatcaataactttgtcagtctcaaactcttacttggaacacccaattgaatgtttgaatacctttgcacgaatgcaagcagcaattgatgccatattacaggcataattcttgtgccatccgaaaatctcacaaaatgtgcaacaagagcatcaagtgcccgatatggaagagcatactttttctccaaaaggatctttataaagtaactgcaagtattttaactcaacaatgtcaagacatttttcgaacaatttgaaacatcaaataggttacgtttcatcattagttggagagcaggtgtagaacacatttcagatcaacaatcactgatggataacatcttatagaatatacaatgcttctgttctaatatatattatgtaaaatgtattggagtaccttgttgtaccacaatattccatatcagcaagtttcaacaatgcaacacttcaaaagcatataaaagcttgtttataaaatatcgactaatgtaagattaggaaagtatggttggccaacactaatgtaagagcttaccattatgttagaacatcaatagtgtggttagaaaattacttcaaaagcattatgtgcttaatatatacaaaccttgaatgaagaagaggaatagaaactttttgtattatgctcccaataataacagcttcccttagattgcacgttctggactgtcaatgaagaaaataattttgtcagaaacaaaaaacgaacaaggaaaataattgcttaaggaaccacttgataagttaagaatagtttacctcagatagaggaaatagtattcctttatagaatgcaccaggtttgtaaacacactttctcaaggactgatacagagcaaaatgcaaacgcttattctttctaatatcttctctaacccgtggcaacaagacaagcttgtaaaagcgctctgccctcttcgcacccatattggatgcaaaaattctaacagcttgatacattgcattgggagaccacttctcgggctcagtcaaatacagaatatcctcccagtttatcattgaagagatgagtttaaacagcttcggtatcttaccatctgtacagttgctaagaatcttgccaataagtctgttttacaccttcaataacactatggcatagctaaatacaagatcaattgcagtcgtggcaccatatattaaagagaaaagaaaaagtaattactaagcatactcggtatccagctgaggcataggctgtgcttctgcaatttgaaaaaaaaaatgcaaatgagttatatgaatcatagaaaatgcaccctttaaaccatattagatcccatgagtttgtttcttgtgcaaagttgagtagtgatggtcaaacctgaagacacaatagcagctttctctttgatctttgcaataataatgtcagcaagagtaggttgtgtaattgcatcttttgacatgaataagtcgagtagtttctcatccttttcatcaatttcctgcaacaacacaaataattatatatatatatatatacatacataaaataagacaaccattgctctgggtccttaaattgtaaactgaatacaaaacaccctacccttgttttgtaaaaatagcttatatgaaattttttattaacaaaataagtacttcacaaaaaattttaaaaaaattttacaatgtactctcttaacgggaatatgcaccgatgcacctgttttgatatccgaaatgccttttaagtctcgtgttcatgtacattatttaagatattctgaaaaattttaaaaaattcaaaaaaatttaacacttcaaaaaaacaaaataattgatgcgtgactatattattttatagacgtgaacattgatttctatattgtaaattattctaaatttaaaaaactataaaatttgattaacaaaataacattgtattgtcgcatgatggtagcataaagtaaattaactttttttttgcaaattttagtatttcacaatttagtttggcaaatttcacatcatggatctcaaaaaggaaaaagaaaaaactcacttggtaatcgccatagcaactctgagttccatcgattacagcaaatttatcaatgtagtcctccacttcatgatcatccttgggcgggtcttcgatgatagtgagtagggaattgttagggttttgggcaaggaactcataccggaagagataagcttctcttccatctgatgctactgctgcttcttgccatcactagatttggaaagcttcttcggaggcagtgactctttattgtcttgggcgagaaaggggtgtggattgtggatcctgtgtttcttctttcccgccattgatgaaactgaaagaaaattcagacacagacacagtggtgactgagaggcgagggtgacgtgagaagaaagaaaggcttttgggtttataaaactatgtttatttttctattggtaaatagtgaaattaatatttaaagttttgaatttgtaaacatgataaatttaataattttttttttttgagaaattctataatgcacccccttaaatgggataccgatacatctctatctgttttaatatccgaaataatattttagttattttttttttcatagtcatgtaaattatacttatttaagacatcctgtaaaattttaagaaattcgaaaaattttaacatgccgaaaattgcgttcaagtagtgtattgcatgcgtaactattttattttatacgtgtgtaaacagggccggcccaagcattt

SEQ ID NO: 317478 - DNA, 703 bp, Cannabis indica
tttttaataaactcaaaatagagtttgtactcacgaaactggagaaaaattatagttttacaaatattaggtatttatatcagtaaaaataaatattgagtttatactacttataaacttaaaatttcaagtaattataccgatatttattcttttaaataaagcaaacttttattttgacaactaggaagaatggatacaagtagtagtaccaagtaccaagactagcctataattcttctttctttttctttttcttaaatggactaatctatagttctggctaacatttttttttgttcttcaacaaaatggaaaatgaaatatatttataagctgttattaagctaatcaaaactaagtatattaatttatcattagactattatataagtaaaatatttcaaaaataatcaaaatgcaactgaggcacatctgtaattatttctattattcaagagaacttctcttaaaaaaaaagggtaaagtttaactcccccaaattttacaaaatcataattgggggttaattctttattttttatttttcaacaaatttgaaaaagattattatttcatttaaatgaaagacaaaaaatctaatagatacttgctcattctttgtcagaaaataaataaataaataatgattcatataatgtataagtaaaccacgatattggcatgaaactttaattttttt

SEQ ID NO: 317479 - DNA, 1610 bp, Cannabis indica
aaagagttttatttagggcataaaacccaacacccttataattctctctattacaatattgttcatcgatctttacagcaaatccctctctacatcagactatttctttgtagccagcccaatcggacggcgaccacacggcgatcccatgatgaccccacgacaaaccaacagagaccccacagctaacccattgcgaacccacgaacctgatgtatagttttgattcgtcttcaactaattttcgtcttgtaataattctatttgcccttatgaaacactaatgagtggcttcgacaaacgaatgtgtgacaaacgaatgtgtgtgagtaggattgaaatctctgcaaacatatttctatgttactttattaaaaaaaactcaaaaccactatttgcacctgatctttgtttctgcctttgccactctcattctatctattcttgatgtatgctaatcgtgtaccctcacaagaacacaaccaccccctttcgtgagttgcgccatctgagtttggcctacaatgccattttcttaaaccaaatccagctgtgttagaatataaagtaataaattttgcagtcaattctaaactatcaaatacatgaccgaccaaatcttcagttttgagagcaaaagaattcatgaagataccaaactttgaaaaaagggagctcaaatctttcaaaaatgcaagtgcatctcatgctaattccttggccaaatgtgtgcctcaccaacctttgtgcgctagaaagattgaaaagtaattatggtccccagctactacatgaggataatctgctacctatgtttcataaaaatatatactataaaaaatttcttgacttgtgattggactattttcttctctataccatggggtaagaactactggtcttacaatagagtttccctatatatatattttagcttagctttgaacgattagtaaaatctcagattatgttaaattattaaaaaaattatccttaaaattagctcaacaacaaactgtatttcttcttggatcctttacactaagattggccttatcaaatatatctctacttgattgcttaattcctcatttgttagtagtggttttttgatcgacgatcttagattttgagaaatattctctcggagaagcaattcagtagagttttgacaagctagcgtgatcaagaacgtgtattctgtttgaatattggggtcctctatttataggtgggaaagtatgatgcacactcttcggtcttttcgtcgattattgttctcctacttccttgcatgttttgtcgttaactctatctcttgagcccaatcactcaattcttggtgagctttgttcttcccatgatcctcgacttttatttttgttttaattagacgatgtgtttttatcctctcctaccatgtcattagttagtttacttttgaaattacttttataccctttggattaattttaactcttacaattgctctttgattctataatttttgagctcttaattattatatctgagctcagatgttgtggaatcagaactaggggtgttcatccgattcaatctgtacttttttggttaaacaacattcaatc

SEQ ID NO: 317480 - DNA, 1222 bp, Cannabis indica
gatcaccgtgaacatttaaactgcaaacaacccaacttatgcaagcatttgatcgtcagtgttctagattgttgagatctattaaattagaacacaactaaacaacaacaagacaagcagccagtcatggatcccatccaattaaggataatttagttggaggataagtttaggagatatcgagatggagaataggggaaattttcagggtatgattatcatgaggaaatagaaccttttcaccccagcatactcaattcctagttccctcaaggatttaagaatcctcatgtcgtgcaatatgacggtacaactaacccagttacacatctgaataacttcaacactatatgcgatgttttcaacaacttgcgttgcatactgatcccaacatccctgactggggcggcaagcagttggtttgataaattcacaaaccattccattacataattatctgttgcgcactaagtgtcggcattagcatataatggtaaatatataatcggtaatgtatggtatcaccatcaggctataatgggatggatataacatattgacatgctcaaggcccatggatatgctctaaaacgtctttggtcaatccatttggctaagataaataattctctcacattaggcaggctaaattggcccatcattccttgtaaaaagggttgttgtgttcttaattggtgattaaggtggaatgggtgcggctatggtgtagagagaatggaagagtagtgttcatcacgcccaagttctctctttctctatatgtgtagatgaaagaagtagaatcaacataattattagagcggcggagctaggactaaatattaggggggagggggcaataacaagcaacacgtacaaaaataaggcttcatgtttataaattttagtgatcaatgtctccatttcaagatagtcttgactatattcattagaaatgacaattttacccaaaaacccattgacccgtgggtaccctacctgtatctgtatggtattacgatattacctattgtattacggaatagaatagggtgtaagggtatgaaaatatgtacttgatacatgtacaaggttgggtacaggtatatgtgtacccttccttattatcctaccctatcctactcagttatatatttatatatatatttacctttttttaaaaaaaaatagttataaagattgattttaactaatattttat

SEQ ID NO: 317481 - DNA, 2083 bp, Cannabis indica
tcttcttttgatatttttttttatatatttttgagggccctaaaatttaatacatcttgagcccatatattttcagggtcggccctgagttttaggttactttttcatctccaaaaatataatatgatcagatcacccaattttgtgaccaaccattaacaaatcccaagtcaagtcacaaaccaacatatattattcacataaaaacacattacttccatcacataagggacaaagcacaaaaatggacacaaggctattagaggcttctcaaacaggaagtagcatgatgttacaccaattgcttcaagagaatcctctcatactccacacacatgctcttttctcatcagacaaccccttacatgtcgcttcgatggccggccacgtggactttgtcagagagattgtaaggctaaaaccagagtttgtgaagcaagtgaatgaagatggtttcagtcccattcacatagcttctgcaaatgggtatttggagattgtgatggagtttttgaaagttgaccaaggactttgcagaatgtgggaagaaacaaatggactcctcttcattttgcagccagcagaggatggtctaacctcatccaagaattgctcttggtttgtcctcagagtcttgaagatgtaactgtgcaaaatgaaacttctctgcatctttccattaagaatagtcaatttgaagcaactgaagttttgttggcatggattaaagaaaagaaaagagatgatatattgaatatgacagatgagtttggtaactcagtacttcatctggcaacttggagaagacaccgccaggtaataataataataataagccaaactgtgtgtttttgtttcagtcaaatgattaatcatcacaattaagcaaaagagtggacaaatttgatcaacaagagaagattatcattagctgaagtttcactagcaatatcgtcatgactcaagtacaactaatcttttttacaggtagtggagtggttgattagatttggaaataatacaactggtggtactttgatagtaaatgccgtaaacaagagtggccttactgcccttgatttgttactaattttcccaagcgaagcaggcgacagagaaatcgacgagctccttcgcaaagctggagctaagagagcaaacgacacctttgaacacagcactaatcaacaaccaatggacacccattgcaccatagagaacgaagatgaattggttgagtatttcaagttcaaaaagggaagagactcaccaagcgatgcccgaaatgccctcttggttatggcggttttaatggccgcagcaacctttcaagtgggaattaaccctccaagtggtgtgtggcaggacagtgacctgaatgggaatgggaatggcactactaataccccaaaacatgtagctggaagctccattttggggtcatacaattcagtctcatacatgttatttgtggtttttaactctattggactctcattgtcactttacatgattaccattctcacagagaatcttcctatgcagttggagtttcaattatgtgtaattgcactatattttacctattacacaggtttagcaaacatggctcccctaaacggtacgaggaccgccattgtagtattatctgcagttttgcctcctactattcatcatttagtgaagcttactagactaattatgaagaagattaaaagagttctactatatctctccaaatacttccgttgaaacaaacttattatcttacttgtgtagttgtatcgtatatatttatgccaagtgttatagtgaggagttattatgcttatgaagctaaacactagcatattttattggattgtatggagataaatagaataaaatgagtaaattaattgtttatttataataaatgatgatgagaaatactattttgaatctttttgtaaaagttataaggaattattacattgatattttatttacaaaaatactttcataaggtaaaatcaacatttatacttttatgtaattttaattaccaaaataccacttacactatcattacttacacaatcag

SEQ ID NO: 317482 - DNA, 1150 bp, Cannabis indica
atatattagcaattttccaaaaaattaaagtatttaaaaatacaattttcgaaaaatgcatgttaaaataaaaataaatgtctgaagcaggctacttccacttagtcaggtggcgcctagtcgtaaactttggcatgccttttttaaattgttgttgtttttgttttttttgtatatatgtgtcccttttgctacacttgtcaggacgtagcaacaatatttatttgcccttgctacgggggatgttttcaatagtaaataaggtatttagtcacttccttctaaaaatttattttgatagacttttaggggctgattgcgtcattaaaacatctggttccaacaactagtgttttaacttttcccactagtcttaatcgtctctcaatcaatccaagaattgtttatcgactttaccctttcattcccaaagctatgatacttcttggctcaccactcaaactcttatttggaaagaactacccgattagagttagcctggagtcagttttcttttgcaaaaaagaagtcttcgctacttcacgcatcttctccaggcttaaactcttctacaaggtttgttctgggatccatgcccatggcttctttaaacttttaggcattcttctcgtcttgatccttgccagcctaaagttttagctgacgatgcaaatcaatgggctaaacttatagaaaatccctagagatttataagaaggaatttgggcgtcttttttctttttaagaattttcgccaaatatgcatcttatctctggatttgtgcttgagtttagcctttgaggaaagaattaaagcgatttcctctcggagacatttagttaaaaatgtttcctccttttgagtgcatgcatacacttgagctaatcaactttggcaaacaaacgtaagacactgttgaagttgtcagtaatcgggcgtattgtaccccccaaatgatctgggaattttggtctcaaatccttggtcattttctttggaatctgactcgtgtccctttctattttttgaggaggcagtttgactgtgattcttctttgctccgcaagagaaggctgaagtggcataaaaattcaagcttagacttctcttgaaaagatcaaaagggagaagctgttgggttttatgccc

SEQ ID NO: 317483 - DNA, 1371 bp, Cannabis indica
ttccacgaagcatctgtcatacagaacacatccgtggcgttatcccagccacttccgttcctaaccgcagggcgaactgtcactctctttatctttgtggtttcctttgtagttgccagcagaagatactcattatatcttctcaagaccgattctctaaccgtagcaatgtcaactaacttccctttaaaaagaagttcatttcttgccttccatatacctcaaacaaacaccccgtgaaacaaaggaattgatcatttagctccgttggaattcgctccaaggcccaaactagccactcctttaccgagattgcactcccattctcacaatagatagggaaaggactgctgaaccataatgctctcgcaaaatggcactcccaaaaaatatgaattgccgattcacaagcaccatcacacaaaaggggcaattcttttctgtaatgaaactaagtctatctctagtaggaatgcatcccatgatcactctccaaatcatcaccgaatgcctaaagtggatctctttcccccaaacctttttccacagcttaccatcttcgcaagagctatctccaagagtggcttcgtagcctcttttgacagtgaaccttccatcacccgcctcattccacacaatagtaccatttgtgccaaaaggaagccgagtaatgtttccaattctagttcctagtatgtccccaaacatatctttgagaagctccatgttccaacttccatcatgattagacatgtcagccaaggtagagatgaatggaaaccggggctgcactctgttcataagatcagtaaatttctcataagacagccatggattccatggtttcttccagatatccaccgaatcacctttcagccttttggaggggtattttgaatactagagacattatttgcaatggtggcaactgggagttaaacttagatatttatgccgcaaattactctttaaagaatagaataaagaagttgttgggagtgctcttagagcaaagattttgcttctctaaaataaagaactatttgaaagaactgatagagtgtatttcttacatgattctttaaattttgaatgaagatgctttttcaaaagagctgttgtgagtatcttacacggttacaagtcatgttttgcaaataattaatattgtaataaaacaattacttatatatcacttaatatttaattatactaataatattataatattttagggatattggcggctaaaccacctaaactttacggtttgtaacacttaaccacaaaaatcgaaattttggcggctaaactacctaaacactagttccgttttgctctgcacacctccgtccaaaaatcacagttaag

SEQ ID NO: 317484 - DNA, 1572 bp, Cannabis indica
ttttttttgaaaaatctatacgatgttaataggtagaaaattattgatggtatatttaataggttttaataggttggaataacaaccaattacgtgatggtgaattaataataattctccttctctctcatcgttttgagttattatattgtttaaaaattttattaaagttttgtttttaaaataatcaatatataaaaaggagaagtgtaaaacagtgatatgatactctaaaatttttctaaacacctttatctacttttttgttcacactttcttaaaattattaattatttaataataataataataataataataataataataataaagatttaaaaatctataatttttaaaactattaattaataaaatcaatttataaatccatttgctaaatttaaattgtatttgatttttcagaactatatatatttgttaaactcaaattgtatttattttttttataactatatatatagatttatatttaagtaagtattttcttaaataattatatactatatacttactatatatatacctatattcataaacttttaataattaattgttaatatcgtcaatttttttatttacattttaataataggttaggactattttttattcattaacttctaaattctctaacttaacatctactctttcttatttttttttaggtggatggtgcaagactttaaccctattaattcataaacattcaaatatactttcatctctttttccatccatttagataatcattgtcacttttatagctatttcaaaagtatttaagtggaaaaattatatgcaacttaagatatatattattacttgattggtattagtgtatatatatatatgttactattattttcttaatcaattttatttttatacatacttttgtatttgatgtttttattattgagtgattttcttggtattagtgatatttattattttcttgatgttttttaattttgaataagtaaatatattattctattaaacaattttaataagggaaatttttataaatatgagaaattgatggtatagtttattttcttatggcataaataaatattgtaaaaaaatatagaattaaaaaataattatagtttaaaatatgggaaaaaacaataaataaatttaataaaacttgtaataataagttctgccagaaaagtcaccggcaccgaaaaaatcactggtaccagaaaaattagtgtcgctgaaaaagtcacagtcccccgaaaagtcaccgacgccaaaaaagtcactggaaaagtcacctgaagtagatgtctcagatttaactaaaaatagaactggttctataacataatgaataaaaataaaatactcaaattggttataattaaaatatagccggttctgtaacataatgaataaaataaataacacgaaataactcaaaccggttataagtaaaatagattcggttatataatataatgaatacaaacaagtaacactcaataactcaaactgattacaattaaaaaataaaagaggaaataagttcctaaaaca

SEQ ID NO: 317485 - DNA, 1100 bp, Cannabis indica
atttatgttttgttaaacgttctactaatcgtgtggctcatgatcttgctcgagtctcatggttatatgctgaacgtagttatttggaggacactgttccgaataacattagtgatgtaattgtgcaagaattgttttaattaaagttatcagctttattaaaaaaaaaatagtcaagtacctataaaaattctaaaattatgacttagatattattacttaaacttaattatttatggagcaaattattattattattattttttttgaaataatcccaaacaccactttcgtaaggcccaaaacttatccatacacaagagaaatcagaagcccaaactttaaaagaggccagcccaagaagcctaattccttccttgcacccgtctcaatagaacgaaaccccaaaccctaagggcaaaacggtaaactcatatcagtccatgctcctcaaatcccatcttcgcacataaatctctccattacttcatcttctctcagccgccgaaaccctaggagagaagtttcagagagagagttcagaaatgactacccgattcaagaagaacaggaagaagcgtggtcacgtcagtgccggccatggaagagtaggcaagcacagaaagcatcctggaggtcgtggtaacgctggaggtatgcaccaccaccggattctcttcgacaagtaccatcctggttacttcggtaaggtcggtatgagatacttccacaagcttcgcaacaaattctactctccaatcgtcaacatcgacaggctctggtctatggtgcctcaggaggtgaaggataaggcaaccaaggacaacgttcccttgatcgatgtgactcagtttggttacttcaaggttttgggaaagggtgctttgcctgagaatcaacctgttgtagtcaaggccaagctcatttccaagatcgccgagaagaagattaaggctgccggcggcgctgtccttctcactgcttaggtttgcataattatctttctccagagtagtacaagttttgggttttatctgtttttattttatttttttcgttgtaatttttggttttattagacttattttgtctacattttg

SEQ ID NO: 317486 - DNA, 1254 bp, Cannabis indica
tttttctaatttatggcaatgtagcttaaataaaactattattttcgtggcttggacgtaacatctaactagtatatatatatatagatttagtataaataaattgtggttttttatctattttaatatttaaatattaaattttacttaataataataataataataagacaaacaaaaattaaacaaaattctatttatcatcctttatctcactccctcatcatgactttaaccactagcacacaccaattccggcagcaaccctcggcgatcaccactagcaaacttcattgaccaccagccactatatgcaatcaaggattgcaatatattataaacgtaagttaattttatttatatttttcactgtaactttaagcctaaaaatgaaattaaattatgttgtttcttaagattcaaggtataatatgattattttaatacattaaaatattatatttgaattttgaattagttttatttccaaaatacatgtaataataataaactaaaaataattataacaaagcagcgggaacaacacactgcatcattcttgggaaaatataaactccaattgcattgttgatcattttaaattgtattttttatgctgaacagcttaaagaataattctacttagaacttgaaaatttaagtaatcttttttttcaattcgatcattttttgcgacatatacctagaatcttctgatttcgtagcttatttttcgatgagttgttaatatatttttggatagcatattgtgtatttctgacaacttgtcaaatctaaataaattattttttttctattttttattattttaacctgattttaattttttagtttatgtaataccaataatttatatttattcttttagatgttgtctaaaaatattgtaatgttatataatggattgtggaaaaagaataaaaattcatggaaatagatttcaattggtgtacggtcaaggtcaagtttggtaagttgtgcaaacgtgttaggaccaaattttgacttttatcattggtagtctgtgtaaattgtaattgcattttgggcttgaagactatttgtactaagttttgagcctaaggaaagtccaacaacgtgcgatgtggttgaccgtatcatgggtcatattggatgttggctggacgtcattactaagactcagactaggattagaattttggaattatttaaaaaagaaaaaattacactccacaacgtaattattaaatt

SEQ ID NO: 317487 - DNA, 1247 bp, Cannabis indica
atgacaaataaatttaggtagatattgtttcatattgtattaaacttcttaattatttttgtctatatgtttttttttaaataaaataaaataataagttgcacatttattaaatgtagttgactattcaaacttaggggtattactataggattgctttggctctatttgtatttgcatttaagggagttttcttcatagttatttaggattatattatatttttagaaatttttaaataatttatgttattgaaaataaaattttaatattttgttacttgttttactgtatttgttacatgcgtgataaatatatgtttttttaaaattttatttttagcactataaattatttgaatattttataaaagtgattttgttggataacatattgtctagtaatgttagtgacattggataggttatttcctacaaaatttacagataataaatttaccatatccaccctttgggaaaaatttcctatattaattagttctaataatgcaaaaaagaaaaatataagagaaatgtgggtagttttgaaaaagcccaagaccaggcccaggcccaggcccatttccaaaattcaaaagtcatagcacaacttttctggttctctccgtttactcaaatctctcttctccccagcatcagtttacccaaggaagctgccttttctggctttcttccattctgtcactaaaccctagaaatattatcaacctcattcactaactgatcggacaccggacatcggagatcggacaagaggaattctcgttcactcattcgccgaataaagaagccattacttcactcacaacaggtattacttacggttaagttttgaggctgctaatgaagattaaatacaatgacaagaaggaaattttgtctggttgtttgagttctctcactagctcatcagcggtaccctagaaatgttatcaacctcgttcactactgaccggagatccgagatcggagggtaggaattccgtttcaatcaaatgccggataaacaattacttagctcacaacaggtaatgtatgtacttacggctttgttttgaggctgctaatggtatattcgtttgcatctcttcagcattgttgttagtatcaagaaattctgttagacaggcatttattatatagtttagttatatatagaaatatttggtttctcttgaccctgatgtttgtatggagcttggtgtgactttgaccgatgtaactact

SEQ ID NO: 317488 - DNA, 2055 bp, Cannabis indica
gcaattgaaaaaaagaaggataacttgtgggtgaaatgggtacatagtgtgtacataaaacaaaaagcatggtgggaatacaaggctcctattagtggaagttggtattggagaagaatggtggatatcaaagaaagaattaaagattgtgtgcaacataacaccttctctgccactgaatataaaataacaaaggggctggtatggtttaatcagaattgggagaaggtttcttggtccaatgaagtttggtcaagattgaatattccaaagcatagcttcctattatggttagctatgcttaacagacttaaaaccagggataggcttctcaaacatggtcatattgatggtgctgaatgtattttctgcaatagtgttgaagaaacaacaaaacacctcttttttgactgctattttgctgcagaatgtcttaaataggtgaaggattggttgggttggcacacaacagattctgccctccctggtttgctgaaatgtacccgaaaagcaaggtgttcaagcttcaaaaaataggttctagcagctggtgtggctgctctagtttatttcttatggagagctcggaatgagcaattttggaatgcaaaataggtggtagtttctgagataatgcagcaagttaaatggagtgttaatactagaatagcacttgtaatgctaatgaaaattaagcaaaaagatagagagtggtttgaagtgttgtaaataatattgtatagataagattaaaggccttttggaggtgcttattggttgtaaagttgattgttttgcaatgaaatggctgattcatcagaaaaaaaaataccaccaattaaaatattcaacgatgtaagcttcttcttttacttacaactaaaaatcaaagaaactgattttaccacatattcattgtgcgttaacacacagaacaacatcataacaactactaaaatacctatattcaaatcaagaataacacatgtttgataaaatgtaggaatgcttgagaataacgcgtcaacaaccgaatcatacacactagaacaaccagcagaagaaggagagattgaaacagaagaaggtgacgacaaccaacttgacatagttgattgtgcaaatcttgttgctaaagaaatagtagaaaaactggaaaacaactgtaaaaaaaccaatctagaggttgacatcaacaacacaaagctcacaacaaataaattccaccctgaagttgaaaatggataggcatacaaggataaagaaaagctcaagagtgtcctgagctactatgaaatcattaacaacttccaattcaaggtatggaggtcgcgctcttaagaatgttgtttgaagtgtgtttatgaaagatgtaattggtctctacgagcataaaaaaattggctaacaaacattcacaatcaagaggttctcaaacatccaaacctgcccaataaatgttagatatgaaaaccaaaggtatgcaacaaaaaaattcataggataatgcatcaaacccaagtttctaaacataaagagaaaagaaacaccactagatatcaaaggagaattgaaatacaggtacataatcaagatgaactacttgaagtcttggagaagtaaggagcttattgtaaatgacttaagaggaaaagcagaggaatcatacagtctgataccatgtttcttgcacatggtgcaaaaaaaacctggatcagttgttgatttaaaaacagcagaagacaacaatttgttgtttgtttttatggctttgggtgctttaataaaagggtgcaaaatacgtagaccgataatagcagtcgatggtaaattcttgaaagcagcttatggaggaacattgctatctgcatgcacacaggatgcaacaggtcgcatgcattctgtgtcgctgattctgaaaaattcaaatcttggaaatagtttttcaaaaaaattaaaagaaagctatatggacgtcaaagaaaaactatagtctaattttagacgaaaatgagagcctcaatcaaagaagcaaagaaatataacccagaaatt

SEQ ID NO: 317489 - DNA, 980 bp, Cannabis indica
tattacaacctctaataatgatcttattagaacaaaaatttctcgtgacaaaagcaatcatagttgataaaaaaattaatgtaaccaagtgacaagttcaaatctaatgacatcatcaatgtcacacattcaacttgaaaaaacttagttgtttaactttataacttagaaattattttcactttttagaaataaaaaatgtcttttaaaacctaatatgaggtgtttgtcaaacaaaattaaaaacagttattgtgttgaaaaaaaaaatagaaaatatcataatgtttattttttttttatttcaaaaactttttttttttctaatatatatatatatttacatttttcctcacattcccgagtttgaggacagaaatggatctgagtttgggtttgggatcgagtttagattagggctggggatggggacatgtctaaggccgaggctggcgtttgggttcgaagtccgagttcgaggtcggggtgcgggtctgggtttggggtttaaaggccaagtctgaggttcaggtacaggtcggatccaaacagggccagtcctgggcataggcaggctttgcccgcgcctagggcccactcattttaggggcccaaatcaaaaaattaccttttaaaaaatatacatatttttttttaatatttttctaaaaatactattaggtctcgcgctggtatctagggtctgggtctggagtttgggttcgggacgacgtctagggtttgggttccaagtatgtgtgtaggccaggcttcggggtggcacatcatattcatgggtcgtgttcgtgtcgtgtcaaaacttaaatattttaagcaaatgtcaaacccaaacccgactcatttattaattgtggcaaaaacttaaactaaaaccaagtatgtttataaacgagttgacctaacctgactcatttaggtatttgataattattaaattaaaattggtatttaaataatta

SEQ ID NO: 317490 - DNA, 1098 bp, Cannabis indica
aattacaaacttgaggctgacagattcacaatgatgacaagtggggaccctgtttacgtggtggatgctatgaggaaccaagctaatgctgtaagttgacttttacctcaattacttaagacggaagccatgattattttgtttgtctaatttatttacaattctttccataggtgagcttggtggcaaagaagagttgctccttggtcaacaaactagcctgtgaacttgagttgctaaattgtgaatgttccaacacttaacaaaggagagaaaaggccaccaaagctttagcaaatgccaatgccaagataaagtccatcattaatcaaagggtcaatgattatgtggacaagactattggtcgtgggaagaaggccaacaaagttagaaaggatcgtggggagaggtacaaagagcaatatacttagtctctctctctctctctctctctctctctctctctcggattagcgacttagaggtagacctgaagcatgcaaagctagatttcaaagagtcagaacaaaatctcacccttttgtctcaagaatatagcaagcagactcgcatcatggttgaaaaaattatttttgaagctactctatagagaaaggtgaaacttcattcttacttgcaacaaaacgcagaagaagttgagaagaaagctgtcaaagaggccgaggaaaccgcagctgagttgagttctaccaaacaaaccctggctcaggcttatgaagaatccaagaaaaagacttcagagttggaggaccaaattcaaaaaatggcccaggagaagcaggaccaagagactaggacatcaaaagtgagaaaacaagattttgtctattctatgtacaccattcggaaactcaacaaatctatgatggatttttcaggatgataaagatagagaaaaattgatgccccgggttacttaaactagctaaacaagaagaagccaagaaggacagcgagggcagtggaagtagtcaatcctggaactttcctcctggagggtgaaaattgttggatatattttaccaggatctagatttactaataagtatgtttcattaacatcctagatatgaattc

SEQ ID NO: 317491 - DNA, 1191 bp, Cannabis indica
aataaaaaaaaaataaaatttttatgatatattttaaatgatagagttgtgatattgatattagtactcttagcaccaaaagtgttactatcccagccacaattcctttgaagaaaggaaaagaaaataatatgcttttgtggtaggtactttataatctacaatgaccatacaaatgacagtggggcctctttcactcttacccacaactacttaagacttctaatgtagttgtatcacaacaactacaactttaaatgattcaactatatctaatttgcatgaataatttgtcttaaaatttaaaaccttgaaaatttcgttacgaaacaacttacccatcaactcaataatactttttattctcagcaatatacatatactcattattattattatttactaaaaagagtgatattaattggcaatagagttgttcattcaaattggtcaatagcgatcaaaatttggaccgcaacaattcaaactaccatagactgtaattagtgagactgtcattggtggttcggttaatttggactacttattgctgcttagtttggttgtagttcgtaacaaataacaagcagttaaactggacttgaccgcttacatatataatttatttgttatatatatgtatatcttataaaaaaactagtaatttaattactcaaaatatttgacttctcaaaataattgaattgtctcaaaagaaaaaaatttaggaatatatttttttttttttgccttaaatgaaaacttttataaaagaaaaaattgtcccaaaagaaaatagttatggaatattttttttttttttgcttaaatgaaaacttttataaaagaaaaaaggctcctaaagaccagagcccaacccacaacgtttgtggtggaaacaagaagaagttccacctccttagaagaaaaaaaaaatcgaacaaagagaatctagttgcccatttgccaaagagtgtacaccaaacacagtagcattaacaggagaattaagaatatcaaacaactcaataaaaatactcttgatttgccaactaggcacacttctatgaaaaactgctttggcaagcactttacaatctgtaacgagaattgggaaaactcaaaaatgaagccactctcgttgccaaatgacctcctactttcccaagtatgaattaaaaatagggaatc

SEQ ID NO: 317492 - DNA, 1514 bp, Cannabis indica
aaccgaatcttgataaaactccaagagctcaaaatcctttcgatcaccttgaagagtgcttgaatcctcccgatgcaagacttgaaaagcaatctttcgaaagctttgtaaaaccttctcccaaaggttgagtgagtgaattctccggatccaggacttgaaaagcgatctctcgaaagttttgtaaaaccttctcccgaaggttgcactgatgttcttctttgttgtagatttgaatacagactcaagacaatacaaactacaaataaacagagtaagagtcgaacaactcttctctacaaaacaaagacactctttccttaagatatgaatacaattttaagtgtatgaaagagatacaaaacctagctgctataaggtgtatttataatcaatatacaccttattgacagcttacacacggtctgaacaagaccccaacccactagaaacttccctaaaataaatcttcaatcagcccaggaatttccatttctgtacctacagaatcgtgggcagtaagtacaactttccttttatagaaaaggaaagtttagctccgattttctcttcaagaaatctgatctaagaaaatgggaaactcacacaagatcagaatatacagctggttagataagaattaattgtgtaatcaaacttaccatttttacatcaatttccataaataggaaagctagacaactttccttccaagtttgaatacacaaaataaggagactattttaaatactccagccgaattaatggtgaaactctcaggatctattagtttgggagggagcttcttctacaatgtcgcactgaactcttcagttaattaatgtcactttctcgtaatccttcatttttcttttcttggataggatttccttcatgaacttaacatagcttgatatttaaactaaggcctgtgcgaatggaatattgatgtgcagcttcttgaatacttcgagaaattttgaaaactacttgtccatgctgtttgtgtggagcctttgcagataaggaatttttacattgtgctcaatgctgataagtggtgaagctttttttgatgtaagaccctcagtagtctttttctcttctagtgccagtgcttgttgatcatgaccctcttcttccaccgattgtttctcactaggccctcatactttttcccacttctcaaagtaattttcttataattttcctttaggtttacctctattgtactaggcaagttaccttgaaaacgatttgctatttgagtagccaattgtcccatctgagtttttaaggttttaatggaagatctggtctctattatgaactgaagtaacaaatatatttgaagattagagtctccactagaaccttgttgttgggactgttgttggtttttttagggttgatttctctattggtaggaaccttgttgctgctgatttgaagactgcccttgaaaattttgatgacgaccccctccttagttgtaactgtaacgtccccgcttc

SEQ ID NO: 317493 - DNA, 736 bp, Cannabis indica
gatcgaatttcccataaactctcgaccaacaagccatcaagaatttttaataacataatatgcaacttgatttgcagactgtttaacaaaaaataaagaaacatcacaaattaaccccaacaaatccttacattaatcaattaaaatttcaaaattggagtacatttgtaatgaactacaaataacctctaccaccatcaaactatatgtttcaaggccaccaccggcgtactagggtatgtctttaaccaactcaacacctttttgatgcctaatacttcatctacttttggaacgactttcccataatatcacctcgcatgagctgccactaaacaacccaacacatcacggacaacaaacccaacctcatatctcctttccccatcaaataaagttgtatcaacattaatcttaatgcatgaaatgttaattgatcgagaatcaactcatgtatctatatagaggaaatacactgtatatccactttttatttcttattttaatttttacttttattttactaatctttaatttatacccagttttataggtcatatccttattatgtgcattaggactctaattttgataagttatgtgaggttatatttgacactttgattataaaagaagttatttatcaattaaaattattttacagttaaatttagttaatgtgtaataacaaaatagcagttctcaacttatcccatctatatactccctacagcta

SEQ ID NO: 317494 - DNA, 2143 bp, Cannabis indica
ttaaaaaattaaaaaacaaaagtgttaccaaacgacaccttaagttatttattatttatatgagaagatgtatatatctatatctatgtatatctataattttcattttctagagatataaatttaattatagtgaaatgcatataatgcattgacatatatatatttatatgtcacgtatgtgctgatgattaaaatgtttgataatcagttttagcagttattgataatttagtagctaattaagtcaaaattttaaagtttagtagtattagctctagtgggtttaaatcaatctatatcgtttaccttttcttatatatagtggtattaggttaaagcacctttaacttattattatcatgtattataatttattaatacaaacctaaccaaaaacttaattagtcatcaaagacgtggttaatttgtgggaagataaacccttgtaatttgatttgaattattgatagtaaacatatatataatagatatatggttgtacttttaatgggtattactcatgtgtggttaaaattaaaaaattttggagtttttatacttaatttttctttctaattaaaaaaatctctcatttttatatcatatgggttgagattgttccatcggtaaaaaaaaattaaaaaaaaagttttaagcaagaaaaatcagaaaagaaaaagttgagtttaagttaaatttttttggataaacatatttttgatatagagtaaaaagagatatttttaattaagtagttaaattaagcatagaaagtcaaatatgtgatttaattattcgttattagatcaaaatttgatggtttaatatttttaaaattaatatttacagttaaatttgtttagtaattcatgggtaatacagtgttccatatatactaggttgatgttacgtgcaatgcacgtataattagtttttttttaattagattcagttaagtgatgttaagtacaatacatgcatgtttaattttttaaaattaggtaatgtatttttttatttttaaatagggtttgagattttgtttttaagaaaaaaaaaattaactattgttagattggtgtgtcatttagatatgattatatacaaacatctttttttagtttttaaaattttcctaattaagtaacgtatctgataatgcatatattgtaatttactatattcttaaccaaaactcacataattaaataaaatatttagataattttttttatttaatttaaaattaaattaataaatttaaaaaaatgaataatattttaagttatttaaaatttaaattttaataaaataatctactataatttttattttctaaatatatataataatattataaaattaataaaaaaatattctattactattaattaatatgatattctatattaaagttaatctaaaaattaaaaattattagttaaactaaaaatgggttaatataacaagaatgaatgataaaggagtgaaagtatgtttaattatttcttaggtacctacacaaatcaaatggatgcgacagagacatgatttcctaattatatatataaatatataaaaatgggtttcagtagtaattcataagtcttatagtactatatccatatctattatatatgtttgaaaaatggctagctatatatagtatcatgaatatccaagaattaattgagaggctcttataatttttacatagtatattatataaatcattcttgaaaaatgtgaataaaatagtttgtggtttgtcacattggttaggaatagaattcttctagtctaaaggctctacataaatattagttttaataagattagaaaaacacacaaatacctaccaatttaccaacatatagagtctctagtttctctctatcttaattttgtctctagtctcttattggtgatagattgaatgttcgttttcgagtttgttaaggtagcgaaggtggtgctttcgactgctcgataatcattgtatccttgaaaatagttcttcgctaatcctctagtatcgtttaagtaaaaggagaaaatttgcttagacaatgtaatgtgttcttcaatcaattaatataggctaattagtaaatttctcccctaaactttgacatgtact

SEQ ID NO: 317495 - DNA, 912 bp, Cannabis indica
tagctcaaacgagcatgcgatccaatccaatagttagccaaaaagagccactgaagattattgattttcaaggaaattaataagattggacataatttagaagctagaaatatatgattacctaaagagtcttggagaacttgagtaagcttgctatttctataaggaatatgtgtacttttttgtgcaagggcagaaataacatctccaagtgctgaaagtgatctattaatgtattgagcttcctttagtctttcaccaactgcctcagacttatcaactctctcacttccagccaaatccacaagatgtaggcaacccctaagaattgatcccgaaaccaactcttttccttggacatgaactgttaaaatactagaaaaaccgaaaaatatcaaactagttagaatagtttcaacaaaataattagcaaaattcaattggagaaactttcttcacctatgagaacggctgctcctctcgtttagagcggtcgcaccaactgcacgattcctttggccgattctcattagatcaagaacatcttgtgtacaagtgaccggaactaaacaagcatcgggtacattaaggccattcaattgagagttgtttcttatatctaatgttctgagttgttaaggtaataacaaaatgtgtgcaataaataaagacatgattttccaaaaaactatatcaattgttatgtaggtaccagcatcgagtttggactaaggcagagtaagcccgcgcctaaggccaacccaggagccaaaaaaatatacatactttttagtagttttcgaagatacaacatattttctttaaataaatgacccaataatttttttctaaggcccacttaatctcaggaccggtcttggtaggtactcgagagggactcgaacctcagac

SEQ ID NO: 317496 - DNA, 1454 bp, Cannabis indica
ttttgtttcatttgagtgacaaattgggtgttcgtatttttcagccatctgttagaaaacagcataatgctggctacaagcacaaggtattttttctctcgttaagtttgtaatcaaagttgattagcattaattacatcgaattttggtgttaattcgttttttttcttaattttgtgttttatcttaggcaaatgtacgaacctactatcagcagttcgaggagcaacaaacccaaagtttgattgaccaaaggattaaggaacaccttgaccaagctggagcttatcatcaggttggtgcggcttataatcaacatctacttgctcagaggcctcgtcttcctgttctaccaacacctatgatgccacacatgcctggaggtggaccaccaatgctacccgggatgattagacctcctgttttgcctagaccaggtcctggtgctccaggttgatactgatcattaaatgtttgcacttctgtttcagtcttttatatgatttatttatttattttgccaatttcatagctttcccctttctaaattgttcttgaatggcttattgcttgttggtgtacttttttgggatatagttttcctaatattctatttgaatacagcttttactgctggcatttctaattctctttcatctgttgttcatggcagtgtttcggtattttttcatagctatatattaagaccaaatgtctgcatttctcacttgctgtttagtttctatgttaaattgctctttactaattttctcttattatatgtataatgtacatacataaatgcatagcatttgtgtctgtataagtttctttgtagatgcattttttgttgaaatattctttaacgattattttctaggaggctatggtcttcatccaaacatgccaccaatgctggctcctcccggtgctccacctggggctcctcctggtgctccatccatgcctggccaattaaattctctcccgaggcccccaaccattaacattccctcagccattcctgggacagccgcaccagcttcttccatgggtgccccctcgcaggctccacctgggatgtatcaagccaatccagcaccaccatcaagtggaggctatgatagttttaatccaagtactcaggctacggactctaatcagtagacttgttaaattggtaagtttctttactttaatgtagtttaattttgcgtttttaacttagcagcaatggtttgtaactttgtatgggattagtaggcttaataagcatcaagttaagtgtgttagccctttttatgtttagttgttcttaattagtattgtgtgtgcagtgcaccattagtagaatcatgcaaagcaagagctatgaatataacacatagatgtcaaatatggtttgtacttagaattttattgattgcctttgggtaatatatcacattgatgaa

SEQ ID NO: 317497 - DNA, 861 bp, Cannabis indica
aaggataaatatgcattttgtttataactaagaataaaaattaaaaaaattaggctcaaaataggacaacaaaggataatatattaaggttagctttttggctcaaacaatacagagaaaattgccttaatcatctccatacaataaatatttaggatttcacctcaacaaattaatcacacaagttttagttatcttaatatcaactaaatcaaacaaagtctacatacacacataaaatcacaatatatattgaacaagtagaatgacacacatgtcaagcacacaatccacaagtctttcacacatggtaaataatatcaaagagtttagcataagttcatcatcaaatcccactggtcacaagtcaatgttaaaaaaaaaacatgaaaattgcctccccatccctaaacttaaaataaacagtgtccccactgtgcaataaaatcgaaggagaaaaaacaaaccagagcagctaggactactggtctatagctatatcactgccatcaatagcaagtggctcgtcatcattaccagtaggtggttggtatggtcttcagagctcctttgaagactggagataatcagtgtacaatgaatggtaagtaaaagtggcataaaacttagcctttcttttcaattcaactgccaagcggcatgtcacttactgtggccaatatgttgctaattttttttcacgtatttcacgatttattgactaaatcaaatataaaataacaaaaaaagtaagaattagtttgaaagtaaaaattaaaaactaaaaaatgaaaataataataataaaaaaaagtatggattgcctcccataaagcgctttgttatcgtctttagctagac

SEQ ID NO: 317498 - DNA, 988 bp, Cannabis indica
tttgttatcgtctttagctagactttattgttgcttcaagattcttcgttacggagctgtttaatcaatgctccactatcatcgatgtacacctttagtttacgtttgtgaacctttagaatttcacctttatcacttttaatatttacaaggccacaaggaagtaattcattaacttttaaaaaaaaaattcacctcaaaataacgttacttgtcaaggatttgaattttgaatgaatcaccaccacttgttgtcctattgaaaacttcttatgtggtttcattttatctcgaggcttcttagtcatttctttatgattagtctctcaattgacttcattgaagttacaagactcaaccatactgcatgtattcttagtattggcttgattagaagatatataaatgtagtcgaacttaacttcttcattattagcacttaaggttaggtgacctcttcgaacatctataagcgcacagttgctaagaaagggcgcccaaggatcaataacatattcttgtcttcttccatgtctagtactataaaatctgttaaaaatactaacttatccactttaattagcacatcttctgttattttcgttggataagtgaatgaccgatccaccaattgtaacaaaattcttgtgggatttacttcactaatacccaactttttaaataccgaaagtggcattaaatttatactagccctaagatcacataaagacttttgaaatttcaaaccaccaatctgacaatgaattgaaaagctgcctggatctttaaccttttgagaaaactttttctgaattatgccactacattcctcagttgagctcacagtttcatattcccaaatttatttttcttaactggcacctcttacgtaatttaacataattaggcatatgctctaatgcatcagtatgttgatgcttatatttttgacaatttccaaaaacttagcaaagtcctcatcaagttt

SEQ ID NO: 317499 - DNA, 827 bp, Cannabis indica
agatgaatagaataccgagtttgggcggcgggttatgatttttgaccattttacccctaggattgttttagcttaagtttaagcatcaagagcattttgatcattttatcagaaagatgtggtagcagtttagaagcttgacagcttggtttttttttttacttcaatttagcctaggtttatccaattatttgttaaattaaaaattaaaggaaaaagaaagaaaaacacaattttcctacacctccttctctctctctttgagcttcctttgtaccagaaagaacttcagtttttagcagtgattttggaagggttttggctggattcaagtagagaaatcctaaggtaagaaccctattttctctttttgaagtttttaagttgttagttggttcaagcatgttgaaattgagtttttgctactatttgagttagggtttgtacttgattaatttctagtgatttatggagtttttctatgtctgatttcactggtttatggaattgttctaggtctgattttactggtttaggagcttgaatctagggttgagcaagtatgagttctaagaacttaaacttggctcaacaatggcatgtttggtttttgtgtatgtttttggttttcactgcttggtttatgttgtttgaggttattataggtgttctgaaaggtttggtttggtttggatacgaattggacaatgtttcgaattattttaggttacctagtgcaaaccagttaacctatttctcaggtcctataaaatcggttagccaaatcagaatctagtttcccaaattttttgtgttgtcaatttgtg

SEQ ID NO: 317500 - DNA, 3342 bp, Cannabis indica
ggaatagctttagccattacaatgttctcatctctatattaaaaacatgtacaactaatttattgataattatactcatatttaatccactccattagaaacacatacaagtttaataataaatttacaatatactttaaaatagataatgactcattacaatatataaatctctcttaagaatggaggaatcaaatccaaacaataaactaggtgaaatatttgatcatttttattttgttacaataacatttagttttttttttttttttgtagttttttatctttttattcttttcaaaattatttaattgcattatttactattaaattttaaaatatatttataagatatatttattaatttttggtttaattttctttttttcgtaaaatcaaagaataatttaaaaactatcttcttcttttttaatacatcaactatatagatttttatgctctaaataaacttcattcctacaccaccatatgtgatatattgttgccgcaagtgttgttgaaaaaactttgtgcctcaaacctattaattttagctctagaaagccattgcaacgaaccaagggcgatggccaaggcagtagtccaaagcaactattgtttaattccattcaacacctgaaaactcaaatgaccattccaaagagaatgctcagagcttaattgacatttgggtgatcgaaactagtgcaccaggttgattatcaacctaggcgatgggcccagcaccaggttaacctcggcactggactcagtttccaagcccttgtggttgttattttctcacagagttttcttgtatcttcattatttgagatgacgaaaaaattcccaaaatactttttgtgaaactgattggaactgacatgggttgacaatatgtcaacctgggcgctagggccagtgccaggtgtcaacttgggagctaggtcccagttttggcctcttggaagttccatttggtccctaaaaatagttaaatcttatctttgctgaaaataaagaatatgcctagaagagttctcagaaaattgggcgctgggccttgcttctggcacccaggaagtgttatttcttccctgtaagtacttgtttctctactttttatgaagacgaagaagatgcatgactcaaatttttaatctaacacttggaaggggtcttgattgacaaaatgacaacctgagtgctgggtgcccaagcaccgggtgctcaaaaatgaattttttctgaatctgattctgatgcctcgaatatgtccatgaagcaaagttttacccattttcactaagacaatcccaaaaactaaaaccctagatgaagatgtcaaattgggtgctgggtgaagccctaggtgtccaggttgatttttggagtgtaggttcatgtaatttcagctcccggggcctgaatttgattgcttcatgtcttcatggtacataatactgaaagatagtgagttagaaacgagttattaaaattctggagtttctaaagtcatcctcggcgcaaggctatggacccatcctaggtcgactgctatgactcgagactactcaacttcaagtggtcatctttcttgccacttgttacacattgatgtccacgtctctaggaaaagttttttggttaacaagacttaccctaaaatttatattcatttataactcaataatttgtattttatattatttgctagggtttctcttcctaaatccttagccacctgaggtttattttttttttctccgatcctccttgggtttaggcgtggcttggttagagtttgtattttgctactgcgattagtcttgtctctgtgacatagttttattttattttattttgctgttggttcgtctttttgttcttcgatgccttgccatcaaattattgttagtggttggaaataacaagttctttacggttggaggggttgttagtggtgcaattacgtaccttgctcagtagttgaatgtccaagttaaggggttgaatgaacttgctacaacagatctactatcgtgtgttttgagcggtagagtaaactaaatataggtattgttaaggtcactgtgatgttgtaatctttttcatttgattttattttagtttcttttgtaaaatgatcagggaattagatggctgattagttggctcgtttttgtgattctaattcctagttgtgttttcaattgatgagatatccaaattgggttgtagattaataaaattgcataataaatatagaatgataagaatatttaggtcaaagttacaataataaattatgagaaaattgtagcactttataaaaggaatgtacgaatgcatcttaacctgttttggcatttgaaataatttttcagtcaaaatttttctcatggtcatgtaagttacaattatttaagacatcttgtaaaattttaagaaattcaaaaaaatttaacacattaaaaacaaggttcaaacagtatattgcacacgtaactattttattttatgtgtaaaataaattatttaaacattatttttcacattgtaaattattttaaatttcttaaataattataacgtacataaaaataaaaataaaatatgattttttttttaaataccaaaataaatatatttataatctttataaaaaggtgctttattacataatacatatatagcaaaatacatagcattttccgtgtgtattgtagtgaatgaaaaggacgaaatctcttgtactatatggacaaaaaaaaaaagataaattcttttaaatttttaatatcacatgccaatgccatgaacaattattgtcctctcaaaaaaaaaaaaaaaaacgttagttgaaccattatcttttttaccatattatttatttatttatttattttgtaaatgaatctctactatcaacttgctcataaacatctaaaaacccacatgctatcattgacaaaagttcattcgtggactaaataaaaaagaataataaaataatgaataacttcatttgaagtcaataatattcccttaaaataatttaatatgaataattattatttttgtttattttttactttattgatttgtgtttctattctataaggctctttaataatacctcttatatggtagtttttcattaattttttttattttattgttacatgagtaatacaataaataatagggatttttttatttttacatttcaaactaattttttttttacattgttacgaaattctacatggaaatttctattgcaaatagcgctgcaacataaattgcaacaaaaaatcatatagaaacccctattgcaac

SEQ ID NO: 317501 - DNA, 1802 bp, Cannabis indica
gcataaaacccaacatagacttgatacagtgctactcccacgaagacgagttaacaagcgaaagttttagaatcaaatataagtcatttccggaacaaaagaagttataacgcttcaagtcaaaataaagcaacaaagaagaggaaaagtcatgaattaagatactctgagtatactagcctagttgatactcgagaaaatgtttacaatgccaattgtaacatggttcagtaaaaacagcctctagcaatgttcaaaggtgcaagacataagagggatcagaataagaaatgtgaatatcacggagatgttgggcataccattaatgaatgcaactacttgaaagatgaaatagaaggaatagttaaaaaggatcatctagccaactggatcagaatacctgtcatatatcccagacaagataactctttattcatggacaataaggagttgtaaatcctcctcagcgagtaggttatcctcaagctctggtgtacaggctcaagtgccaaaacctattgttgctcccagacccaaaaatctgtatccacccagaattactttgccaacattagatgcaaacttggtaactatatctagagacccacagattactggaggcaatacaaatgctcagaagagatatcttagtgagctcaatcattaaaagacgtgtaatctcctacaaacaactccttaatgcccgtgaatgatgaatcttacaattaatttcacataagaggatgctaagcacgtgcattttccccatagcgatccatagtaattgaagcccaaattacaaataaaaaagtgtcaagaagtctagtggataataaaagttttattaacatcaatgctttaatggagattccttaatgccaatggaaaatattcaacttccagtcacactaaatggaggagtatccgaaagcaatacaacatttgccttcaaatattgcacatttgtagtagtagattgccccactgccaacaatgtcacactaggacaaccaatcttagtagattttagagttgtaacttctatccaacacatatgtatgatgtttccaaacaataatgagagcattagaatagtgaaaggagatctaaaaagcacgagaaaatgttataatttgtcgtccaagatagtcttcaaggcttgggaagagatccaagaatatcccaaagcacccatccagcgaagactggggtaatctaggaagaagacaagttagaccctagggtaggggtagaaagagttatttaacccatggaggaggtagaagaagtgttcgtcaatgaagaagatcccactaaagttatcaaggtaggaggaaatctacgtctgaacatcaaagaaaagattgtatccgtagttaattagaatagtgatgaattggcatggagttattctaacatgatcgtgatcagtccccatgtgatctgccatgctttgaacattgaagaaaaggtatatctagtacgttaaaagagaagaccactaaatctagttcgatcagaagaagtgaaatagaagttgataaattaacaaccatagaattcctctaggaagccttgcatccaattaggcttgccaatcctgtattatttcaaaagcctaatggaacttagaggacatgtattgacttcaacgacttaaataaagccctcccaaaagactacttctcgcttcctcggatcaatcagatggtggatgccacatccagttcagggccggcccaagcattttgggggccttgtgcgaaattttaaaattgggccctttaaaaaaaaaaaaaaac

SEQ ID NO: 317502 - DNA, 860 bp, Cannabis indica
ttattttaaaattataaaaaaatatttctcaattttgaaaaaaatcaaataatgaaaaattatttttgttaattttcttcttgtttacattcttttctttcttctttgcgtttctccttgatttcttttccaaatttttattttcttcattcttcatcatattcttcatactgccaccatcaccaaccattacctatataccacccaccatcaccattgaacccaataacccaccaagcaccgaaaccataaacaaaaatccagaaaccaaaagcaaaatccaaaacccatataataatccataataaaatgaaaataatctaaaaccaaaattatatatttgaatctaactatatacatccatttaatttataatgacatggttaattcaagaaaaaattaaatccaaaatgaaacaaaaagaaagaggcatctgagtcacctctaactggctcgccacaaaaaattcaaagtataataccctttttccttcaaccaccccgagtcatcttccactgggcgcaaaagagagcaatgaaggtggtggtctcactctttgtagatcgggctttctcgactctgcttgagagcaaagcgtggctccgagaaagatttggtgacaggagaaaagacggtctgatctaatggtgagcaacatacactacagatctgggtttgattctgcattggagatcattggagagagaggtagttgcagagggagagggaaagtgcggaagagagttcggtctctattggaccagtcgtccccgggaagggaaggcgtaacagtcagtagtcccgtgatccgtaaggggaaataccgggtaagttgtgcaatctcacaccgcctggggaag

SEQ ID NO: 317503 - DNA, 1474 bp, Cannabis indica
ttatttgttaaaaaatacagtcacaactcaacacactcagccatattgatcgatatagatattagattacttacaaactaacatgttactttatgcaaaataaaattaaaattaacaaactacacaaaaatcataggtaaaagtaccaatttactatttgaagcaacaacaatgtctaaaattcatcagttatgttagtttatgcaaaaatgtaattaaaactcaacaaagtataccaaaatccaaaataaaaaaatcaagttactttttgaagttctaatatataaacaagtaggttacttttcaaattaacatgttattcaattagatatattattaatacatatgtcatgatttattttgtaaataaacatattactttcttcgtaaaattctatcataactcaacaaattcaacaaaattcaatttgcaaggtagcaaattacttctattatttacaacttaacttgtttactttaaaaaattaagtaaatgattatatttagcatttttattatgcttcataaagctagcattctcaatcaaattcaatttacaaggtaacaactcatattaagttatttctacacacaaaattcaattttgatggtaccatattattttataaagtgaaatgtaatgtcaaaatacatgtattagattgcttttttagataaccagattactttataaagcattcaaggggttacctcttttggattcatcaaatattgctaatatttgatgagtatatcatatacatttatcaagacaaatcacatggattaaactatttaatatgtataagtcatggttatttcatatttttcaaagtaagaaatgttacaaattattgtaccaatatgtaagtatagtatgttttccaaagtaacattgtagatttataagtcattattactttagattatttatcttagattagggtaacttaatagctttaatttgtagatttagatttacctaatagtttttattgtttggtaaggtagatttacctaatctcatattcactcttatagttctaggttactttttatataatgtacaaggctctttcattaattgatccaggttgctcactatgtgattttccaagcaaagggatttggagtaaaataacactatattcttgtacattttaatattaaggagagatgcttggtggtgtataattcaatgactcagaagaagaataagaaaactattgggaaaaatattgaggcattctctgtgttgattcttttgtttttgagtgtattgacttctataataggagagcagccatagactttaatcaagatccatatcactactacaaaaacaccccttagaggcggtttttaagccctttaggcgtcggttttcgcgaaattcgctaccgacgcctatcagggcgacgctaaagggtttatatgaaccgacgccatatatacccctactggcgtcggttcc

SEQ ID NO: 317504 - DNA, 1439 bp, Cannabis indica
gcaactttttttgaaaggtaaggcatatacgcataaaggttcacttttggcttattgcattgttagtggatagtaaaattgaaactctttagatgatgccaagaaaaaagatgtcatatatgtagttatcttatatttgatagtctttttgttttgtttagttgctttttcgtgtgtgtgaagtcgggtggtactttttaaaatttcaaactcaacattagttacaattatgttgtgtttataaattatgttgttaaaaaactatggttctacttaaggaattaaatatagtttgggcagtgccaaaaagttgtttggtggtatttaagggtcttccatggtagtaaagaatgttaaattcactttggaattgactgttttcgcactggtttgggttatttatatcgaggaaccgagataacttttaagaatgtatagaagtatgtggattagaattaaacaataaagttctttataggcatctattctcttctaattatttacataattaggcactgagatactcaaaataaaaagatatactcttaatgatttaatagttataaaaggagtagagaatatcaagtatagcatcatgcatggtcaagtggaagagtacgaaatagtgaaattttatatttaatatgccgaacatgatttataacccttttgtatagttagtgtcatcaacctaagattgtgctaattatttcacatgtgattcttattgcttactttacctacctttaaaggatgttagcttcgagatggtttacttgtacactctgcactgtagtttgggggacaaaattgttttgctactggatccttctatttcaatgattcccttggaagatgtaagtaactagttttatccatccttgtttttcccttgatttcattgtagttttgatgctttgttccttcactaaggggtactcttttgactttgtcaagggggcatgcattgatgtcaagcttgcttcagataagatatgggtactaaaggaaaatgggttggtagttcaaagtatgtttcataatgacataaatgttgatgtgtaagttcataaataagccttatagtctttaaatgaccaagtttccaactatatttttatcttagctcaagctttcttttgctaacttttgtagggaggagacaagctattataatttgcaggaagaatttgttgctgatcaactatttcaaagtcctgagtatttatcggataatcttttattgatggctcattcagtttttccatctgctaaggtacttattttttagtcgaaagggacaaaataatttgagcaagtctttagaattaagggtcttctttgagattagttaatttcttgggttctgttttgtgtttcgaaaatgttagcccaagatatgtttccaagagggagtgaattggaaatttaaactaatt

SEQ ID NO: 317505 - DNA, 871 bp, Cannabis indica
tttctcacaagttaatacagcagagtaggctattaccaccatcacaggatcgaacctctataacaaattttatgtgcttattttgcttaatcattactcaaattcatgtactttcaatcgctttaattgactcaccgtcgttggccaaaagtgagatcaacaattataatatgaaatggtttctatattaaattattgcttttattattttacataattggttctacagtttaatttttaatttagttaatcaaataactcatattttaaattaattgtgaaatttcgtaaaataactagccaagtaacaaaaaaagaaaaaaactgtacatgtattaatatttatgatgtattttttatttcttagtgttacaattgaaaaaaatgctagtcatatttaattctacaaatataataatttagatcttgacacaatcaaacaaagggtatactaaaatagaaagataaaaatcataaaatatgtcttcataacttgttttttgagtataggacaaaacaataatttgttataactactaactttatcttttctcatatatcttttgtagttttaatttagtaaaaatttaatttctgcgtttcaaagaatgtataataacaggtaaactgaggcaaaatactcaaatttcaaagaatgtaacacttaaagaagtaatctttatttttggtggaaaaaaaaatactaaatattagttaattataattttttacagtagagttttatttgaaatgttaaggtataacaattaaataattacctttttattgaagaaaggtccttgtgttgatactgctcttgcttgtgccttcattgttgaacagtattttatgtctagctttgataggagtg

SEQ ID NO: 317506 - DNA, 961 bp, Cannabis indica
acttttgtaactctattttgccgcttaggtcgggtagagaaaagacttgcaatatgttgtaaaatatttttgagatcccgaaacatgtaattttttattgtaaagttaaatttattacaagtattattttcaatctattttttattaaagtttaaattacccttgtttatccttctagtaatcccgtttaggggattaggatttcttaatcaccttgggtaacgtgcttaattttttagggcgttacaataaatatagaattgtacttttagtaattatagaattatatttattgagtttaactgcagtgtgtattgatataatcaattctatttattagccctccatgtgttggtttgtaattagttttgatcaaaatactgttttacccttctaattacttctttattctttagttctattaattaactagtgggagtataatttaaaatcccatctgaattggtgcacaactttccagtttcataattaacacataaatggaatcaacatttgatttgttaggaaagtcaagatttcataattgtacatcatattttcagccatccatattattagattcccaaaacagaagttgtaagaatcatccatattatgtctatcttacttacgtccttcttcattggagcaggtttttgttggaaatattttaccaggatctagatttactatcatgtatgtttcattaacatcctaatatgaattctaaaaacaatgaaataaacacatataaagtttaggaaaccttacattgggtgcagcggaatataatgactccttccgtttagatctctagcccttgattcttttctgtagctgagcatcaccaagatctgaacctggatctctttctctccttctttgatggttggattctacacaatcttccatactatgattgagatactactgatgtgtgtgggcactactcttattcact

SEQ ID NO: 317507 - DNA, 768 bp, Cannabis indica
tttttttaaaaaaataatatcccataaaaatctcttattttggtttaattattgaaaataataaaactattttattatttattaattaataagtaggatggttattatttgaatccaaattcagataataactatcctaattatttataaaataaacttcattatttatgttgacctcagaaattaatccatgtgttacacatattgaactagaaagtaaaagaacacaaggattttcatagaggttcgacccccttagttagcggtcaatgacctaataccatttttgttatattgatacagagataacactattcagataagtatagttgagacctgatatagctctcttaaggttacaaagtatgaatcaaaaatagaaaatcacaagtgttgaaagatgctatagtggtcgtgtgagaaagagagatgaagtgaattattagacttagagctttacaacataaatgagacttagagttttagggttgagttaaggcaggctcttcatataagagagcttaaaccctaattagcaaataaaataagagatatttacatattaaattcttcaaattcaaaagaatgaatgccccttaaaatagatattttttatctactttctgttggaatttattttacgaggatcctagatctactcacaagtatgttgatttaacaacctaaatatgaacttctaaaacgataaataaaacacataaaaagttaagaaaccttacaggggtgcagcggaataatgtgtctcct

SEQ ID NO: 317508 - DNA, 793 bp, Cannabis indica
ttagatattaaattcaattacatcactgtgacctaagttgaaagaaaaagaagtagtggttgcaaactttaatttttcatcaaagcttagctaaagtgatccccactacacaaataacatgttcgaataatagagtaggggccataccttacagatggacctcttgaagatgactttgtctcatcgtgttggattaggaggcgattaattcacttgcataaagtgaagtgaatatcactgtgaagcaaactttctagggaatagttgctttgttatcatctcagatgctccctgttccaataccttggtactagcagtggattcaagtgacagacatagaaaaatccaacctgttcgtctcaggttcaaacgcttctatgacaatataaggtccctccctcttttattgggagtctttagtgtcactttctttggaagactcataagacacatattcattactgctctcctgttcttgataattgttggaaacaaagggagaatcttcgccacttgcccctctcctaagttgtctttgggagtagggggactcttcatcactactttctttctcgagatcttctggataaatagcaggggactcgtcgttgctatctccctgctcgatttcatctttggaaacagaagaggagtctattgcagtgcagacattagctgttgatctttcttcaccttcctggtcaatgtctgttcgagactcaagaaatagataagcaatgtaatcagttgctcctggctgagcaactcctctgaccttcttgatggcttcttc

SEQ ID NO: 317509 - DNA, 630 bp, Cannabis indica
aacactcacaagagtttctctaaaatagagaaactttaaaaaaatttaaagaaccatactaaaaatacgctatagcagatgttctaaattccttcttcattttaaagtttccttaaaatttactattcatgttttacatttatagaatactattcaatgctataaacatattttattattttttttttggattttaataattatttttgtatgtgcatatattaatattatatatttgaaatgaataaaatatactaaaatttaaaaaaaaaatgatattttggtgatgtattttaaagaagttaatgtatggtataatgtaaaagtttgttgtgcaatagaaaaaatatagttttagcgatgtatttaaaaagagaatagagcgttgtttttatgatatattttaaagaatagagtaaagaagttgtttttagtgctctttacagttagtaaaaaaatttggttcacaattttattgtaaattgtatatacaattctataatggtaatgtattcactttttgtgagttttaaaaaaatatatatttaattttttttttatgaactatagttattgtataggggaattattttatatactactttttttaactttttttttttcaaattt

SEQ ID NO: 317510 - DNA, 1381 bp, Cannabis indica
ttttttttttaaatttcaaaattgatagaaattaaatgagtgtaaatacattatcagcggagtataaagaaagtgttgactatttcttggacttttgacagtgtaaaaaattctaaattggttgtttgttcttatcttaaatgtggtaacatggaaggtatgaatactactaaagataaatgagcatttatttaggaacgaaaaaacaagaattataagtttgttttgtaatactttctttcttttgctttaataatttcaatattactaatcaataatttctttcttttgttttacatggtagattcaacaccttgtacacattagattaatcttttacgtaatcagagggtaaattacgtgaaagcagaggtgcttggacaaggaaaattatgagtatttattactattccacaccaaaccaaacgtcacttaatttcggtcagtttgattcggaactccgtgctcgcttggctgcttcatgtaacttttcacaaattcttattcgtttcatctttgtgaatttgttgtgttagattctctaataaattagatatgtcatgatgagatggcaattccttttaaaatctacttaattagattttaatggtcttttttatcaagcagaaaacaccactcaaatgtgacataaattagagagagtttgttggaaatattgtgaatattttaacaaaatatataagtgtcttagtgtgtgtgagttggaaagagtcccacatgggatatgaaccctcattgacaagggtataaagagtgcaactttggcatttgggtttgggccccaaggggtacccagttttgtgcgaatgggtgaggacacacacacttgacccaccacacacgcgcgcgcgcgccgtccgtccgtccgatccgagtcgggccgggttggttggtgtggtgtgacacaatattattttttacagaaaaattatttaataaaataattattttttatttattaatttaattatgaaacgtgtttaatttcaaaggaccaccccacgttatgtttattcaatccattcgcctatataatgcgattgaactgatgggaagaaaacatctctttttcgtatcagaaaaatacagtttttcataaaattaacaacgactgggctgttttatcctgggaacgaccgacaatttccgactgcttgcacactcctgggcagtgccgcgaacgtcttaaagagagcgacttagtccgcgactcaacccagaattcttcattcggtaatatcgttcctcttttattttgctagcagtttactcaacaattttaagacgttctttctgctatgactactaccgatgaatgttctggttctactgctgatattaacaagccttttcgttttga

SEQ ID NO: 317511 - DNA, 1318 bp, Cannabis indica
gtccaggtcccgggtaccgggtctgggtcggagtctgggtccggggttctgggccgagtttgaggtccgggtccgagttcgggtccgagtccagggtccgtgtttgggtttgggtccgggtttgggtccggggtctgggtccgggtccggggtacggggtccggggtccaagtctgggtcctgggtttgggtcctagtccgaggtcccgggtccaagtccgggtctgggtccgggtccgggttcgagtccgggtctggggtctgggtccaggttctgggtttaggccggggtttaggccagggtcccgggtccgggtctaggtccgcgtcagagattggtgttgaccccaaattctttgtaaatattataatacaacatacattgtattaaaaaaattggtcgtaataattgatataatacattgtttaattcaaacatagtgttatttattatttaatacaatacgacacttatacagcgtaccaaatgagcctttaataatctcaatagttcgaaaaaaaaaaattagaagatctaaaaaaatttacaaaaacataatttaatatatgttcagaattaagaaacaaaattctaataagcattttcttaatttctcattaaccttgttaaaaacatgaatagaattgtatatgtgttatgtatgtgacctttcacttcaggcgtacataataatactctccaatagcccccctttacgctacatttattcacttattttattttattattatcaatttttaccaacctatagagcaaaaatagtaatgtaaaattactgcgactgctgccaaatgccaatgccatacacaatattttaataaataaaacaattaataatggaaaaaataaaataaagaatgactgacatattttgctgatctccccattcaaagagcattatatcgatttatgtgaagtgatctcaatcgttgattttgttaagagagaaataataagaatgaaaaaatgaatagtccattttgttggtgttcagatactgtacactaattaaaaacaaatactgtccaacaaatagttattctttttgaggaaaaacagtttttggtgacgttaattataagtatcacttcctatcaaaagtcaatgttaaaaaataaaaagaccaccttccaactcaaaaacataatgtactcttatttgataaatttatatgcttaatttgcttataactactaatttaaacattaccaaaaaaaaaaaacaaaggacttttgaaatgatagagagtgggtaaaaagcttttcaactaatataaagtgtgatacaaaattaagt

SEQ ID NO: 317512 - DNA, 901 bp, Cannabis indica
ttagcacactaaacaatgataatgttgtgaattttgtattatatttaatgctgcatttataaccataaattctcatatttaaaatataaatagaaagtgtcattaaaaaaaaacttacaccccacttaataaaatcttgggttcaatcgccactacatataatttaaaataatagtttgtatgaaatattgttaccaatcacaaaacgccacctctaagtagtgttaggcgccactaatatctcatagcaatatttaatatcaaatcatgtccccccaaatgtttcaaactgttaattttttttttctaaactattgagattgttagattcaaggacttctattcaagtctgttcaattttactaacgtgccaataattcatgcattaaatcatgcccttagaactttgatatgtatcaaatcttatcactcgaattttgacatgtactaaattgtgtctattgaaattttatccacgtcaggtattcgttagtaaaattggaaggaagtcattgaatctaacaatttaaatagttcagggagaatttttaatgacttaaaaagttcgggagtcatgatttagtacatgtcaaaatttaggagacaaaaatcctaattagccattatatttttggcaaactttctgattgagcaaatttacttggattattattcacaaatttttctcacttgtactctaggtgtactcttttcaaaagcaataatgaagagattttattaaatttttccaatttcgggttaatggtttagaagagaatggaattttttgtaagtaattaattatcactgttttttaactaataaattcatttgggtgtttgttttgagttttggattgaaactcaagtgtcaaaatgagttgatattacccattaaaaag

SEQ ID NO: 317513 - DNA, 1824 bp, Cannabis indica
aattaagcatattgtacttttcaactcaattaacattatcgaatattagttaatataatttatgcattatattattcgatcacttttttcattatgaaataataaataaaataccaattacgccctcacagccatgtgttttattaaatgactcttaatactttctgttttcagctcaattttgatcaaatacaaaatttaccaactttgaaatgtttggcctagatgtgaactcactattgaaaaattaaactcagttaaaaaattataaccaaaattaaactattgtataaaactataaatttagagcttgtttggtacgtcatattgtattgtatttgtaacgctctaaccatatataggcagagctaggggtgttgagggagggctaaagcccaccctgagatttgaaaatatattaatatacactttttgttttcatatatgcatagtagttaaatagaataattcgttaagatgttttatatttatatgggagacgatgttttgaatcccattgtccttttctttctagtgtatatctactttttatttattagaaaaaataaatgaagtataagattcaaattaggttcaaatttatgaccactacaatatgagaatgttgctaaactatcattctacttaaatttagctatttatttattatattggattatattaaatgtataactaaacccaccttaaaattcaatcctaggtctgccactggccctaacaataagaacgccacaaatagtgactaaacataagttgatctcgctataaaccaaaattaataaagctaagagcgaaaatttaaattttaaaacaaatacagagtgaaactataacgtgcaataatttaactttacaaacattcaaaaagtcacattttgtatcgggatcccgtaaaaacttttcaaatattacaagttatcatttcttgccgacctaagcgacaaaagctgagactacaaaatattttttctggtaaaattcaacaaaccctcgtggtggtctagtatggcccaaacatgtacaatacatccccaagccctcgaactcatggttgatcaacaacagatttatcctttcctgcatagtagagcacccgcgagccaagcgcaacaagacagtataaataataataatacgcataataatcaaaaatcacataattattgataccactgcgtctatcgtctatttgacatagacctacgtgttatgctcacacatctatttacaataaggccttagaactgtttatcttggttctaattactgagtctaacctaattatgccttacgcgcataactctttatctcaatatacacagcatagtattgcattcaaaatcacttaaatactagagtaataaccctacaccacataactgcttattttagggtaattataaccctaatcccaatttctcacttaacatatgcataatagcatacatgagcgccacaacccttaactctatgtgctagcttactgtcttacctggtaatcaatgtatatggatatttcaaatctctaggtgtttctgagcaagcactggtaattcatcacacgatcctgagatttcacaaatagggttaatcccaattttaatgtcacatatacacataattttcattctatttacagattaacatatagagctcaaaacgagcttttcaatgatattaagattaggggtgttcataaaatagtcgatccaatccaatcaaatccgcaaagtgcggatattcgcacttgtgcggattggattggattggaaaatttaaaatccacacttgtgcggattggat

SEQ ID NO: 317514 - DNA, 883 bp, Cannabis indica
tagaaaatgaatgtaatttttaaacttggacacaccctgcattaaaagtattctattaaagatacactttcatttctctgttatctaactcaaaacatgaaatttgaaatgagaatcagtgattcatacacgaagaagatcaaccataagagtttctcttcccgagcctagctaactaaattgactttctttggttgccccatttgctcccacaagcacattaccaaatgccaaccatctaaaacaatagttcaatatacaaagtagttcattataatcaactttcattactcaagtgaactaacaaacaagaatgaatctcaaacaagcaaattatctctccaaacatctgactcacttcagaagaggtgataaaatcaccttgtgcttcaaacacatctcggctaatataaaatccagctttaggatttgtcaaaacttcctccatatactcagcaatcagattggaccaccccggaactaataaacaataaacataaaaattgactctaatgtaaattacattatgcaatggctctaatgaaccatctcagctgattatggtgaaatcataccaatattcactaacatagattagcattttgcaaatgatagagagtcatatgatccatggttactcctctcataactaattgattttgagatgaaaccaatatatcctaccattctaacatatagtatcagagtcaactactaaaaatccgaaaatcgaatccaaaatagagagccgaaagagttattgtaattttgagatggaaccatccatcttataattctaagagcatactaacttgagatgataattgaatacacaaataatgcatagaattaagaaaagttaggaaatgaaacttagatgatg

SEQ ID NO: 317515 - DNA, 1270 bp, Cannabis indica
aaaaatctttcttatatataatttaattggttgctgaaaacctcggtcaacaatgccaaacgtgcactaaaaagtcttaaaccaaaaaactcaaaacttcgccactgatataattccatcacagcaaaataagaataaaaatttaagaataaacacagaaaaaaaccaaccctaaattcaaagatgcaataggttgcctttcatagtcacaatgaaaaatcaaaattattgacctaaatcccacatcacaaaaattaataacctaaattccaaatctaaaaatttgttgttcaactgaaaaatcaacatacaaatttctatttaaggttggactttgccgtcaaagtttggccttatgtcaaagctaggtccgatcgaagctggtggtcgatgtcagtctcgtagccataaatctccaccacagattagttgcgtttggtagccatgtatctccgtcatacatttggtgccttcgagttcagtttagttcacaacacttctcattcttagtctcactactctaatgacaccattttcaactcagctgctgccaccacccccataaccacgactccaatgaccttccccacatctcagttcttattttgaagaagatattattagggacgagaaacttgtctagagttagagatgatcttgatggggaggaggcagaggtcaaggggaattttcggggtggagatgggtgaatttcagagaaaatagtggatagagtttaagaggaagagaacataaggaggaaaggggttcgatttctaggaagaagaaaaaggaaaaaagagagagaaagatagagaaataattattttttagcttattttattctaatttaaaatattttaaattatttttataacatttaaattattaatattaggtgaaccaatgaaattttgccacttgtacacttgtgtatactgtgggagtctactttggcactgaacaaaccaaagtggacggaaggagtacaaagcaaaatgattctgtagattggggagttcagccctagttatttcagtctagggggttgttcgtgctaaacttcaaagtttaaggagtttggccgcaaattatcttataaaatatgagtcatgttatgccataccaatattcataaggtaggcctactatttttggattgtgtttggattcatgttgtactttacttaggctaactcgtttttccttaaataggtcaacacttatacaagctctcatgctccactattttattttttttaacaattaa

SEQ ID NO: 317516 - DNA, 783 bp, Cannabis indica
ccattattaattttaaaataataactaatctatcatggagtagctagagcagattctatattagtttccacccccaattagtgcattttaagatgcacccatcaccaccaactaataaggccaagtaatgatagtgaaatataatttatttatttatttttgtgcaaataaaatgtataacacatatatgataacaaaccttgtatattcaaataaatatatacactcatatataatattgatcaaattatgcaaattaattaacccaataaaaagatatagaagccgccttcacacccccgtaattaaataaagttatatgaactataaaaacgtttcatacgttggtagtttgggtattatatatctaactttctaacccatatcctaagcatataatataattttttccaattaaaatataatataatgtttatataatatacataaatacatatgtaattttcgaccttaaaattaatatcatgcactttacaaaaaaaaaaaaaaaattaattatctatgaccatttcaaaaaaaaaataaaattaatatctataaatgtatgcatttaataggagtttgattaacctcaacataacattaaatcaatactatcacattctaataaaatgtcatttttcattattttggtggaatgactattttattttaaaacaaaaaaaaaaattattataatgtagcatagcatgagcaaaaatttatcaatttcttttatatattttgaattttattccattttattcttattcttattcttat

SEQ ID NO: 317517 - DNA, 1033 bp, Cannabis indica
atatctatgagtaggtatatatgtttatttatatgtatatgtattgtatatgtatatgtgtaatttttttagaggggtatatatgtgtgagtatgtaaatgtatctatatttatgtgtgtgagtatgtataggaatatatgtttatttgtgtgtttatgtatagagtgtatgtatatatgtgttaatgtaattgtatattattataattgttttttataaattaaatatcaatatttgtaatattgtaaaaaaaattatttttttaaatataaaaaccttgaggggcgaccattagggacgacatgtcgcccccaaaagtcaaaaaattgatttctgacacgtttttttaggggcgactttaggagtattttgtcgcccctaactagaggcaactttttgtcgtccctaatagtacttttaggagcgaatttttagaggcaactttttaggggcgaatttgaataattttaaaagtcgaccctaatacttatatttgttgtagtggtatgctcaccaattacatacttaaattctctctaaatctaactctaaaaaaattataaaaatcattaattatatgattgtttttttactataatatacgctatatataacatatacgtactatggtaaataaattaaattatttaatttaggtagaaatttaatattatattctctatctgttaaatatatagttaaagcttggtattatttaagtatagcaaaaaaaataatatctataaacaaaaaataaaattaccaaacataatgtgagtatgataacaatatactataagtgatgtggtcataggtatcatctaacaatttcacatttttttcatatgtatagaggaggtaactaattcctttcatatcaaagaataaaaataaaataacttgttgattgaaagtttcttgattgaagaaataatttggtttattaattagactattatttaccttaaaaaatactaactgaaaaaaccgtgtttttgcaaatgtcagttgtatataagaaaatataaaaac

SEQ ID NO: 317518 - DNA, 1521 bp, Cannabis indica
tgttgaatcttcaaaagttgtccaacagttgattggtagtgtaaaatgggtgttatatagaacacaaaaatttaaagattcaaataatttttgcaactatatttcttggtatactgatcagacaggttccataaaaattatttcatcgctgaatcaaatattatgtatatatcaacataattcagaaacatgtacaaaaacataagcatgaaattaaaatacaataccacacaatctaaacctgtaatcaagacaaactttttaacactaaaacgaatgcagcgactagtaatgttcgctcaaaattccttcgaattggactgatgcacttctcttaagagaataccatgaacaacttaagggtacaatttgaacggagaaatatctaaaagtttaccaaattaggctgcacagaacaaagccttgatatttctcgaaagagtggaattacgcttctaagtgacaatgttattgcaagtggaggccacttttgatctatagtgatcagaaatagggtacgtgcattctcattcctgaaatcaaacaaaaaaatatcaaaacgaaagcaaaatgtgaacacaatgtaaacaaactataatacaactattagcaaactgtttaaaaacaacaccataccaaaaattaaaaaaaaaatagtaaacaaatattgcccaaagaatactgaaaaaatattaacaaaaaagtataaatattcattacaaaataaagtctaaattgaatagaaacaaatacatcaatgaacaacaatttatgccgaataaacttaaaaaaaaaaacctctaacaatattctaaatcataaagcctatcattaagaaaacaataaaacaaataaaaatatataaaacctgataaccaaaatcacaaggaaaaacacaaaacaaaatagagacaacatttaaaaattaaggcaaaattgaaaagaaactgaaactaaaccttagaaatttaatctgcatacttctttcccatcttaacttttggaatcgaactcttttctctgtaattttttcttcaaaggaccacgatgggttttgttgctagttcaacaaaattttcattagagtcatcatcttcaactacattctatttccctattcttttgttcaacaataatttaactcctattgttcaggtttagaacttttgcaaatggacttcttaggtcacaaccatttacacataatttggaagaagaaaaaaacaaaagagaaatcgttgggtggagcttcaatggcagttggaaatcgtggggagcaattttttttgagagaaaaattagttttgatcgtggagaaataattcaaaataatactgaaatgaaaaattaaaataaaaattgaaaataaaatggaggacgtgtatataatagataaggaaaaatagttgaattgtcattgtagtataatgacattatcataaggtttatgtgtgtacaagtgttattttagtaaataaaaaaataaaaaaagagaggtataaaagttaggctaattagtaa

SEQ ID NO: 317519 - DNA, 1064 bp, Cannabis indica
agagagagagagatgatcaaaagagaatggaatgagtctaccttgagaaatttggagttttatatgaaggattggaatccctgacggttgaaaactgtcggggatgctattttaaaattttgaagctttaatttagtaactgttttaaattattgtctatacttaccgacaatttaaaatagacgagaattttcaactataagtatcaattttaaaaactcactaaattttattagcgacgttcctaaaaaaataattttctgatcgacaagaatattgtttttttgtagtagtggccacgacttatcacaagttaaattcacactttgattttttacttttttcaaaaaagtgaaatatcggtaaaatagttgcaaatcgggtagtttcgagtctcctaattttgcaaaaatacaagacctttaagagctagtgaacgtcttcaccagacccaagaaattggctaagtgatataaaaatatttgttagacttcgaaaaatatggttctggcacgatttcccaatttctagcacccagatttgacattagacaacttctcaattgcaagattatcaacttgggcgttgggtgctgaacactcttcacaaaaatgcccacaactcactcaatattactctgattgatgcgattccaagtgcattagaaagctcttttaaagctctttctaggaatgtcatatctcaattttgaagattttaagtcgaaaagtcgtccccaagtcaaagtgcaattttgttacaaatcacccaaaaaatgatcaaacagacgttattcgagcttcaaaaattgacgatcaccatccgagtcatttcaaccattagatcgccatcaacagtcaagattattccacaatgattttattttcaaattttaatggacctccttgcttataaaatgagagttccaccaactcatttttcacattttgctaagtctccatagtgtcaaagcatttctctctagaaatctgagttctttccttagtcaattttcttgtaattctcgcgagcaataaaaattcgaagtagacgtagctctatta

SEQ ID NO: 317520 - DNA, 659 bp, Cannabis indica
cattcactttctctttctctcttcatcttcttcttctttcttcttacttatcttatattattttataacaattataatataattcaatagttattagagaatatattaatcatttacaaagtaatttatatatagtgttaggtaccactgaagcttaatactttttaattttggatgtgtaagaactagtattttttgtagtaacaaattaggtccagttgtatctagagtcgtgtgaagttatgtttggaatttactcatttcagtgtttgtccacgtcaacttattttatgtaatattatttagttggttatagttattggccttatggttgttacttaatttagttaagtatatatactctcttcttaattcaattaggacttgcgaaactaagtagggccttttgaattgaatctttagaaacgaagctgagcctactttatgcacttccgcactaagcaggcaaggccttgagtgtgtagtttcttggatcagatttccttcttcttctttctctctttgtatcttttgttgaatgttcttgcagtaatttcttggatgcagagatgaagttccagagtaagatgtggatgttaggttttatgccctaaataaaactccatttcaatgtaatccattttattcaacatcaataa

SEQ ID NO: 317521 - DNA, 894 bp, Cannabis indica
tttttttattaatggaaacatgtttttattacagtttatttaatgtgtttcctttattttttggggatttgctattagttttggtggagttttaggaaacttatttttattaaattaattattttgttggcttcctttttggtggcattttcgtatttggttggtgtatttaattgctagattttgtggggatatgttgattcatttttctattttttggtaacctttgactattttttgaaatatcctttttggtttctttttgtctctcctcacgtgatgaccaaggtaaggaagttactttccttttttattttgttctgatttttgggtatttattttcaaagtggtacatatgatcaactacccaccattcccacgatcaccactattcactctgctctctttttttaaaaaaaaatttaaccattttcaagtttgagagtgtgtttgctttctaggatttcaaagaaaaatggccaagaccaaaaatgctcaaccttccaagaagccttctcgtggctcttccgctgcttctctgatcactccacctgcgccacctgctccagcaaagggagttccagggtcttcgtctgcttcgacgaaaactactaagaagttgaaatcccaagctcgaaattcaacttacaatctcatttttcctcctatcattgcctctctgatttctacttcaacacttgggcttcgtgatcatgatgaatctcattcatccgatcactcattgtcgaagtcttcttcttcgaagggtgctccaaatatcgagaaagcaatggttcccctgcccaaagttagttctcgaaccacgtccaaggtatccacaccatagaaacccttagtggttctgcccaaaggagcctccaaaggaaagaaggt

SEQ ID NO: 317522 - DNA, 657 bp, Cannabis indica
cagtagagtgcaaagaagtaacagtagtagcaatggcgcggtgatcagatgagaaaaaatccaagtgcgagactgttggcacctcaaaaattgaactccacaagtgattcgtgaaaacccagtccaacctctctttaattgtagtgacagcacttctatttttaacccaagtgaaacgatcaccttcataaggcaaatcttgaagatgacaatggtctaaggtgttgcggaaggcctctatttgtgattcattgcgcaatgagccacccaatttgtcactttgagataagatttcattgaaatcaccaatgagaaaccatggcatataaggagctatatcattcaatcgtcgaagaagggtccatgaagtggatcggttggatgcttcaggagctccatagaaggcagtaaagtggatagtggaagcagtgtcagtggataagaaacaatcaaaataagtaggaccaaaaatattaagagaaatattaatattatctttccaaagcaggattagcccaccactcaaaccaacccgtggggactcaagaccatttttgaactgcaaggattgacgaaaccgagaaattgcattgctaccgagacgagtttccatgagaaaaagaacttggggagactgctgacgaacaagcagcttca

SEQ ID NO: 317523 - DNA, 753 bp, Cannabis indica
gtaaaatatttccaacaaaaccaccatcactactgctgatgatcttactttatgggctggtttactgttggtcgaaattgagttttctgagaggcagaggtgggtatgaaggttgattgttctttggattggcatttatgatatcgacggggaggttgcaacagagagtggcgacggagatcaaacagatcagtggtcggttggggattcttttgtatgtgtttaggaggtctaaggctgccatggatgagcttagaagtgagttggagaggacagcgacgatgaccaccacaaccacaacgacgagtcaggtaatggagtggaaatcggaaggtgggatcggagaaagggttgacaacttgagacattgttttatggttttgagatatggagctgagaatatcgttgcccaacttgatgatttctttgatgaaatcgttgaaggaaggaagaagcttctggacttttgcagccataggtagacgacgaagaacaagaacaaatggaaatgaaattaaatatgtcaattaacaacaataccgtggcacttcaggacaaactctaagcaaacaactcagataaatgcaacagttgtgtgattagcaacaacaaaatacaagggtttttgagtattgggtgggagggtttgtcgatctcgacaatggtgatggcgattgcaggtggtttcagtggtgatggtggtttcaggggtggttttagggattttggagttctgattgtagtaatggcaga

SEQ ID NO: 317524 - DNA, 1487 bp, Cannabis indica
acatcagtgtaaatccaaagcactgatgaaacagagactttgtctttcgaatcatataatcataatcacattccactgtgtagacatcactataattatgaatggctatatgttttggacttaacagattttgtacatatattataccataaacatgaaaactacatgttaacataaatcacttctaatctcttattgacaacaaatcatattagattgtaatgtgttttatttagggcataaaatcccaacagttgtaagactgactttagctaaagtgtggacaataatattaaaatctctacgacagtgcaaaaaactaacatctctaaaaccattacaaagaatgacaatgtcatttaaaacaagatccgaagaggacattagagaaactttgttcaccactttttgcataacattcaagcaatctatttcaaagatgatattgtcataccgaaaatagtgacattggaccatgacattccgaagcatcaaagcctccaccacttaaggatcaagacaacctttcaggtaccaaacaaaagaggctagaacgctacccaaatgatcacacactaccataccaagactactacaggaaccaattttttcaatagcaacatcacttttaaccttgatagtaccagccagtagatgaaaccattttgaaacaacctcatcagaagacaaagaggtcatctatcccagagaaagaggaggcctaattcgagccttgcaatgttgaaagttccaaagaaattcaagagcctaattcaccaccaagtcaggaggcaaagaaatgttataatgcactattctatttctcttaaactaaatacgccacaaaatgaccataactaatttattttttttcttagtaaaggttcaacaacattgttaaaagctaagaaaattagtatgaatggaatgagggttaccctgatcaaagtcacaaagattcttgcaagccagtaaagttggaaacccactactacaaaacaagcctttagaggcacttttttttagcttagtaataaataatcgacgacatatggttattaatctgctgaagggaattttacacctcttctggcgtcaattatttggaaataatcgacggcatagggtgtgccccctatgtcgtcggttatttccaaataatcgacgccaaaaggggtttataaccctacccagccctttgtcctcctcattcgatcagccaacctagaaacccccaaactggagaaactccaaaccctctctgccaagcaccaaagaaaatcacccccattttaccatttttttcaccatgtttgctcctttttttctaaatcttttatttttcaaacttaaaaatatatacccgaaaagatcacatttttcctcattagttagagtaaaccgaaggtagaggtagtggttgtagtggttatacctctggccactgtttttagtggagaaaatattgtatctcaacgtccattaag

SEQ ID NO: 317525 - DNA, 617 bp, Cannabis indica
gccattggagctcaagctttgagttccaaactcaagcttgagcaaaaccacataaacaagcaatccacaagcttaattctacttaactaagcataaaaatacctctgcaaactaacagaaacatccagcaataacacagaaacatatcatataaaaaaaaatcaaaataaaactcaaatttctgaatactaaaacaaataaaaaaaaaatgtacttaaatacaacatgttcataagtaaatatctttcttaacatgttgacaagctagttaagttataataatgcctataataagtcttaattagacaaaaaaagaatccgataatgtttaataaaaaagtgattttatataatatatatgcattaatcctatcctatcgttttcaaactttttacaaaagaaaaactttaaaaacataattaattattaattcataaaaataatatacatagtacatacactattaatctattatatattaaaattatacccccactaacatgacatccctcaaaatcttttcttcaaatcttggctcattggtcccatcgaccaccatagatttcatattaaaaaaaaaaaaagtaattaattaattaattaattaattaccaaa

SEQ ID NO: 317526 - DNA, 894 bp, Cannabis indica
aactgggtagttgtgaaccaccaaaatgctggggcttatattcaactcacttcctgtacagattctaggtcttacacttataggtgagtgcaaacctgatttacctatgatgacacagagactagatcgtaaaacgacaatatgcacaagatatgataaatatgcacagcaagagtacatattccctttattttagaaaatggtaacataacatctataaattgatgaaacccaaaaaatcacaacctgcaagataatagtacaaaattatacttgacactttgtgcctccagaacagtctagaaaaacatgcaaattaaatttttaatttttcatacattttattaatcactaaaattagaatatgtcacatgttgtttatcataataaaatcaagtccagtattcaactttgagtccctataccttttccaagccgttaaactttgtctaaaaagacgatcctaagctcttaatcttaagtctcgagttccaatcgttttagtccaaccttagatatcactttcacatatggccatcaaatgactacacaattatcatcattgtattctacattcaaaactgagtctagtgaaatataacatactatatttaaagtttggagctccaaaaataagggtagtgtatatcaaaatgattacattgacgagtaaatcatactcataccaattatttgtcaaaagagtacaaaaaatcactgataagtcaccgaaaatgggtagagatacaaaaatattaccgaaaaaaatatcgagttggttagaatgatttagtgcagaatattgttctcctcagcgagctgaatctagtggtgaaaacgactcatcaaacgaacatcggaggtggccgaaaaatccattcaaagtttgaacct

SEQ ID NO: 317527 - DNA, 788 bp, Cannabis indica
ttttccaataagatttggatttttttacgttatatcgatagtttatcaataatatgttgatgttttatcgatggtaagcgtaccaagattggagaagactcctatcgacaatttttcgatagcatatcgattgtttctcgatgatttccatggctatgtggattttttatttttgcttttttttcattttcaatttcttatcgatggtttctcgatgattttcatagttgtgtgatttttttttttttaatttttgcatttttttcagtttcttatcgattgtatatcgatggtttcttgattatttttatggcatcaaaaaattcacacagccatgaaaatcatcaaaaaaccatcgacataccatcgataaaaaacttaaaaatgcaagaaaatatatatatatataaaaaatttacacaacctagaaaataatcgagataccattgaaaaattatcgataagagtcttccccaaccttgttacgcttaccatcaataaaacatcgacatattatcgataaaccatcgagataacgtaaaaaattcagatctcaccggaataatcagatcccgctatttcgcaagaaaaaaaaagcaacatactcttcaaaatgtttaaaaatttattgtgtaaaacacttaaccattattataaatgtagcagattttgtacggtcattatgcttgattcatggctttatctccaccatcgccgtcggccatcgtggtcgttaatagatttttttttttttcattttttaaccgtagaaagagagagagagagag

SEQ ID NO: 317528 - DNA, 1930 bp, Cannabis indica
aaagttgagcctcctattcttttctctatagccgaaaccattccctcttcttttcttcttcaattttcgaaccttgagtgatgagtgagtgcccacacacagtaaaatatttccaacaccttctaggatctatctgatgtggcatgtctctgacacaagatcccacaaaattaggggcttgtccaccacatcattcatgggaaatatgcacaacacaaaaagtaacctaccttttatccaacgtcaactcctctgaccagtattccacacaatcgttggcgcatggccatctatcaacatcaaataatactgtattgtacggatgatggttatatctcaattaggcctcatctactaggctcaaggtcaatattatattgtattttatccaatcagtgggcttatttctatgtaccaaaccttattgtgtgtgggttttacccaaaaacctagttatggcatataaataaggctttatctcttaatgcattgggttacgaacattggctagaaactttgtataaattttacaagaacacttgtgtaaaatactttatagccaaagagcttcaataatattgactcgttgactaaggctcattaacacctcaaccacgtaaaaatcctctttttatttgtttcttaattttttttagctcaacttattatcaattcaattttttgaaaattttaataaatatattggtgctttcattgagagctgaagaaagtatcctccattgttgtcatctacaacaatggttgtaactcaaaactatggtcagaccccatgctcgtcaagaccgagaagatgaaattattgatgatatgaactggaccctacaaacgaacgctctagggacgtcatgaggaacattgaagcattagagatggccagtcgtctgtttcgtaagggcctgtagctagagaagcttgttgatgaaactcccctcaaagaggatgacagtgaaggacttgatgagaatgaaaatgaggcttaggacaaagattatgataaaaactatgaaaagataagatcgctcgagccctagggcaagactgaccagtcgattcgcggagtagagtcgaccgattcaaaaggcacctattaacccagaaacttttcctagtgacgtgaacatcaatttttgacacgtggaaagaaggatgacattatggagttgagtagacccaagtcatagcagttgacttgggagggggccctagccttgcgcccaagttgacttcaggagagctaggatggaagttcgaacttcaatgacttgaatcaaactcactatctttcaatattctataccataaagacatggagcaacctaattctatccccagtatctgaaattacacgaacctactacccagaagccaacctatgtacctagggtttcacccaactcccaagttgacattcccaactaggattttagtttttgggaccgtcttagtgaaaatgggtcaaaaattgtattaggacatcaactagacataccatggacatatttcagacatcaaaatcagattcagagcaagttcattttttagcactcggtgctcgggcacctcaatgcctaggttgacaattcgtcaatctgggtgccttccaagtatgagatcgacgatgaaaaattttcatcatctttgcctccatcaaaaattgggagaataggtacttttggggaagaaaaagcacttgttgggtgccagaagcaaggcccagcacccaggttgagattttgtcaacctaaggcgattctgatggtgttttctgagaatcttctctatttctagaaaagattaagattcaactatttatagggaccaaatggaacttctgaaggaccataattgggacccagttccaagttgatgttggattttgtgccctaaataaaacccattacaatctgat

SEQ ID NO: 317529 - DNA, 527 bp, Cannabis indica
cttacagtttttatattttcgtatatacaactgacatttgcaaaaactcggtttttgaaatttcttcttgaaccttttctctcaccaagtaacaatttatctctatgtgcttggttcttttatgaaaaagtagattgccaactatgtgttggactaatttattgtcacagtacactactacaaaaacaccatttaaagtcagtttttaaggtcttttagcatcaattttggcgaaatttactttcgacgctataaggttgaaaaaatcgatgctaaatagtaccctatggcgtcgattattatatagcaaccaacgccatagggtacttatagcgtcaatttagagtgaataaccgacgtcatatatctccataaccgacgccatataccctctaacaaccgacgacaaatttgtaataattgtttttttttcagttaatttaatttaatttatttaaattatatatttattaatttatatattatattatttaatttaaattcaaattaaatatttattttttaaa

SEQ ID NO: 317530 - DNA, 919 bp, Cannabis indica
tattaatatattaatatgtaactcgataattattaataaataaacatgaaataagtttcatctcgttttcttttttactatgttttgttttatattttaacgtaatttaattttactttttattgagaaattacatcaaatataaaaatttttatttttataatacaaacatgttggagttttttatttactaaattttatatggtattttttaattcttacatttttataggattttcttttcataaagtttgatttcatagcagatatgtaatgttttttctcctaccaatgagtttctcaatatttttaataaaaatactaataccggcgagaatccaccgctattactgtgtcagaaattaattctgacgcattaattaccggcagggcccgccggtattagtcattaatagcagtagacgtgtcagtccgccgctattaatgactaatatcgacggggtattaccggagaggcaataccttaattgaaaaagctagttcttatcatatcatattatatcataaaaggtaaaattgacaactcatagcataagtaggaatggagtgcaccacagttttgagaaggacttctcgaccacctatagagaatatctttccactccatgtgtgcataagttttcaaatcttctctttgatgttgctaaagagtttcttcttatctcttccgtaatacgatggcagaccaaagtatttttcatgacattcctggatcgacatggagagatgacgatgaaagaaaacttggactgccaaagtagtgttcggggagaaagacatgacagatttatctggattgaggatttgaccaaaatgataagtatccagaaatcttttaatagcaaattaaatattatcacccttttttatacgttaatacataataaaattatttttt

SEQ ID NO: 317531 - DNA, 450 bp, Cannabis indica
ttcctaatgcacatgataaaaatatgacctataaaactgaatataaattaaagagtagtataaattaaaatagaaaataaaaaataagtagtgcaatttcctcaatcttcacccctttctctcagcaaggctcaactataggcctgcaggtgggttcaaactaggatctcaccagtcacaaatatggacttgtaaaacttgaaaagtatgacatttgaatatggacctagttagacgtggcaataattttccagcagcacaaaaatgtcgatcgcgtcgaactaacctccgtttcctactttaacccgaattagttatacagtaggacctctatccatgaatacacttgggactaagaaaattatattctaattgagaggttataattatatagaggtacactcggaaaaaaaaattaaaacaccaataaatatcaatgtaacaataata

SEQ ID NO: 317532 - DNA, 1019 bp, Cannabis indica
gccgtggttgctagactgtcgtggacacttcgggcagagccgcaaaacgtcttaaagagagcgacattgtccgcgactcaaccagattattttatcagtaattcgttccaatttcattgtttttaatttcgatataacagatccccatacctctggcatgctaatccaatttttatgtttattgtttgttagttacggggtggtccaatcttagttgctgattatatggaggaagtttcgacaaatcctaaagttagattctatattaactgagatgtgtttggagcaaaaggtgatttcatcacctctcctgaagtgagccagatgtttggagaggtaatttgcttttttgagattcattcttgttagttcatttgagtactgaaggttggttataatgaactactttgtatattgaactgttgttatagatggttggtgtttgggcaatgtgcttgtgggagcaaatagggcaaccaaagaaagttaatctagttgagctaggcctaggaagaggaactcttatggttgatcttcttcatgtatgaatccctgattctcatttcagttttcatgttttgaggtagataatagagaaatgagagtgtatctttaatataatacttgtaatgtagagtgttgtttaaaattttcattaagttattgcatgtacacttggtgacgtgtagtccaacattgcggaaacttcacgaaacttgaaatgtgttgatgaatatattacaaaccaaattgataaaaggacagttagtacattggctcaaacattggtatcaagtcatgctgcattggagcaagttccttcgggaggtaaaaaagttatcttattgatgatgttgtgtattataatgtgtattttgtaattgaataaaataaaggaagaattacataaggcactattttttgtaaaatatttacatttttatgttcaaagaatgtttttgttacatttttacggttttccaaaaaaataacacgaaaacaacataaaatcaacaaga

SEQ ID NO: 317533 - DNA, 581 bp, Cannabis indica
aaaaaaataactgaaaaaaaaaataatagttctcatatcttaaaatgttcgattacactagcatttttttaggcttgataatgatgtgaccaaaaattattttaaagttagattagagagaaaaagaagagaggcaaggggtcatgtgagttattaaaaatgaaggagaagaaaagaaaaactttattaaaactgaaacaaaggaaaacgttactaaaagttaaggaaaaaggtaaattagatgagaatgttatttttgaaaattagatgtaaattaagataccaaatgtaaaaagtccttaaatatttctgacaccgtgggagtcttctctcggccgaatcaacaatctttttatttaagccaacttcagtcagtcttcattgtctttcattcggcccagtccaatccacctcctaattccttactaagcccaactcacgcttcactccaagattatctaatgatttttagggatttatttcacaaatacacaaaaacataaaaaaattaaaaaaataacgattttacagaatttaatattttacggtttttttttattttatttattagaaaattacgg

SEQ ID NO: 317534 - DNA, 692 bp, Cannabis indica
tatttatatagatatatatatatcaatatgtgcaaaatatttaatgtttggataaccacataaaaattgatttaacaataaaataataataataaaaaaaacaacatatatagaaaatgccttttatatatagcagaaaaatgattgttaaacatctacaataataaaaaataatacaatcatataatattaaaaatatataataatgtgaatacaaaaaggataaaatcatggaaaaaaaagagaagaaaaatatttaaaaaaaaataaggaacatgaaaagatggaaacaaatgaattaaaaaagataaatggaaaataataagaaaaatttacaaagatcaaaaattttaaaaattacaaaagtacatcaacacagaaatttttcattttaatgctttgaattttttatttacaaaattacttcttcaataaaataataaaccgttcttttggttgttttatagtgtattatagttgtaacaccttaacaattaggcacgctacccaaggtgattaagaaatcttaatcccttaaacgggattactaagcagaaaagcgcggaaactttaaactttaaacaaaaatagaatgaaaataaaacttataataattttaactttatcgtcaaaggttacgtattttgggatcccaaaaatattttacaaaatattacaagtctttccactag

SEQ ID NO: 317535 - DNA, 1165 bp, Cannabis indica
atatgaagagtaattttaattattttttatggtaattacaaaatagtatatctcatacatggttaaatttttattttaaatgctatactttttttattaagttttctcaccatgtaaactagctttatttttttcatgtaaatatccctaaattatttagtcaataaaaaaatgctatttgcaatatttttttttttctaattaaaacaaaaaaagtttatgaggtaaaactctttaagaggcatagctagggtgaaaattctattcattcaaaaagaaatcctatttattgaaaacttaaaaaaaaaaaagttaattttttttatgtgaatgagactttcacaaaattagtcactaaattgcctgataacacaacaagtttatagtagaatttacacttaatatgactttttcaaaatattttacttaaatatagcaatttttacttgggctattttttatttttatggtatctttttttgtttttgggctgtttatatgattagtagatatgccatattaaagtaaaagtgtttttaaaatgccatatattgggttttgtgcttttggaagggcaatatttttatcttgttgaatgaaaaaaaaaaagatttattttttgcattgaaaattgctattaaaatcgtgtgtgtaggctataggtatatatatttagggaaattatatttgcaccctaataaattataaatacaccccattttaaataaaaattttaattatatttttatccttgtacaaaattaccaatatatacaattttaaattatgagcctattttaactttataataatatttacaccccatttgcttataaaattaaaattaacttcttcaagttctaagaaaaattcattaatagaaaaaaataattgaagtttcatcaatcaagaacatttaatatacgcataaaaaattatatgtttaattaattaatgtatgtaagatttcattattttaatcatttaatttttggttattgttatgtatatggaaatattgattgattgttaataataattataaaagaaaaactttcttagatgtatatgcctgcatattttgatctcctaaaaaatatggttattaaaaagataaaaataaagaagaagagaatcaaaaaaaaaaaaaaaaaactcgcaaact

SEQ ID NO: 317536 - DNA, 1002 bp, Cannabis indica
tcttgtcgacgattgggattgtcttaagaaacttgtaagttagctagcgactaaattaatatatataaatatacatatacataataacatttatatgtacatatataaaaaagtttatagagaaagtcagggtcatcacatcaagcttaccataaatatagtcagttgcaactttccctacctgttattttgaactctatctatgataacgtaaattaagaacttataacataaagccttaacttaaaagtttcctatattcctctatattattatttcttcaaaaactatatgaaatatttttattatatttttcttttgttaattaatttgcaggtgaagacatatgaaatatactgtggagctttgtcatcatatggtatcaagtacacgagacactttgccaacatgtgtaacgttggggttaaccatttccaattttcagtggctgcacttcattcctgctattcttaatgaagcaaatatatattataatatatacaaatataataatagtacataacagtattgaagtggatgttgaacaaaatataattccatataagtatgcgatacaggtatgcagggatatatttgcttgtaatattataattatacatgaaataattaaacactacgttgataaagaaatattatatatagtggtttctttttttttatttagttttttttatttttttattttttactactttaaataaggtttttttttttttgtcattttacgaaatctatatagaaatttctattgcaattagtgctgcaacctaaattgcaacaaaaaatcgtatgaaaactcctactgcaactagcgctgtaaccactagaaacccaaaccgtaaatttaaagaaaaaaaagttaaaaaaatagtatatagggtaattcccctatatataatctgtatgaggcctttctaaccaaataattgttgggttttgtgacctaaataaaacctatttcaatataattagatttactag

SEQ ID NO: 317537 - DNA, 762 bp, Cannabis indica
atatataccacatatatgacatattttttttttttatttgataaaaataaatattaaaaaatttagttgggactattttaaccatcctccaaacatatcatagtacaaaatagtccagagttcttatccaacactccaaacatgcccttaatttttaccttctgagatttgactcctactaaaataaaataaaaactcagacaaaatttataaatatatagtatggttaaacgaatgaacattgaatatgaatattatccatattttttatttacaagattcctgagatttggactttctcactgcaagcaacagtagctaagagtacgtagggatgattttcacaagaaacattaattaataattactaaattatgaccgttaactatatatttactaattaatcgaccaaacaatcgtttaagaacaaaggtttaaataacaccatgacatctcagtttaaaagaatagaaaaaagaaagaaaaaaaatacaccatctcacttttgtagtggtgatcctcatgacttggtaatcatcttcacttctgtaaatcttatgatctatactagtaaaatatgcctatgaaaagaaaagtagtttaaaataatatatatttattataaatatcaacatatatatttattatataatttctcatataaataatttaacatataaaaatcaaaactttttcatttagtgattttacattggaaatttgattttctatacttaaaaaaccttaatattttattcttaa

SEQ ID NO: 317538 - DNA, 1802 bp, Cannabis indica
gcataaaacccaacaatatataccatacacactaccatacttatgtaatagaatctaaaatcgagcccttaattaaaaaattccactagtgttcggacataagttataaaaagttccaaacacaatttttaatccaaaatcatctcaatttcagcaagaaaatatcgaaactagttccatgactacccgagaataatcctataaggtcaaaactttcataactattctaattcacgaaacccctatataaaaccaattggtttaagcttaaaacggaattaatccttaccttaagctttcctctcaccaaaaattattgttccgctaatagtggagcttagatcactaggtttcaggttaaaaaattaaaaaaaaaaaaatggatataagaggagaggatttttatcgaaggagaaggagagtttcgtttactaattataaacttgtaatatattatatataatatactaataaatgttaagatcaataataataatttaatatttataaaaactttattattattcataattatcttattatgtcttagccactaagaaatttatactttgagggcgctaagtcaaatttcacatacttctaattccatcaacttatcacaatattcccaacaattctatcaattaaacttgttatgatatttctggcccccaatcgaatctccaaggttgccaaacttaaaaatactttattcaacatatagctcatattacattcacacatgctacataaatctccataatttataaattacacttatttactaacttatagcgaatttaaatttatgttaaaatagatcagtaggaccataatcccacttattgcatgattaacccataatataattataaatcttaattactcatcattaggcttattggaatattacatgagccaagcaagtcctcgcaccaaccagaagattcctacttagacttaggggacaaatgttattccaaattttggtcggttgatgtggcaggtctctttaggtgaaatgtatcttcatctcgaggcgtgggtagataaaagagtctcatagatcgaccccaagatgtattcaaggttagtagaaataatagttatactaattgtaactagccgcacaagattagcacaaacaaacctggtcggaaggaagtggtacgaactgcatactatccgaccaaggggaaaatgcctgacagaaatacatctaatgaagtttcttgtttaatatgtaattgagaccaagtcaaaggagaattccatttatatttccagtattttaagaagaccgatttatttcttgaattggtgggttaacagcttaaggaaaccaaattctgttttggatatccccaataaatagtggagcaattctactgtaagaagatccaaaatcatttgtttgagagagcccatacgctactcattttttttttttataaaagctatcgagagagatcaatccatttttgcttctctattcataagttaaattcaataacaagaggaataggccattaccagagcaatagggctgaacctttataacatatcgtgttcttagttttactcgtcactatttatatctttcctaaatcttatttatttcttgtcgctttaaggagccagtgtcattgaccaaaaggaggtcaacataatctaaggctgtacaaaccgaataacccgcccaaactaaaacaaaaaaaattgataaaaattacaaaccaaaataacccgaaaaaaattacaaaatcgccccatctgttaattgagcgggttgaaaataggtc

SEQ ID NO: 317539 - DNA, 2568 bp, Cannabis indica
ttgaccgagaagataatggttaaatacttgactgttgggtctatatggtagatagggggccatttagtagtgggtacgattttactgaacccagccctccgccatttagtccaatagctcgagtttatttgccaaaattggactcgggcgtaatcattattatgtgatttagcttagaacctaattattagtgactagtgatatgattaagtttatgttttgctatctgcctaaatatgtgcatgtgcattttaattaagttttatttttatttatgtgactacctgacacacatttccttactgagtttagtagctcacccttatcaaattaccatgtgcagaccaaggtaactgaaagtttagaaagccggtggcgagtggaactttggatgcttgtgtgtgtgaactcgctgagggccatataactgcgggcggtctagggcgctctatttatttatttacgttattaaacttatgtcgcaattattttagttattaattattatgtcttttgtacgaaaactggccagttgtgaacattttcaagtattaaataaaaatgcgacattatgattttccgcgtttaacgcttgtaaataaaattaatatttttataaaagtacgggcgttacacatagccagtggtgttgctcaaacttcagctccagttacaagcatcgacggacctcatgtaggtactactctcactcaaccttttgcgttgaaattggatagaaacaattatactttgtggaagaccatggtttctgctatagtccgtggtcatcgattggatgggtacctaaatggtactagagtgaaaccaatcgagtttctaccatctgatgcttctttaggtgaagatgctgtggttattaatcctgagtttgaactctagattgtaaatgaccaactgttactcggttggctctacagctctatgactgagagcatagccacagaagttatggggtgtgactcgtctgcaagtttgtgccaagccttggagacattgtttggtgcacactcgcgtgtgaaaatggatgagtatcctacaaagatacagacatatagaaagggaaccatgttaatggcagattatctgcgtcagaaacgtcaatgggccaatgtcttaactcttgctggtgacccatatccagaaaacaacttgtctctaatgttctttctggtttaggcattgaatacttacccattgtgcttcaggttgaagctagaatctcaacttcttggcaggaatttcaggatattctcctaagttttggcaacaaattagacaggttgacaacactgtctggaacctccaaaaaacgcatctcgggttctccatctgctaatgttgcagctacaagaaatcctggttttgtaggaaatagatccaacaatcctgggcagtatggtcatggaaatcgtggcaactcgaatcaaactcgaggaggcagagggtctggcagattcagaggtcgtggtggtagaaatcaaagcaacacaaagcccacatgtcaagtgtgtgggagatatggtcatagtgctgcctattgttacaatcgttatgatgaagcttacatgggttctgatccaaatgcttcaaatagtggaaacaaagccaatcaaaccagcaacaatggaaatggttcctctgccttcatagccactcctgagatggtggaagatactgcttggtatgttgattcgggagccagcaattacatcactgccgactcaaacaatctcactcacaagacagattacaatggtgaggagaccttgactgttggtaatggcaataaacttgaaatcgcccatgttgggaaaagtctaaaaccctctgttgataactgtaccattgtattgagcaatgtcctactatgttcctaatataactaagaatttacttagtatttctaaactcacacatgaaaataatgtgtttgttgaattctttgctcaaaattggtttgtgaaggatctggagtcaaagagggtgctgcttcaagggactcttaaggatggtctataccaactcacaaattatcaagaaggtcttcccaaccaaccaagttcagtgtctatttccaagtgtgtcaagccttttactggtgtcgttactgtgtccagcaaaaagtgtgttaatcctagttttatttccctaaaggataggtggcacaagcgtcttggtcacccttccaatcgagtcttaaactaggttttgagtcttggaaatgtaacagctaatgtgaatgaaaagaatagtttctgtgaagcatgtcagtttgggaaatcccatgccttgcctttcaatatcaattccaatcgtgctaatcatatgttagatttaatacacacagatgtttggggacctgccctaatcacctcaagctataactataagttttacattcatcttgtggatggtagatacacttggaatctataccactcaaaaccaaagatgtaagcactttcagcctttatccaattcaaaactttggtagaaatcaatttgacaggaaaatcaaagctttgaaaatagattgggaagtgttaa

SEQ ID NO: 317540 - DNA, 1630 bp, Cannabis indica
agataagataagagcatgatgtaatctgaactgttaaaactgatgcaggaaatggtacaattgaagaaactcttcaaatttatcaatggtggtaatgcaaccaagtgcaccagcattgaaagcctcatttgttcctctataaaagtcacaaagcacaatctttcccttgatcaaattagtgtctagacacccatctgtgcaaatactaaaaaccaagaacaaaacacaagtatttttcttcatattagtaatctcgattcgaattattcgaggcgaaaaatgaatggttttttaccttgacatttcacttgagcacttagttgaagtgtcttttccatgtactagaggaaatgttgtgccatttagtttaaaagaattgatagaactcccctatttgtataagaatcattaaaaattgatcatcgctatgtttggaagttggatttttgttggaaaaataaaaattaatctttatcttcgatttttttcctttagtaaaatccaacttccgaacataacctaaaaaaagaaacagaaaaagagagagacatacaattatggtgattccattgtcaagaacaaccttgtcaatcattctttgatttgttgtacttgctccaactgtcattatccacggcgcgacacttgacacggttccaagagaagggcctgagtttccagcagagtttatggtaagtattcctttttctatggcgtggaaagcgccaatagaaacaggatcattgtcgaaacttacagctccagcaaatccaatggatatagtgataaaatcgacgccatctgaaatggcgtcgtcaaaagctgccataacggcagctgcagtacatcctctagagctgcataccttgtaggctgcaattctagctgatggaactcctcctcttgctgtacctttttttaactcgtaaaaacttgccccgtttacgatgtttcctgcagctgtcgacgctgtatggcttccatgaccttcgtcgtctcttgttgaattatctcccgacattgttggataaaatcgagctccgatgatcttgctgcaaaaaccaaaacaaatagtcttaacatgtttaaaagcaggggtgggcaggatccaaaccaatctaagtatagcgaaccgatctaattcaatccagttacaaaaaattaaaaatttaattacaattacattagatgtgaatagttggactttattggattacactctcaaaatttaataaaaaatcgatctaattcaattatttatttataaataataaaaaaatattcaaatttcatttttacttactttttatcaattttctatgacactattacactgattaaagaaattcttactaaaaaccataagaactcgagtatattaatattatgtttttatgtatattttttaatgggaaatttgaatttctatgcatgcattaggggataattcttttcctaaactaatacttttctacattgaaaatatatgatcacttttccaaaaccccaaaaatacccctctcaaaaactcaaaccctttctctctccttccctcaaactctctttgcctctttgcctcttcgcccaaaccccatcgcaggaaaccgcccctaaccctcaaccatcatca

SEQ ID NO: 317541 - DNA, 731 bp, Cannabis indica
aaactaaggaaaagaaattataagaacagaagaaaaaatcattaatgaaagaaagtgtgccacttactgtcttgtagtgaatttctggtcaaaagagaattttgcgagtaaagtcccaaagattgagaggttagatcctgatgattcttagagttgaaaacttgatcagaagtaatacgcaagagaaatgtaagggataatgaggtcatgcaaggaagcaatcatagtttttcagaaagctcaaacgttaggaaaagcaaaaaatggcaaaataagcttttagattaagttttatacccaacaagtgatcaccgttcaatcaaaagagatgaaatctaatggatggaaacattgcaaaatgtgaacggtcaaagcattaaatgctcaatgatgtgcctcaaagttctgaaccaccaaaaactcaaagtgttatcccattttttgcaatataacatagcagcatatactgctgacacgtggaccctatttgctacatttggctgaagaaatgttttgaaccaagctcagcatgcaccagcacgaatagattattcccgatcgagcagggtaagggtagacagtttaaacagtgtatcaaaacttagcaattccaagatttgcatcatgaagcaagaaagcaatccctataatctagggatcgtatcagaggaatctcgcaagctatccgaatcccataatttgtgtattctaaatacgtaatgtatgttctt

SEQ ID NO: 317542 - DNA, 1354 bp, Cannabis indica
ttgtaattataataatttttgagatttaaaaagtaaagtagttttgtaaaaatgtttaataaattgattagcattaaaatgtaaaaaagtaattaaatttggtacctagtgtaaaaatccccttagtttttcatttttacgtcgtactggtcatgtggccttttaagactatgcaagctcctaatctatttggaagccttaggtaagataaaacaattttacataaaattctatgggtaaaatttttttatatttttacatttcaatttttttctctaatatttatacaatgttttataaaaataacaagaaaactacatgaaattttaggaaaatttttaaccccgaaaattggtgcttgtagttttcaaagttagcagatcaaggcatgagagacgacattaatcacccggccaaagaattactcaaggtaccttggcctacaatgtcactcgaccatgagagtgacaatgtcactcagccttgagagtgacaaagtcactcggtaaaggcattgagaggtcactctgaaagggaaatgaaatgtcactcagccaaggacatctcatctttgtagatctccttctcagctttctataataacttgaatttcccaaatcgggttaatattgagggagttatgctcaaaatacggaagtggtacaaggcttcaaaaaagtcactcggcaataactattcaagaggtcactcagaaaaggaaatgaaatgtcacaccaataaggacatctcagctttgtattagccttctatatcaacttgaatcgcccaacttgggtcaatatggagagagttacactcaaaatacgaaaggggtgcaagacgagtaagactcacttgacaaagaagccttggaccatccttaagtcactcggccaatgttttcgagaagtcactcaaccaaggttcttgagaagccactcggccaaggttctcaagaagtcacttgacccagaacttcaagaagtcacttagccaagaactttaagaagtcactcctcaagcacttcaagaagtcactcagcgaaggttctcaagaagtcactcgaccaagcacctctagaagtcacttagcaaagattctcgagacgtcactctgccaaggttctcgagaagtcactttgccaaggttcttaagaaatcactcgaccaagcagttcaagaagtcactcggtcaaggttctcgagaagtcactcaaccaagcacctcgagaagtcacttggccaagcgcctagagaagtcattcaacctaaggttgtcgagaagtcagtcgaccaagtcaccttaaaaagtcactcggccaaggtttcgagaagtcactcatccaagcacttt

SEQ ID NO: 317543 - DNA, 1540 bp, Cannabis indica
aaataaattgctaaaaaatccttatatagtaataaattgtaaaaaattaattaataattataattaatttaaatttaaaatataattaatcttaattaaagctttataagaaaataaatgattaggttactttcaagttacaagttatttattatttatttttatttaatttccaaattaatcacaaccatttaatagtaatccaatagcttagaaaaatgtaaccatgatggttacaataaaaatgtaaccattgaaacctgttccatatttaaaattaataatataactgaattttatgtaaataagttttaaaaatggtaaaaatacttaaaattttgtataatcatatttttgtaattttttttgtttttttttttttagtaaataatcctttttttcttgggattttcattatttttttttttttgtaaaaagcatattcatattagttttgccgtattaataaattttatcaagttaatttattggaaccaggactgacatgacagaatcctgtaatttaaatagaatcctttatttttattcacaataacatattattgttaagagaaaaataaagacagcagacaaaaaacattttggcattcaatatttctctgagattttttttcgaaaatatatagaatcaaacaaaaaccccagtatacatgttataattatctatatataagttagtatatatcatagagaatttgaatcaagtaacttcttattcctgaatcatgagtaaggaaaatatgaattatataattttaactgactcaatacataaataaaaaaatgaaaccatctgtattaaaaaagaagaaaaagatgactaattaaatttaatattagactaactatactagtacactatgactatctatttttctttatttaatactattatagtagcacttgcagttggagataacaatgacaataatcaatcacatgttaaggttgagataattttaaataaagtaattttaaatataaaacagaccttcctattctattatataaaaaattaatcatacctaattataaataagaataacctttaataaatttaaaaaaatatgtatatttatataaaaataactataaataatcaaatatttatatagtattatttatctgtaatattctatcctttgtttataggagaattagtcttgttgagaatcatagggttacatctcaataccaattggcaatgagtggagtagcccatattcttatatatggctcaataagatggtggctatttttgctcaccaattttgaatcaccttatcataagtagtattatttacttgcttatttttttgttttgctgggagttccatttgcttgcttattcttgttcacagctgggagtaccattttgctcgcttgcagctagctaactctttgataggtgtggatcgaaagcccgctagggatatggctctaataccatgttgagaatcatagggtttcatctcaaaaccaattgacaatgagtggagtagcccatgtttttatatat

SEQ ID NO: 317544 - DNA, 1644 bp, Cannabis indica
aataaggatgtactcactagggaggacgattataaactcactcagttacactctaggttagatgccatgctgtacgaagaagaaatctattggaagcaaagggctagagtctgctggcttcatgacgggggtaggaatacaaaaaaaattcacaaacatgcctcatcccatagaaaatctaaccacataaaatacctcaagaatgatcaggggatattatcaacactcaggattgaattgtaggcctaatcacatcctatttctctgacctgttctcttcctagggaagtgatctcgaagttgctgcttcaattttttctcttaggccctgggttggaagccctaaaatcaactttcttgctcaagaattcactgctgatgaggtaaagaaggtagtttcgcagctctctaaggataaggcagtgggtttagatggtcttaatgcttttttctcaaaaaaaaaaaaggctagttgtttaggaacgatttcaccaggatgttctggattgtctcaacaggggtgttgatttcactgatgtcaactctaccctaattgttttaatccctaaaaagcaacatgcaaattctcttgaagactttcgacttattagtctctgtactaccttctataaagtcatctccaaagttcttgccaacaagcttaaattggtcttggataaaatcatttccccttgtcaaagtgctttcgttttggtccgtgtcatccaagacagcattcttatagccaatgaacttgtgcatgctgtgaacaatgggtaagcaggggtgggctgcccttaagctagacatggctaaagcctttgatcgggttgaatgggattccttgagacatcttttgtttcattttaactttcctgttcattttgtctcccttatctttagatgtctgaccactccttccatttctttctcaataaatggtgaggttcatggatctattaaatctactcggggccttaggcagggtgatcctttatcaccctatctatttattctttgctctgagggtctccctgcaactcttcaaaattaccaggatagggaacttcttcgaggtattgctatttctaggtaggctcctcctatcactcatcttctctttgcagatgatagttttcttttttggtctattgatcaacactcttgtgaggccttactgttgggaatattttaccaggatctagatttactaacaagtatgttgaattaacatcctaaatatgaattctctaaaacaatgaaataaacacataagggtttaataaaaccttacaatgattgcagtagaatataatgactctttccgttcaagatctctaccccttgattccaatctgtagcagagcattatcaagatctgaacatggatatctttctctcctttgggtttggttaccaccgtcttactaactatgattgagtacttgagttgctatgtgtgggcatatcactctttcgttcaaggattcgaatatggaagaacaatgaaggaggctgaaatcacaaaggaaggaactctctcatctactagttgtctgacatagaaaactaggtttgatttggttgaaggcatcaagtggatgagtgagagtatcatgttccttttatagtgtttcaactagg

SEQ ID NO: 317545 - DNA, 2202 bp, Cannabis indica
atatatatatatatataatgggagccagttgttaccttgattgagagatatagtgaataccaataaacacttggcaacaaagcacctctccctttgcaagttgatagatcaatcaaccttcccttacttagtggaaacaaattatatcgtgcttattaaaaaatgtatatatatatttgtatgggtggaaaagttcattaatttttaaattgaggtataagattaataagaccaaatcacttttacgactgaatcttttgctatattactgactatatatttatgtatatgtatacatacatataaactctacataatggaattataattatgtaaaatatacgatcagtgagaaagattgggccaaaaggagatactaaaagtacgacggtttagaatacaaaaaagtaataaagaatatgggaaaatacatatatatattttatgtttgcatcatcatattattttttaccaaccaatatcagttatatttataacatttagttgttaaaaagaaacatatcatgaatatggaagaaacaaacacagagatattatgattgattcctcttttcattttttaacactacttctgtttatcaaattaagacctagctagctaggcatatggtcgacgatatgataaatagtaatctactaaattaattacaagataactacgtatctaacttaacaaattaactctatatattttatacactacttgaaatttttgtttcttaaatttcaacaagtaatgaattatgttattgaactattcatattattaaaaattcattccgaactattaagattgttgtatttataaatttttgtccatttttacaaatgagatgagtctaacatagataaaagttcacgggagcataattaattagtacatgtcaaatgggagcatataatctaatacatgcgtacacaatcactacaaaactacttttagtgataatcttttagtcacaatatatattttttgtgaccaacttttaatcacaacaaaaaattacttataacttaaatataatatttagatacaagttgtcactaatttacttttagtcacaataagtattgtgactaaaaatatatttaatcataataaattgtgatttttgtaactaatatatttagttacggaccttttagtcacaacataagaatgataatttataattagtcacaactttcatatttttattagttataaattttgttgtgactaaaagtaaaaattttcataataaattatgattataaaattgagaaaatagttaatttaggagcatttttaaccgcacgagatgatttggggcaaataccttaattaattagcttgttatataaagactaattaagatttttgtcccttaaactttgacatgtaccaaattatgcccctgaacttttaaggttattatataaaaatgccccctgaactattgagattgttggaatatttaaggacttttgttcaattttagtaaaaaagtctaacatggatgaaagtttagggagcatgatttattatacatgtcaaagttcgaatgaaatgatttagtatagttatcaaaatctaggaagcatggtttagtacataaataatcatgaaatagtaaaattgaatgaaattagaaaaaatttcttaaatccaacaatctcaatagttcagaaacatataatttagtacatgtcaaagttcagagtcaaaaatcttaattatagccttatataaatatataatagtatctttattagaatatttttattagcacaactgacgacagaaacaatacatactagtgcttgtgatatctctatttaagtcatgagtgcaagtttcattagtgcatacctaaaattacaaaatcctagctagctattatcaaaagttcatcattattaatttcacttttcaacctttatattattccgttcataaaaatggatagatcagtagaaggagaacttaaagtgaatgttcttactaatcacccatctatatcatcatcatcatcatcccctctatgggtactctactataaggagtgtcaaattaattttcttaaaaaggtacgtaccctacatataaatatttatatactaatattcccaaaactcccattacattaattgaaattatagtttcatattaatattgtaatgttatatatatatatatat

SEQ ID NO: 317546 - DNA, 2206 bp, Cannabis indica
acagtatttttgaaaaaaattccgtgtgacagtatttttgaaaaattacccaaattccagtatttttgtaaatttccctaaaattagcctaaattaacttgtgaagaggaatacaaacataaaaataggaatatatgaaattaaatttaaatgtaaaaaaaattaaaaaaattattaataatctttctttctattttaaaatagaatagtcattttactaaaatatttaaaaactactatattgtatactttaaaatacaaacaaacaaaaaaaattgttttaattacatttccatttcattgctatagttctactgtaaaaaaaatgtgatgaatagtttcttacacaataaagtttcttataattattcttatagtgttctagacaagttgtcaaatcacgaagaaaacaaggcaagcgtttgaaatattgaggagtaaggacattaattatacaatgtaattctaatcaaagacttggtaagtatggagtcaattcttctaatccttgatttatgtcaaaacacatcatttgatttaaccgggatttgcgagaaggagaagaatgtctctgtctcacatatcgaaaaaaaaaggacaatattcatacaaatctaagaactggactttctaaaaaaaaatgaaaagaaaataattggacattaactggaaaacggcagtaggctgtaagaaaaaaaaaatctcaatacaatcctaatttttttatatatttggataatgggagagagagagtagtgttttttattttaaattttgtttgatttgcaatttcaaatacaatacattgaacccgattctcttattggtgattaaaggattcaatcttctttagctaacaattaaattataactctgtttgttttaatatagcaattatttatctcaaaaataaaaagaaaaccataggcgatagtgatgggtgcttctacttcttttctttacgttcgtatatatttgtgaaaattcgctcttttttataacctcatcaaccacactattacttttggtgtatcatccttatttagatttttttggtctatatatatggatgagtgtttttttagaaacgttttatattacaattttgagttagcatcaattgattgatgagcatatgttgttaattagtgtattaatttctttacatatttgttggactgtgttcaagatcatatatatttttattctttacctttctttgattttactaaaaagaaactataatcaagtactaagacaaatgaagatgcaaataagttatatataaagctaaggtagaatttgaagaatttgctatgtggtagggtgggctatttggaatttgaagaatttgctatggtagggtgggctatttggaatttgaattatttggtatggtgcatgggtgtctagttcagattgtgaaaaatttgctatgacagggtgggctatttggaaggcaataaatgatgtgttttgaaatggtaaggttgttacagcaccaaaggtggtccgttaagcccttgactaattaatggagaaatgctcaagcaaacaagcagtcctcattgttagttttatgatcaactaatagtctaataataatagtcatgagcattggtctaaaccatgtagatcatgaaaaggtcaaagtgaatgtggatgaagctctttttgtgattatggtttgttttggaatggggtgtttagctcgcggtcaagatggacacatgttggaggcgtttcgtactagttggtttggcgggggtgcagcctaagattgctgaagtaatcagtgttaaaaaggcggcgcttaactggatcaacgcaaggggtgaaatgaggtggcaatgaaaattgattctttagtagtggttcaagcggtgtcatttgatttgttagtttaagattgtaagatgtatattgtcttatttgaaaaaagttttttttatattttacgaaatgatgtgtaagtaaggtcactcattcactattcactagtgagtgagtcttgtgagtattgttttatattagattacatgtttaatgtgcataatgttacttcatatttgatgtctattaattatcaatgaagatttgtttttaattaaaaaaaaaaaaaattaaaaagttatataaagttaaaatataatttataaagaaaatgtctcatatgtcatcgttgccatttttatctttttaatta

SEQ ID NO: 317547 - DNA, 1149 bp, Cannabis indica
aaagtctaacatggataaaaattcaggggtatgatttggtacatgtcaaaattcgaatagcatgatttggtagatatcaaagtctggagagcatgatttaatacataaacaatcaccaaattagtaaaattaaataaaatataacaaaagtccttaaatccaacaatctcaataattcatagaaaatttttaacggtcagaaaagtttaagaatcgtgatttggtacatgatttgcttactctttcatgttttacatggctgagtatctttgttggcaatgaaaagttattgcatcaatggacctaaactcataaacttcttactctgatttggatagcttgcattgcatatactgatttctgagttgtgtgtgtattgtaggggcatccaaatgtaaaagcaatccattcatctaaagctgttggagagcccccattctttctagcatcagcagtgttctttgcaatcaaagatgccattgcagcttcaagagcagaagtggggaacactgactggttccctcttgataatccagctacaccagaaagaatccgaatggcttgtttagatgaattcacagcgcctttcattggttccgattttcagcctaaacttagcgtctagttcgacgctctctcctctagtagtctaataaaaaatgtatcaaatttagcgcatgttaaaaattgtgctaaatttgatacaacaagatgtagtattgtatcaaatttagctcacaataaattttacgttttttatttattatagtaccattatgatttttggtaaacaagtacatgtatattccatcctcaacaatatgtacaaagatttttgcttaaacagactatacaaattaaacaaattattttctttatgtctaagactttaattctaatacaaacaacttgtttaacattttgcacaaatctctttacattagggaactctttatcctaaaatatcttgttcttagttctctctacaaaaatacatcttcactaaaaataataaactacttttgtggttttttaaatttatttataattgtcatgaatttttttttttagtttttcttttggtgttttatagatgatttatagttgtcgtgaagttaatttcttattatttttcagtttttttttttt

SEQ ID NO: 317548 - DNA, 1168 bp, Cannabis indica
acttacatatatagtgaaaaataagagaaagattacaaaaatattgtgatacggagaattttatatttctgttgttcttaggtttttttttttttttttctacagtgactaggctaaaacgagtgaaacctcatcactctctctctttcttccttcttcttcctctttcttctttttgttctactatgttcttatgtcaaagaggaacagttgatctcatatggtatcaaagccatttccaccattatcggtgaacatggcaagcactgccattggtaattctagttctggccttcgtactcctcaaccaggatctggaactcaaaacagagatgcacagatggatacatagtctacttcactcacacagtttcgatcaagctaaatgatcacaatttccttttatagaaacagtaaatccttactgctattcgaggcaagtggcttcagagatccattcaagatgtggctccacctcctcaatttctcagtgatgttgatcaagccaatcagatcttcaaccccgcctttcttgattaatgggaggtccaggatcaactcttggtgtcatggttactgtcattgatgaatgaaagtcggctaactggaatggtaggatgcaacattgtgcgccagatctagagcactcttgaaaagcatctcacacttcaagtctcatcaaagattcttgagttttgtacaaaactttagaatctaagaaaaggatcactgtcactcaatgattatatactgaaagtgatatagcatgttgatctattagcttcagttggagaagttcttagttctcaagatcatgttactactatctttaagggactaccaaatgaatatgcactactacaaaattggattttagtgacactctttagtgacacgcacaaaagtgcatgtcactaaaaatttaagggcgagttttagtgacacgcacaaaatgactacaaatttagtgttagtgtcccataatgcatgtcattaaaaatatgaggtgtcactaaagagtaactcccaaaatttatattatttttttaaaaaaataaatattggcttacagtgacacccaaacgcgattgggtaaacataccccaacacacttagcgtgtcactatatcatgtattaaaataatcttttaatttatccaaaaaaaaa

SEQ ID NO: 317549 - DNA, 778 bp, Cannabis indica
atgaatgttccctgattcatgttaatgattgagggtaaaacttcagacaacttactatacatcatcttagagatgcatttatagaggatattagaacaagcaattggcctataatcaatagcttgagatagtttatatgtcttcaaaatcaaagagaggagagtattatttagctgagcatgaatctttcctgtttcaaaaaataacagcacaaccttagagatttcctcaccaatgtcaacccataacactttccattaggacatgggcttttcacctcatgaatatcaatataaaactttcttaacatcgagctagtaaaaggcttaattagtggtgtaaagttgttagagaattttggattttttagtagtgaacccaaaaaccccaagattgagataaagggattgagagagagagagagtggtgagaaagagagaaggggatcgcaattctccagtctctgttcaaagttacgacgtcgaagattgcgcaaaggctttgtcgattagatcaattacgagagagaaaaagattgaggaagagagagtttaggaaggggattttctgggtttatagggtcagagcttgtagtggtccatgggcaaaccctaaaaccctaaaccctaaatcctaaactcagaaacccaaatcccaaaccccaaaccctaaacccaacacccaacaacctgaaccctgaccctaacacagaccattaggtggtgtttggttagaagtaatgaaatgaaatggaaaaaaaaataattttcattctatt

SEQ ID NO: 317550 - DNA, 1833 bp, Cannabis indica
gtttgctcctactaatctgtctcttgcagaaaacacaatacacagtgctgaacatgaagttacatcttcatctggtgccattgctactgctcatgacagcaaccaggccactgctacagctgctgcccctggtacaacacctgaaactgctgctgcaacattacccttgtctcccattcctgctgaaccagttgtcaactctcaccctatgacaacccgagccaagtctgggattaagaagcctaaggtactcatgacctctcttcttcccaaatctgtcaagaaagctttaagtgatcctaagtggcttgctgccatgtctgatgaaaaccttgccctaaaaaagaacaagacatacacattggtaccccttccaccaggccgtgaaccaataggctgcaaatgggtttttcggatcaaagaaaattcagatggttcagttagcaggttaaaagctagactcgttgcaaaagggtatcaccaacaagcgggatttgattttcatgaaacatttagtccggttgtaaagcctatcactataagagttgttctaaccattgccttagccaaaggttggacggttaggcaattagatgttaataatgcatttctcaatggagacttgcatgaagacatctacatggagcaacctcctggctttattgaccccgatcatcctacaaaagtgtgcaagttgcacaaagccatttatggcctcaaacaagctcctcgcgcttggtttgagaagttgtccacagtccttttgcaacttggttttactccggctaaaacagatcattctctatttactttacaaacatccaccaacaccatctatatactcatctatgtcgatgatatcttgattacaggcagcaacaacaaccttatttcctcacttatctcagacctgagctccaagtttgctttaaaagatctcggagtaatggatttcttccttggaatccaagttgttcctactgccaatggagttgttctttctcagcaaaaatatattcaagatattatctgcaaggctgaaatgcaaggagttaaaactcaaaagtctcccatgaatagtggacttcgtttatcaagctatggcagtgaaccggtagctgatgctacttcttatcgatcgcttgttggtgctttacaatatgctacaataaccaggcctgacattgcatttagtgtcaataaagtgtgtcaatttatgcaatctcctttgcaatcacatcttgtggctgtcaaacgcattattcgatacttggctggcacacttgactatggtttacacctcaaacgccccacttcgctggacattgaagccttttgtgatgcggattgggcggctgatcccgatgacaggagatcgacaactggttattgcatattttttggtggaaatttgattggctggcagtccaaaaagcagcaaactatctctcgttcttcaactgaggctgagtatcgcagcctcgctgctgttgtcactgaagtcagctggcttcagtccttgctgtctgaattgcaccagcttccttccacaccacctgttatctggtgtgataacctcagtgctgtgcatctttcagctaaccctattctccatgctcggactaaacatattgaaattgacattcactatgtccgtgacaaagtgcagctcaaacagatttcagttcagcatgttcctgctgaacaacagcttgccgattctctcacaaaaccaatctccagttctcggttctcttttcttcgtgacaaacttggtgtggcttgtttcaccaccctaagtttgaaggggctgttaagagaccctagtttgtt

SEQ ID NO: 317551 - DNA, 560 bp, Cannabis indica
aaatgtaaaaaataaaaaaaatcctaataatatctctttaaatactaataacaataatattatctttaattaattgatatagtctcatcaaataaaactaaatagttaaatatcattttaattatttaatttataaattatataactattcaaaataataatttatactaaaattattattttgccctgaagaattatttctcataaagattaattctttcttaattcattcataaaattaaatcttcttcagtacatcgttgcatagaagtgaactattcaaaataataatttatactaaaattactattttgccctggagaattatttctcatagaaattaattcctccttaattcattcataaaattaaatcttctccagtacatcgttgcatagaggtgatttgggaaccatggacctatattttgaatttccaataaacgcttgatattattgaacttgaatataataatccgatttattaatatcattattgctccactataaatatgtgttgctccaaaattcgcccaaaatacgtggaccagtcgagagggg

SEQ ID NO: 317552 - DNA, 3085 bp, Cannabis indica
tttattaaattgcacacacgtggcgtccctgttggacagggcgttacatgagtagtagtaataataataataataaaacaaaataagaataaaagttacaataagaaagttatttttttaattatagttaagtgctttaaaaagttgatgagttagtaaaagataaaatattaaactttatttctttactaccatattatcatataaattatgtacaatgtaagggttagagaattgtcaaaatatcataccctcctaacaataagaaattaactttttaaagatgtatatatatagaataattctatggtggtgactatatttttgttcctatactatacatacactctcttaaccattcatttatatgacttttaaaagtcaacaatctgtaacatgtagttgtttgtaggttattaaaacttcttttttaaaaaaaaaaaatctgacacccaattaaaaaaaatagcaatcaatcaaaattaattttttttcttttaaaaaaccaatttttaatctttatctttctcatataatctatttttttttcctctctcctttctcatcatcaacatcatgcccctttttcatatagatgttgcggtggcatcatgaagttctctcacataagtaatcgttatcctcaaattcacagagatgctgcagtggtatcatggcaggagaaaaaaaaattaaactctacagtttggtaaaataatcacaaatacaaataaaatgaggggattttacatgagatgtggatctatctttgcgttttatctctaccatcgtaagagccaccgtatcccaccagaccagggcatcctcctggaattggaatgttgcataagccactatgtcgttgctggtgactcccataaaattcagaatccgagtaataacagtcaaccactatttagctttcataacatctagacctcccaaaaagactggaggtgcctgcttgcggaacttttcatacagtggttccatcacaataacaaccagcattgcctgcacaacaggacaggagcaacctacaccatagaagcaggcattgcaagagccccctgctgcttcaaccatctgatctctttgtcttgttcattaattctggcttgcatggctgcaaacatgttctcccaatcatgggcaacctgtggtgggttaacatttcctcgaccacgtgcgggcctctgcctctaccacaaatgtttgggggaaactaaactccctaaccgccactagatctaatcaaattaatctacttcttgtgttccgtctggcgtctattctaataaaattgcctgggaaaccaagaactagcctggtcaaatcgcgattaagaattatttactaattaccacttactttagaaattaaaacatggacctatttagctatcaagctactaacatgcttcctatcaggcttttcttagaacatactaataaagcaaataaagcaaactactaaagcaataaaggcttacttaaccgtgagttgagcttatctctgatgatgattgtacatgtcgtgacgatcttcagaagacaacctggtagctctgataccaaattgtaacaccttactagttttggcgtgttatcgtgcttttatattaattgtgtaatctcttgctaatcaatgggtttattgaaaatcatgattaatttaaactttacccaattatccttaaattgaaaataaataacttttatatgaaccgagatcccgtatttaaaatattaacaaatgtgatacaaaagttgttgcctagcgactataaaaaatacagcctgttgtcctaaagatcgtacactctaggtcttaccgccctgacatgtacaatcttcattcgctcacactcacttttgtttagccttagctttgcccttacctacacattaaaaacacacaactgtgagttgacagattcagtaagaaaagcataagtatattataaacataaaccaaattaaaattaggcactcatacacccaatcataactctatccctgcatcccacacgatactgagtctagaacgttcgtacgacagtactattgaccataatatcagcctatactcagtactctagtcgtatcaatgtgatagcgttaaccagtacttatgccaaacatacattcatcggtatctaatataactctatgtatattgataccgctattttaatgtaatctaacaggcaatcataaacatgcatactaaacatgtaatcacatatgcctataactatactaatcttacctctattctgaatttaggtgtgccggtcaacttaagtagaattgctgctcgatgatttacaggctcctaagttacaatattcataaaacagatgagtgatatgctaaataacttttctgggacttaaaatcaaactaaaagttttcctatcgatggataacatggcaatactctaaatatattaaaaacacaaaaatctagggtaccctaaacttccccaaccaataaatcggacccaaactggaaaactagtttctaagtgtgttgccatcggaaccggtcggccgattccacagtgcaaaactgaactggtcaaccgatttagtgcaggaactgcataatttcacacacaccttaaatcaaccccaaatcgtacaaaaccttctagagtacctaaaaataccataatgaacttaaatcatgcaataaaaccaagcaatactctcagaaaccaaaaacaccatggaagaggcaaagtttgagctcttaagctcaaactttgtccaaacacaaccacaagcatcaaatcctacttaaattagctctaacaactacaattcaaccttagaaaacaaaaccaaactcaatttgcacctacagtctcctaacctcaaaagttgcatgaatatctaaacttaaaaaccataaaatttaaaagaaaaggagagggagctggcttacattgagttgactcttaaagatactaccaaatccagctaaacaccatgaaattgagttcaaaaccctagtttttctgctgggtttcttgagaggtcgagagagagagagagggagttggagagagagagagaga

SEQ ID NO: 317553 - DNA, 887 bp, Cannabis indica
tatttttgttttttcaaaaaatttcaagctttttcttacgaaaaaaccattctgattttgcaaagttttgtatgccctccttgtcattgacgtattttctgcgcatccatttggatatacttttcaacctcaggaattcacagaagttgtcacgttactcatcccaacctcagtttcagagcttttcgtcgcgcgaaaacccattttcgaacagtatgtgattcatccccttttctttggtcttttccattttcctgggttatgatccttattctgttaaataatttcatctctgcttgatccatttggttttagtaatttagttttaccgtatttataagtttctggtttaataaatttcttccaagaattgggattgctcttttttgtagaaatgccccaatctggttttaaagtttattctccagaatccttagaaatagagtgtcctaaggaatcggccctcccatttaaacccaaaacccagaaacctcaatccttacttgaagtaaatgatgcaaagattagggaccatttaataaaaaccaatcaggatgaagttgctagttgttatagacaatttctacaagagatatatgagggtaaacgccgtttcttgtgagacgcagcttggcctgaacctctattttattttttattccactcacgaggccaatgtttttacccaaagtcactattgttttttcaccaggtgaccttgaatttgacattatgtctactaagcctcgtaagtcaatgatcccataggatcccaatatcactttcgatgctgaacttatcgaatccaaggtcagatgcatcagagcatttgttggtggtatattaaaatcatgtggtattgaacaaaggtgtggatgtcgcattag

SEQ ID NO: 317554 - DNA, 1311 bp, Cannabis indica
attataaataaaatataaaaaaagagtacttttgaaagcttctcataaatatatgcacccaaatactaaattttttatgagtcttaattagatgtaattagctaaaaaaatactactgtgtagataatgacagagccactcaatgagtaggagcatgtagccctccaattccaaacaaaaaaaaatcttacatattaaatttataaaaaaaatataataattatgtatagttaataacaatttaccttccaaataaattttttaactcgataaacttatacaaaaatatagcatatttatatattttttattttattttttaattttaaaacaaaattaattaataaaaagtttagaaattcaaccttcatgaaaatggcatcaccatttgaaatcttctcaaacatatctccttccacatgttcaacacctgcaacaatatatataattagaattaattaaaattatataattactattttagctaatttttttaaattaaaaaatatactattttgaatttcgtattttataaaagttacagattggatcttttattttattaaatgacaaattgaagtctgtatttttcaaaatagtactaaatagtactctgaactgattttttgtcaaaataaaacttaataataacccaatctaaaagtattataacaaaactaattatattttctacatccattcatgatagaaattatcttcaagttgattataataataaaaataaaaaaattattaaaaattaagatcaaggttctattattttaaaaaacttaggatctattttattatttaacaaaataaaagatctaatcaataatttttataaaacacagaatctaaaataatattaactataaataaataacatttacctggataagtaggggcatttttgatgatatgaggtaagtcaaaattaatagccttaatttgaggatattttgaaacaattaagctaattgtgactccacagcctccaccaacatctactaatgtctcaatattattctcaaaccctttgtaacactcaattaatttcttggtaacaactatggcttgattgtacattactgagttaaatacttcaccaaatcttggatctaattttccatactcaaacacattcattccgtgagcccttttgaacgctgaccctccttccagaactgcgtttttcaactcgaacctaaaaaaagaatatgagaagtgttactatcaatcttctattacaacttcttagttaatctccgtgtttgaaaatacatactggaatatttttttcaatttttt

SEQ ID NO: 317555 - DNA, 507 bp, Cannabis indica
caacgatatgatgtactaacacactaattaagtgtaatgttttgtataatatattgaccaagtagataagatcaaatcagatgtattttttacatcaaatttggattgattataattattgaatttaatcagtacactactacaaaaagtactattctcgtcgatcttcaaattgatttttgtaagaccaccattaataaaagtaagtgactgtttaaaacagtacactataattaagtattctcgacaattttaaatagtcatttagtattcttgatggttttaaatagttacaagatgaaaattgaaacaaggtgttttaaagggaatccccaacaatttatttttacatttcaaaacaatttttttttgtatttttacagaattctacatagaaacccctattgcaactagcgctccaacttaaatcgcataaaaaaattgtatagcaacccacatagaaaccaccggagaaactactttagaaacccaaaccgtaaatttgaa

SEQ ID NO: 317556 - DNA, 1420 bp, Cannabis indica
atggggtttcgttttcggtcatatttatcagttgttggaaaaagaattatcaatttttgcatggaaaaaacttacatgtaaaaaagaaaagggaaaatatgtggtggaatgcataccgagaatttttcattgctaaactagctataggctttttaataatcacattgaaaattgaatgcttccatattcaattattaaatattcatttgttaattttttttttttttctattttaaccgtttgtgggatgtctttgaagagttgtgtgacaatatcaaagatttgacagtctatctaatgttatttatttcttaattttttctcttttatatttttgttgggggtttctttgttgaattgtgtgactctatcgaagattaatcgacagtcgtaagaggttatgtgcttccaatcaggggtggtggtgtggattcatgcaaagttggtgatgatgtagctctgtttggatccgaagtgggctcttggatatatcttcttgggttggggctacgttacgggggttcacaaagaagtggtccatcaatattcaatactagtgtttcaagattgaagggggtatggtttgagatttgggtcatggctctgctgtgttttttatattttattttattgtttctttgttttttgtattttcaataagagtctcattattagtgttcttaaatatatttgtaaaaaagataaaataaaataatatatttttaagtgatgtaaaaatttttaacactcttataaaaggccaatattaaacatgttcttaaatatatttgacattcaattgttaatttattttgtgtgagatttatcgtgccttctttagcacggactattaacaatatatatttaaattttatcttatgttaatttccaatgttgctaacttaatatatttatttattaattattaaatacagttatcgaaagttaatattttattattacttgttacgtacgtactactagcaaaggccaataatatataggtcagcagcaaccggccgtttcttaagttaattatagtacctacgtattgaagatctaaaagaaactaaaacatttgaccatttcttattcaaatttattgtgccccaaaatatagtttggtttttaatttcagttcaaaaaacgaaacatacagtgaaatttccttgtattgactaattatttacaatataaaaaaattacaattcatgtcaatattacatataaaatggctaataagacttaagacttaagattttcctttaaaaaaaaacaaaaaaatcgtgcagtcatgctttgtgtataatatttggaaattattataataaatcagatcaattcaacatcacattcacaacatgtcttattcttttgtcacgtgtgtacgtagtaggcaactaatcaaataattaatatg

SEQ ID NO: 317557 - DNA, 525 bp, Cannabis indica
aaacctgacacctcgcggagatgccgtagtgttatgtgagcttccgggagcaccttgagctccatgtgccttctccaggacctacgtccgggacgtcaccttatggcataaaagacttaacaaatattgtgaattgccttgatccacgtgtccctgtccggttggtccacgtatattgggcaaaattaggggcaacatgaaaattgaaaaaaaaaatgaagttggggaaaaatcccacaacattcaggtggctgccctgtccgcgcgcgctaagaggagattgcagggtgtcttgtgtggcaatcctcgacgccaacagcctcagcacaagggacacgacagggtcctgggtgtgttgcatgtctgaatgccaaccgagacatggcttcaggcaggggattgttcccctttctgcgcgcgcatgactactccttgtccgagtgcctggtgcacacgagcacccacttgacacctcttaaacccaaaattttcaaacattcataactttttcaatttttatcggaa

SEQ ID NO: 317558 - DNA, 1704 bp, Cannabis indica
ctctctctctctctcttcaaagagacaatactagaatagtataataagctaatcacaatctcacatatgatgtgatgagataataccctcttttttcctttttaagtgacttcttcttcttcttcttcttacatttctactaaaaaataaaaaatgtccttttttaccagctcaatttgagatgagagagtaaagattcaatttttagtaagtgcccataacataaatatggcatgtgaagtgataaaactgtaacacattcattaaatgaatgtttaatttggtttaaatcatttctcttcaattcatttggagattaaattttgatcaataaaactacactaatgacaaaattgacatgttaaattctttctaaatatttactacttttttcccactcatatttatagagattatatacaatttcatatactggtttcttttcaacattagctcttatagtttaacaaaggcaacaccaaaatcgtctcaagggaattgttctttctaaacctcccaagataatacatatttaattcaccacataattgaagcttactctttcttacaacaaatcttgaatagcatattccttaagtctcacaactcatgtgtaagagacgtggcttcttcaataaatgagaaaccaaactaatctcaacaaatcaaatatatttatatataatcaatgcacatccattcaacataaacatatttttaatggtagattgataagttcctaaaaggtgttaaaggccttatacaactttctactgttgtataagttttaattgctaaggtaaggttgacaattaaatggctaaaccataagcatgaacagtaggaaataggaatataatagctactggttactattttggattcaactaagaaaaaactctcaaaaactttatagacatgaagaatctgcacaagttccatactttgagcacctctaccactaaattcaaatcaacctgagcaaatctctctttctcacaatattgggaacagcagttaactaaaagagaacaaaggaagaccaacactacattcaatcccatcctgtacagccaaaatatgctgacatcaaccaaaccaagacaactcaatgcaaaaatgtagatcactgttaggccttcagattagtatggtgggctaacatatattaaataaaagggtgattgagtctttgtattgaaggagtgttttggagggaatacaatagtatatatagaatattaaggggaattgagtggtatgcaatggttgagtaaatctctatttgcaccaaaagagcctaagggctcctatcctttgtaattgggtttctcatacattcaatatacatttcctattgtttgctactgttctactcctattattgctactgttttattgtgttcttgagttggagttctcgggtctcatcaattggtatcagagcgagcgattccgatggacgccgacgactcgaatggagatattagaggatcaatggagatcggagtcttatgattatccctctgaatttaatacactggaggaccttgcctcgcttttggatcaagtacttcttgggcaagtaaggttactccgcgtctcccgcgatctccgaagtcatgtcacaacaagatcggaggacaacgatctcaatgagtggatccaccaagctgtgcaatctgttcgggttcgcaaccaaga

SEQ ID NO: 317559 - DNA, 877 bp, Cannabis indica
gagtgcaaaaattgggataacgaaacccaaacttcatctatctccctctcttcctcttttttcgtctctctccctctctcgttcatctcgttctggttcgagatgccaccattggtccaactggaggccatggatggccttgctgctcttaaatccaaatttccatcttcgtcatcatcaccatccaaacaatactgatcaaatcgccttagagtcgctggccacgtcactggggtggcggaggagaaggtggaatggtggtcctttcaaggcctcggagttcgcagaaggctggaccaaagctttctgctccacccccttgaaccttccttcattgcaaggaacatgaaaaatttggttctttgggctctagtggtgggccgactggagattttatggtaggatttcaaaataataaataaaataatgaaaatatatatagatttatatatatatgatgagaaataggagattttctactattggatttttggcattctttctcctattctactttccccatccagcttctcacaaatattggggatggatttgatttaatttttttgtttgttgttatggaacttggtaggtttgatttatatcttggcatgtttgggtttgtttgattatgttgttgtgcttgagttagggtggagtttgcgatagttgtggttgttttagatttaaaaaagaggttacagtggtggttgtggtggacatttgtggtggatggtggcggtgtcgcatccgtggtggtgatgaatggtgaagaaaaaaaaatgcattcagaaaaataaagattaaggaggaagagaaaaaaaaaattatgatttttttaattaatagtttttttaataactgaaaagaaaaaaaa

SEQ ID NO: 317560 - DNA, 1181 bp, Cannabis indica
tttgggtctgggtctgggtcctaagtctgggtccgggtctcaatccgggtcaggattcaggtcccaagtctcggtccaagttcgggtttgggtcctaggtcagggttcaggtccgggccacgatcccagtccgggtccaactctgggtctaggtcccgggttaaggttcgggtctcaggtccgagtcctgggtcagggttcgggtcctaggtctcgggtcccgggtcttggtccgggtttgggtcccggctcccgggttccaatccgagtttgggtcctaggtcccgggtcccgagttccagtccgagtttgggtcctgggtcccgggtcccggtttgggtccgagtttggatcctgagtccgaatttgggcccggaccaggtctaggtcccgggtccgggtccgggtgtgggtttgggtcccgggttcgggtctaggtctcgggtctaggtccgggtcccggttcccgagtcagggttcgggtcccggtcctgagtcagggtccgggtcccggtcccgagtcagggtccaggtcccagtctcggtctcgagtcccgagttagggtctgggtcccgagtcagggtccaagtcccggtctcggtcccaagtctcggtctgggtctcgggtctcgagttcggtcctagtcttgggtctcgatctaggttcagggccaggccaggtctgggttcgggtccgagtctgggtctcgggtcctagtccgggtttgggtcccgggtcctgatcccgatctgggtcccgggtccaggtctgggtacgggtccgggtcccggtttggtccggtcccaatttttgtcccggtttgagggttttcaggttcgagggtttctttctctctggaaaacttgaaaaattttggtgaaagtctgaaagtaaccaaatgaagtgagaatggtggcttttctaggccaaagcgcatgtggaacaggggcgatcatctaccaatcgtgcagttgggaaggcacacgattcgaattcccaggatccaacggctgaattggtttgtcatcaaggcggtggaaacgcttgagtgtccgtctgacacccattaatgtgtcgtatcaattaatggacaagaaacgaatcgacgcctgcaaaaagtgaatcgctgcagtaatggtgatcattaaatacaccttcacgcgcctaaagcacgtgcca

SEQ ID NO: 317561 - DNA, 782 bp, Cannabis indica
caagttagtcctcaatcatagtgtgtaagactgtgaagaatccaaacaactgaagtagtgttgggctcagatcttgattatactctactacagaaaggatacaagtattagatatctgagtggaatgagtcatttaattctgctgcaaccaatataaggtttctcataccttttatgtatttaatttttatcgttttagaagtttatatttaggatgttaaaaacatacttgttagtaaatttaggtcctagtaaaatattttttaatagttactacataaatcgggaatatgactatagcaagcacaccctataaaaaatgtacaccgatcaactgttgcagcaggctttacaaaattttaaaacattaggctgaccacacaagtgaaccactgagactaagccaacataaggccacccgtcaaccaagtatggctaacaaaggccaagctcttgccaacttcatggctaatcatagaagcatatctccccaaatctctcaaagctaaggagaaaagcaagagctagagaagaagtggaagcaagagcaaaataactcaacccaataggcacattgatcactcttgggggcaatggatgcaataggcaacaaggccagttttaaagcttctagcaacgaggttgaacatgaagctccaaatgttgacctcatgctagcacacgaagcgtaggctgaccacctagacatacaccatgaatctcaactagtcataggttatgtcctaggtgaatatacaactcaatataagaagatgatggcc

SEQ ID NO: 317562 - DNA, 1981 bp, Cannabis indica
agggaaaaattgattgtaggcttcattttaatgaagaatatgtttatggaaaatgttgtagcagaaattcagcattggaaaatacaccaccatagacccacttggctacatacattcaaattgtagggtccctcaaaagtgtcaagtttgggaatatcaaattactttttgagtattgtggatgtttactcaagaaaggtatgggtgcacttgctcaaaaccgaagattaagctttcaaaactttcaaggattggaaaactctagttaaaaaccaaactggaaagaaagataagaaatcaaggacaacaatgatttggaatttcgctccacacaattttaaaactattgcaaagaagttgggattaggggacacaaatcagaaccgaggactccatagtaaaatggcttagctgagaggatgaatagaatcttattaaaagggttagatgtatattaaagagtactggtttagaaagaaggttatggggagaagctattaaaatagcttggtacttggtgaacagagtccatctattgcaattggatttaaaaatccacaagaaatgtggacagttcaagctccaagtctagaaaatttgagggtgtttggatgcatttgatatgtgcgtgtcaaataggacaagttgcagcctagaacaatcaagtgcatgtttctagggtatcttgatggagttaaaggatacaagctatggtgactagaagaaggtttcaagaaatgtataatgagtagagatgtgatcttcaatgagaaagtaatggccatgaaaccagaaaacaaaggtgagattagcattgaggctagacaagtataagtagaggtaagatcaaaaggaaatccaagtgacaatattgaacaagactctataaaagaaacagttcacactcaagacagctctcttgatacctatcaactagctagagaaaggtttggttttgcagactacgctgcaatgcattaacctagctaatgaaattgagaatgctgaacttccaacttatgaaaaagctatcaattgcaagaacagagacaagtggctgcagtcaattgatgaggaaaaataatcattgatgaagaatgaggatggactactgttagaaaaccaaaagaatgtaaattgatcaattgtaaatggatcttcattgaaaaggaggggttgtcaagtaataattgcaagagatacaaggccaaacttgtggccaaaggatttactcaaagagaaggagtagatttcaatgaaatcttcttacctgttgtaaaacatgcctcaattagagaaattatggctaaagaagcttctaaggatctagaaattgagcaaatggatttcaagactgcatttcttcatgggaaactatatgagatcatatacatgaagatgccataaggttttgatgacgataaagatatggtttgtttgctgtagaaatctctctatgggctgaaacaagctccaaggcaatggaatctcggatttgatgatttcatgatgagaagtggcttcaccaagagtgcatatgatccatgtgtatactttaatggtacactctttcttcttctctatgttgatgacatatttttaatagcgaaaggtaaaagtaagattagagaaatgaagtcactattgaagtctgaattcaagatgaaagacctaggtgaagctaaggaaatactaggcattgaaatcagaggatataaacatgcatctctgactttgacacaagaaaactaccttagaaaggtactacatatgttcaaaatggataactcaaaatactagacatttcaaactgtccaaagatcaagctcccaaaacaaaataggaaagagagctcatggactcagcaccctatgctagtggggttggaagttttatgtatgctatggtctgtacaagccagacataacatatgcaatgagcattgttagtaggttcattgcagaccctggagagaagcatt

SEQ ID NO: 317563 - DNA, 799 bp, Cannabis indica
tctttttcttatatatattccactttaaccatacttctttagcggcaaagacaattaaactttgccctggccgtggggcagtataatagtatatagagtcctttttttgttgttccttacttagatatttggtgtggttgacttttaggggctggttatgttattggagcacgtggttcaaatggccagtgtttcaaccttttcccgttagtcttaagtatctcttgatcgatttttgaactgctttctggcttgatctttcctttcacgagattgtgacactttttagcccaccactcaaaaagttattcatttatagttacccgcagatggctcctttctacaaaattagatctttttcaatttacacacatccttttcagggtttgtttcattcacgaggtcaagttctgggagtgatctctgtgactgccttagcgttaagcatttttccctctttggtccttgctagcctaacgttttatctaatcattgaatctgatgagctaaacttatgcgaagtccacagagatgtgtaagaaggaattttggcataaatatctctgggttcgtgcttgggtttagcctttgaggaaagaattcaagggcatttctcatggggagacatagttgaaaatgtttcctcttactggttgcatctgcacactgaggctcgtcaactttggacataaggagttgcgattttcaacaattggacacaccatactgttgggttttatgccgtaaataaaactccatttcaatgtaatccagattattcaatatcaataaagtaata

SEQ ID NO: 317564 - DNA, 981 bp, Cannabis indica
aattctggtgttgaatctttgattttgttttttatatttaagcttaaatcaagataaaatcaatcaaaatatgaaaaagataggttagataagaacttggggtttacacatgacttctcgatctgagagaaatagaagtaccctgacctattctgcttggggcttgactttagataaaaaagacaattggtatcaaggggagacagctcaccccatccttgtgaggcgtagagtatgatcagggcgaacaaatacttaaggcccttggaggtgaacttggtcgaacttatgtggttgtagttggctattttcttaaactatgggaggagaggtagcattgcaccctgtttggtgtcagctcccgaccaagcacaataaccatctccagggtcagtggctagttggcttggggagggaaggaagaattcgacatccccaaagagaccacaatcgaatagattaatcaacttcatcatggtcaccacggatggtggggaaatccatcaatctgctgatgaactttgcctcctcaaaggaatagcctcgatgtattctgcaacaacatggctctcctttatcattgtagccaccaaatggtagcacccaggctactctctcttcctcatctccttgagcatcaggaggagtggcaggacagacctcgccctagtcctccacatctaggattttgctatccccggcagtgtcctcctcttcagtagcaggacgggcctgttctgccctaggcagactggctaggcgagcaatgtccaggtcatttaatgaagacttcctaacagtctatttattccgcgtcagcatcctacgcttgggtggaactttatcaaaagtgtgcctaacaatagtcccggataaaatggcaacaggtttacccgcatccacagggtttggacggccctcgggtagggtttcgactgttggaaattattttaccaggaacttagatctactcacaagtat

SEQ ID NO: 317565 - DNA, 681 bp, Cannabis indica
tacaaaacaacctaaatatattaaaacagaaataaaaaatgtatcaatgatttttcaatatttaattatatggtcagatactgtaatttctggtcacggactagtgatattgtaataatcaatggtagctagctcacgagaattgttgcagcaaattaacgtcgtccacgtggatccatgcatgcatgcaatgtgtaacgtatatagtactacatatacaaccactctactgatcatgtatatataaacttaacgtataattaatattacgatcattttatattattattattataatatcgaatatatcatgatgaagggattctctattgctaatttcagctttatcatatttgtgttagtattaatgttagccacgttattgtcattagacaaaaatggctcctgtctttgcatgaaattattatcagatggtcgtaataatagtaataataaatattactatttcaatattcgtagaaagttgattagtaatgctgattgtgatgatgatgataataatccagataatggttatgatcatgatcaaggagatgaaaataataataataacaataatgtagaagatggagatggcggcagcagtagcggtagcggtagtggtggtggaggtggcggaggaggaggaggaggaggaggtggtaatggaggtggatatgg

SEQ ID NO: 317566 - DNA, 2186 bp, Cannabis indica
cccgttttaagggggtgcattgtagaatcaccctaaaattttagtgtacgcttgaaaaagaaaattaaaacgttttaatttttgatcaaaataacttagagtacttccaataattttttacttaagttttttaaaatacataagtaaaattttattttttttattttattttaaatttttcacattaaatcatagataagtttctctacttactcacaaacatcatttaaataatacatctttttaatatgtatatatttaaaatacatattatcaagataggaataaataatttaaatactattaattatttttaaaagagcaataatgtttatcaattatcatctctggttgagtatgattttaaggaatagctttacttagactgacagaagttgtagtgagttattaattagttatttaaaagtatagccgtatgattacagaaatatattaacaagatattttgcggttaattttcatatattattattatttttttttacagaaatgagagtcaacgcgcacgtgtaattgaaatggcaccgtcaagatcttatcaggagtagaaacgaatgtacaaaaaaatgaataatgatgttggagatgatcatgtaatcccaagaagcggtttacacaacaagaatctggaaaataataataatgcccagcccagcctcttctcatcggcaacttgtccccatctcaattctaactatatatgtagattttagaagactaatttgcagttgtaatactaagtttagctcccagtttttttacagcattaatatcttccctaagagtttttgtacttccgttgatatttggccggttaagtagttagtactcacgtgacacttttttttttgaataaatattagaattttattaattgtaatcaattaaaataatagtacgttgtaattcaacggaaatatctctctatttaagtcaggactaacattaaaactaaaagactaattaaataatcagccgcctatttttaaattgtttgacaaaaaattaaatgaaaaaattacggcattacaattaacattaagaatacttatattatgttttatccaccactcaaaatacataacaatagaaattgttgcagcagattcattcaaccttgtagcttgagcacacaactattgtgtcaggcacgtaactgcactactaaaaatctcttcagtcatagaaaacttgttattctcaactgttaggtctttttttttagcaaattagttgtcaaaatattatttaatttattgtaaattaaattgattttattgtgttgatttcgtgcctctaattgctcttttcttctaagaaaagttttattctcggctggttttatttgtttaagaatattgtcttacaacggaagggattctcttatagaaagttgtctatttgtgggaaacttgactttctttttttctaattgttgaattcggttttgccatgattatatcagatcaaataaactttatttggcaggtattgaacatcaatttgtgatcttggtccattttggaaagttttctttctggtgctaatctgatgctacagaatttgaatttgatgatacaaattagggattttttaggaaagttttggacaactttgaaaacgtgtttgtggctatctctaggatttctatattctataaaaaggatctagagagcaactaaacatttctaatctcttttagtctcatattttcatattttatctttgtgagaagagtgtttcatttgtaaaaacttagagtgttcaattaagttttggttttcttattatgatctcgtattattcatagaataagttgaagagaagctttgaacaagcgtgggtcttcaaaagaagacttttccaagtctcattttgagaggaagtgagcatatatcttcgagagaagatttgtttaagccttattttgggaagacgtaagtacgtatcaatagctgtagggagttcactactaggtgtggttcagagatcagattagcaaggtgaattacaaagggttacaacaaattattagagggagtctaaatttgtttaaatcgattgcttttgtaatcattaataatttaccaactgatttctttctctggcgtggccctgtagactaatagtgcttgaaagaatactgataccacgtacaattctct

SEQ ID NO: 317567 - DNA, 710 bp, Cannabis indica
accctaaaacatggtcccaataaggcccgaaattaatctcacctccacaaaacatatccacaaaatattcaatactccaatcatgcaagcggcgctctgcatgaccatttgcaaaatgccataaagacactatcacatcaagaggatttcgacttacataaacaattcgagatttctaacaatgttgatagaatcaggaagaaatgcatagggaatttgtgtagacatcgaacaagggcttggtgacctagtactcaactcctgtatcatcttaggattggcgtaaatcgtgaactcgaaagagggcactacgagatgaggggtggtggtggtgagcaagtgttggttacctcgtgatggtactggacactgctggtgaatgctcttattataatgatcatgtttgttacgttgagaatcgaaaacaaaagagccttgagccaagtgcatcctgatttgggaaaagaagccaagattatgtcttcatctttggcttcgaattgtttttggaaggtgatgacattgggaaggatattagatggaaaccagcaattttggtataagactaaaccatctttttttcaaccatttgctttggtgtcgtttagtaacaattttgttttctaattttttaatcagaaaatgaaagtaaaatttttgtttttaaaaattttgtttttgaaaaataaaaatgcgctctgtaaccactt

SEQ ID NO: 317568 - DNA, 2017 bp, Cannabis indica
atacgaatcaaaaaatataatggtaattatattaaagaatattaaaatggaataactcattaaatgcagagctaatagagtatacctataactcaccgactatacagtcttgagcgagacacgaatatacaaaccatttcgtatatgaagacacaatcataaggacagaatcattaatgtaaagcagggcatcaacctcgctatgcatgaagaaacatagacaagacatgatgactgttattttacttagcgtataatatgcattatacaaaataagtataacagtttgatgaatctgaacaatgactaacgaggtatcaatctcgctataggcaggcatactcctagtactttcactaatcagcttcagacatctttcaatgagatcaactactccgtcgagtcagctctctcagatagaagctgacattcaaatggtgttgactgctgaagttcaccttgtcaccaagaactgcgattgtcagatggagtgttatgtcttcaatagcagaaatgacaatatttttattatcaacctcgaaaaggcatagaaaaagcttcagctcgctctcagggtcattgttgctatctcggtgaggttactctgggagatacactttggagcatgtttaaatcacccgtcaacattgacccgataaatgcggataaatcacagctgtgtgatttttcagataataacaaaatttaatttacgtgggacataatcaaagccaacaattttaggggataattgttgtgggaaatcaatctgattgtaattcactacccgcctatgtaactgtaaataggggtaggtacactaaaaagggacagaaaatcctttagagaacgacccctagttttggattagaaatctaataagatacactcatggactatgcagaattttaactgcaaaaccgcgtaaaaaagctttgtgttatttcttttccttttactactattatttctgtgcaaatccatcacaaaatagtctttaatttagttaacaaaaatttgcgttatcagttgggtgcttttattgagagccttcgtgaaaaaagctcagaaaaaaccctcctaatcaaaagaaaaacctttctccatggccgataacggagaaaatgttgatacttatcctgaagagaccacccatcgtcgtggcggaaaagtgccaatggactctcggaggcctcctaactcacaatccatgtggaccactcgttctagaagcacccaacctgaaggtggtccaagtacacggtccatacgtttaaggaggacttagcatgaaattggccagaacccgagagtaggggatgaagaactcgatcttggaggtgctcaacctacggaatatgataatgatggtgcctatgatcccaaaagatacatgccaattatcgagttggagaatttccgtcccaagcaccgccaggaggacacaaaccgaaaaaatgctgagttggaacaagaggcatctgcgaccagggcggcacaggagaacaacgcacaaaatcaacctgatcctggagcgagaagaccacgaggcagacctcgtggctcacgaaccaggggcagaagatggctcagaagaatcctcaaaatgcttaggaagaacaacctggggaaactgagggtccttctgagaatgaacaaccaaatggtcaaccataaccttctcacaaaaatgagaacagaaggcaaccaaaaaccagggaacaagaaatccctcgtgggaacagagggaaattttgggactcaacctgggacacgtgggtcaccaacgaggcatcgccaacgtccttctcgaaccaacagggaaagggcacgtacaaaccccagcaaggggcacgcaacgacccatacccaagggagaaggacgggacgtgaagaggcgagcgttacctcgggacgcataagaacccatagtcgatcaacacgacaaggaggaagtactcgttgcaataatgatcaagaaagtacaggcacagtaaaactgaaagttactcaagga

SEQ ID NO: 317569 - DNA, 1361 bp, Cannabis indica
accatgcaacattaaattttatttctgatctatattaataagtaaatctgattatattgaaataaattttatttaaggcataaaacccaacaaatacgtgttagtaaatgagcaaagtcaccaagcacacattaattaacaagggatccaaatacttgtgcaagatcaagttacgagaaaatggccaactaggaaagtttagccggaccacaccttggtcagccaagaaagtttatgtgcttgccagccccaagccaaaggtaggtcggccagcactgataaagagaatcaaaggaagctcgattaaatggtggggtccacaatcatctttctagacaggtcacaactcggtttcagttacaggacaggtccaacaaactaccaaagtagggattaaacctcaaattatcttcctatctctagggatatcaagtagttatttttataacttaaatagatgataaaagagtatgatctcctatttttgagggatattagcttatttgaatattgatcgtttgtaagccctaaactatatcaagggcattaggcaaagtgaaaagtgacttgaattctaatccctgaagctccatagcactctctctcactctctcatacacgtgaccctagttctttgacacttagtctattttcccatctcacttgttcataatcaatcatatctcaattctcactattgtaacattcaaagagagtcatagctagaaattgcaaggttcaagcctgtaatctacttggtttatctctagactcaatacaactaaaataggagtaggtcattacttgacaaacaagggagccgaacctctataaattgctgtgttaactttattttttgcttttataatttacacgtggtgatagtcagtaataaataaggttctgttgtcagttgaccaaatttgaggtcaacattttagtgttttcattgagagcattgtttgttattctgaacaatcatcatggttgtaactaggagaaccactatctccacttcctcaggtcttcctcaagatcctatgatggctgatcccgatgttcatgttccccctactatgggaggttccacaaacctgaccgatgccacaaatcttgccaatcctgcaaaccttgctgttaagtagtcaaaaatgtatatttaatagtgcaaaaaatataaaaaaaaattaattctatacaatattttcatgaaattaatgtaacatatttttatttaaaaatattatagtgtgagttaattttgtaagaaaatagaacattttatgacacaaataagagaaacaaagaaataaaagtaactaagaaatatattgtttttatttaaagaaatacaaattaat

SEQ ID NO: 317570 - DNA, 534 bp, Cannabis indica
gtgaaatacccgatccgaaaataggaggcgccattgtcgataacaataggtgtggatggagggaagagactgtaatcggattggcgctgtatcctcgagatgaaaggcattttgactaatgaagacgaaccaccggaccagagccttgtaggaggctcgggggttgaagatgaagcttgaagagtgtgtatgactgagcgacgtcccccggcagctccagctcgaactttgttttttttttttttttttaattttttttttacttgtatttttataattttaaaactcaacaagcatatttttataattaaaaattttagaccgtaaaattataattataaaaaaatttcaaaaatatttttcttttttaacattttattcttgttagatattattgaaattaatactattattgtataagctttcatcgagtacttttcttactatacttttctttggtttgtttagtaagaacaacacaacacaagtggtcaagtagttaaattaatacttaaatacatatatataattact

SEQ ID NO: 317571 - DNA, 860 bp, Cannabis indica
aatgaattttatttagggcacaaaacccaacagcggttcagtgaacatttattgctttagtagcttgttttattagtatgttataagaaaagtctgataggaagcatgtttgtaccctgatgactgaataggtgcatgttttaatttctaaagtaaaaggtaatttgtaaattattcttgatcgcgatctaaccaggctagatcctggtttcgcaggctgttttattagaatgaacaccaggaggaacaggagaagacaaggtaatttggtcagatccagtggtggtcagggagtgcagtttcccccatatattcgtggctggaggtagaggcccatgaggtaaggcacgcggtcagggagatgttaacccaccgaagggttcctaggattaggagacctggtttgtaggaatgcaagaaagaattaatgaacaagacgaagagattagacgtcttaggtagtagagtgctcctacaatacctactcctaaagtgcagatggctcttgcccttgtggtagggcaggttcctgttatgaaccgaatagaaccactgtacgaaaagttccgcaagtaggcacctccagttgttctaggaggtctagatgtgatgaaagccgaatagtagctgattgttattagatgaattctaaattttatgggagttaccgaaattaacagggtggcttgtgcaacattccaattccaggaagatgtcctagtctagtgggatatggtggctcttactcaggatgtcactactattacctaggaagagttttaggagctgtttaatgtgaaatactgcaacgaggcagtttgtaatgcaaaaagaaaagaattcacccagctaactcagaa

SEQ ID NO: 317572 - DNA, 888 bp, Cannabis indica
cccataacacttttttttgattttttttatttatttttttagggccccaaaatttaattcgtcttgggcccatatattttcagggccggccctgttcatagctccaccaatctttggttttaatgtacacagagtgcacccaacaaatctaaagattatcttttttagtagcaatgtctcacgcatatttgttaagggcacccacatttcatcactctatgtctctaaagctatgaccaccctcccttttagatggcaaatataatttcaagcaagttgtcttggccttgaaaaatcaacatcaccttttcaaagaaaggacctgcaaatactattaatttttccaagaatgtatttgggtaaaattatgatttgggcctaatatgtgtgaatagacatcaaaatagaattaatcaagatacacatgctcgcataagaaatatgctttgaactccaaactttgatttgagctaccatttttatcacactcagctttagaaattcaggatgcacaaatcgaaacaccaaaatatttaaaaggaaaactactaagagtgaaaccagggttatcaataatgaattacacatcagagttagacataccagagcagtaaatggaagttttacttgtattagcttgtaggcctgaagtatctgagaagcacttgaaagctcttagcaaaaacaaaactgactcaatgtctcccttagaaaaaggaagaacatcatcagcaaaagaaagatgaataagttgattagatttatatctcgagtggtagccaaaatctttccttttagccacttttgagagcaaataagacaaatactccattccaaggacaaaaaaaagaagggacaaaggatctccttgcctaagtcctctcttag

SEQ ID NO: 317573 - DNA, 2014 bp, Cannabis indica
taactcaccttattttctttactcaattatgtttactagtttataagcatagcctatatatatatttatatatatatataaaaaaaaaatcagttactaaccttaattttgatttattgtcatctataagttttaatttaaaccataatttagttttatttttctttttagtatgatccataattaaattaaatgtcatggatgagaatttggtgtttcattttttttttttaaagaaagagcatttgttcatttattttaaatgaaatattaaaactaattttcatgaaaattgcagctaatgtgtacttattaattttttatataatatatagtggcgtttggtaatacttttttaatcagttttatgtttttaaaattgaaaaagtgaaaatatttttcaaaacatgttttacaaaattgctttttactttttaattttttgattgaaaatcaaaaattttaaaaacaaaaaaaaaatcttaatcaatattttggacttcggccagacccagacccaaatctccccccacggccctggcaatgaactcgacctttgacccgaacctgaatctgaccctagacctagacctgacttaaataaaatcaaaggggttgctctaccaacatttggttatgataggtatcgaactaatttttcgaaggcaatacttggcctctgctaacacgattggcaagaaacactctcactagcaccattccttcccttccacttagaaaccagccacaaccaaggaaactactatatggagaggctacataccagcaacaaacacatcatgatgaatcaataacaatgtttgcaaaccaagttgttactaaatttcaaaatcacatagaaaatgagcatatggatagaagaggatctatatttttttgcgccagcaattttgaattcaaaaatcatgttgccaaatattagattcgcctctatggatacaactgctattggtgcttttggccatcataaacaccaattgggagactctatttgtggtactacatctgattttattacaaaattgaatccaacacatgatcatcataccatggaataggaatcaccaaacaatactgtgactttttccaacaaagtcacaaaacaaatttgttgcctcctcatcatcgtacactgtcatgacaccctcctcatctccaaatgaaactgatttgtctgaactatacatgccgagtgttggacatccaataggctatgttgtaacttatccaattgaaacaaaatcaatgaacacattcaatcctctctctttcagtttctctacagcctggttgtcctaaaatgtttgattctataatttgtatgactgatggtgctgagaaagacaaagaaaatcattctccaaattgtgtgtgtaagaggcaaccggaaaaaatgtcaatgcgaaagacactcaagcaatgtaggggacccaaacctaccctctcaactttaaatttgtcttctgatgatgagacaaaccagtatgcttctgagactgttatagatacatctggttgcactgacaactatgtagaggctattttttacccccgtaatcaaccatgaaaattgttagctgaaatacgcatggtttgggaaatccaagcgcattctgcacctttatttgcttgtcaaagagcaaactccttatgtattatatattatggagactaaattagattgtaatatagttacttgttttcgtcaatctttatatttcaataatggacttgaagtctctagaataggtttaagtgggggttacttttattatggaaagacaatgtggatataactctactaaactttaatgcaaatctgtttgactgctacatagggtatgataatggaggacctacttggcatttctctgccttttatggtgcaccagaaattcaaaattgaatacacacctagaagctcttagaacaatgtaaggatgccacccccttgatgtcatggactattgttacctttacgaacaaccttttg

SEQ ID NO: 317574 - DNA, 1176 bp, Cannabis indica
attacaacaaatgaagcaacaacttatgttgagatgattagaaaggctctaagagctgagggcccagtggaatttctttaggagccccgagggactctgagtgttggtgggaccacaacctttcgttcttctggttatggtagagatggtggtgattctaatttgtatatatgatgattattgtaccctttcaattcccccagccttttgcaagcactcttgaccgtgtacacaccatatgtatcaaacttccaagcccaaaatcatccttagagttagaactcaactgaatcgagagaaaaagttgttgatctctaggtttgaaaatgtctcgaatcaactccacatcccaacattggttattaacttcaaacaaagcattaactgttcttccttccagtgcaaggtgagaagtgataacatacggattctccacacaatcaagccaaggatcatgaagaatactcactgtagaaccagccccaatgcttcgctgaattccactcaaaactaacggttgagcctccattatgcttctccatatgaagctcgggtactccccaacagtagccgtaaggaaagacccacgtgaataataccgagccttataaattcgagccacgagggatgacggttgtgtaagaagacaccattcttgtttccccaaaaaagctaagttaaaatcacgaagactccgaaaacccaaatcaccttcaaccttatgcctacacatacgctcccagctcatccaactagtatttcttttttgtgctgaacccgtttgccaccaaaatttagacataatctttccatttctttacaagtattaataggaagtagaaacacgttcataacataattaggaagtgtttgagcaacagtatttgataacataattttattatttagttattaaataaaagaaacaatttatttactttaaaaaaatttaaatatggtgcgggttatttactaattttctatagaacggataaataaagaagtttttggattttataaaggagttagtataaatatggtgcgggttatttaccaacaaggctgctcatgaattagctgtgcatgcacttagggtggatggtgaattggcttggattgaggattttccctcttttcttattgatgtattaagctctgattgttgttaataagagt

SEQ ID NO: 317575 - DNA, 625 bp, Cannabis indica
ttttttaaaaaaaaaataaagaggaaaaaaaatttatggttgattaagaataaagatctcttttatttgtaaatggactgtttctatgtgtatatttgttgtttgttatatttattcaaattaatgtaggctaagcaaactaaggaatccaaaagaataataccaaacttgctgtgtagtttaatcaatcctttttgttgttctttggttccctttttctttttctaataacaccctttttctttttcctatagagttgaaacttaacacattttgctatgtgcaaaataacacgcacaaaaaacacagaaatatttaagtatatatatagtagcttaggaagatataggccaagtgtcaagctgtcaacttgatatgtgggaatcaagtcatgcatcaaaacttacgtttgaacagttattagaatgatatgatcattaaccaaattccaaaatcctaacttttattaaaaaaagaaaaaaaaaaaaaaacaacaagtatctatttaaatgtgataagaaaattgtttataagacgttaacaggttcataatttaaaaattattcctgtttttaaaatgaaaataatttttaaaaattaataagagttgtttggcaaatttttt

SEQ ID NO: 317576 - DNA, 1717 bp, Cannabis indica
gtaatcccagtttaggggattagggtttcataattaggtgatgtgacgtgcctaattattagggcattacagtattgtacactgttcttgctcaatcaataaagaagattttggaggtgttctagaactggagtagagctatagatcacatcgatctataggactttaactagtatatatatcttggtgttcattttattgttttattatttttggtcttattatctattcatccctgttataatctctagttattgtgtgtgatttgttaatattgtcattactaaatatttgttgattaagttttagttgatttgatagcttgataatcgatcaagaacacaaaattaagattctttccactacaattcttgaagaaacaattattgtcatcaatggcgagattcaaattggataagttcagtggaacaggggactgtgctatggagagaaagtttgaaaggtatcctggtgcaccagaaggtctccaaagttcttggagatgagaaattaccggctaaaaagaaaccagaagagaaagcagaaagggaggagttggcttattacacgatcatcatgtacttgtccaacagtgtgaggagaaatcttggcaaagaaaagacgataaaaggaatatggaataagcttgaagaattctacataaagtcatcgatttctagcaagattcatttgctagaaaagttatatgtttttagaattatttcttctctttctttagattataatattggcaggcttaataagattattgattggctaatataaataataaggctaatgaagaaagccaaactatcattttgttgagatatctcccaatcgagtattaagaagccaagactgccatcaaatatggcagagatgtgattgcattggcagatgtcttgtcgcactcaagtccaaagattttgaagtacaattggaaaaggaatctaagaaggaataagtgtatttacaaagagggatatcatccaaaaaattaatttcaaagagtaaacaccatcactctcaatcaagatcgaagtctagggagaagaaaacttgtaaatgttacttttgtggaagctctcaagcatgacttagccagacctctgatcgtatcaacaccaatagatgacaaagaattattcatctatctggctaacatcaagcatgcatcgagtgccactctggtgtgtgaggaagaaggaatacagaacctagtgtactacgtcagcaagcatgtcattgaggctaaatctaggtatccctctcattgataaactagcgtactactttgttttggcctcgagaaaactaaggtcgtactttcaagcccatccagtcaaagtgtaaattggccaaccaccaaggcaagttttgatgaaacccaaagtgtcagaacgccttctcaaatgggtagtagatctaggtcaattcaaaatcacttgtcaatctcgcagcgataaaaggacctgcattattaaatgttaatatccaattgatagtaggatcatctgtattcaaacatatggatgtacatccagggatggacatgagttaatcgttaaattcttaagacgatcactatagacatttaccttgttaaagaaatttgaaatgtttgagaaattttatgaatttctagctttggtgataaccattaaggtaggtggttaaagatcttgcgaactgatagggctggagaaatatttgg

SEQ ID NO: 317577 - DNA, 938 bp, Cannabis indica
acaactgaagttgaagaagatgtgactgagactgacaatgatgcagtaaatgatgaacaagatgaagaggaggatcaggactaccaattggtcagagacagaaaaagaaggactgtcaaaccaccaaacaggtttggttttgctgatctggtgcattatgctctgtctattgctgcagtggaagagcctctgaattttagagaagctatgaaatctgtatacaagcatgaatggaatcaagctatggaggatgaaatgacttcattaaagagaaaccatacctggattctggttagaaaacttgctggtatgaaagttgtaggatgcaaatgggtgctcaaatacaaggaagggattcaaggtgttgcacaagcaaggttcaaggccaggcttgttgcaaagggatatgctcaaagggaagggatagattacaatgagattttttcccctgtagtaaaacacacatccattaggcttttacttagcttggtggcatgtaatgatctagaacttgagcaactagatgtcaagactgcattcctacatggtgatctagaggaagagatattcatgaagcaaccagaaggtttcgaagagttaggtaaggaggaccatgtttgcttgttaaagaaatccctatatggcctaaaacagtcacctaggcaatggtacaaacgatttgatgagtttgtcatcaaaattggtttcaaaaggagtgcctatgactgttgtgtttatgtgagaaatgtaaaagggccagtgttcttattgctatacgtggatgatatgttaatagcaagtaagagcaccactgaaattgacagaattaagaagttactgagtaaagagtttgctatgaaggatctgggtgcagcaaggaagatccttggaatagaaataatcagaaacagaaccaagagaagaatcaagctaactca

SEQ ID NO: 317578 - DNA, 1299 bp, Cannabis indica
aaaaaaaaaaaaaagaattgaagaacttactcactggtttggagcttcttgttctgctcggatgatgtcgtcaagagttttcctatgtgtcctacgaagaatttgagagaacacacgtctgaaaattttttctctagttttttgagagttagaatggctaaaaggatcaccaaaggttcctagtcctatttataagcaatcccaaaagggaattaatcatttcaaaaattcaaatttctcaaattcccccgaaaagtgtacgttatgtactcattagagggagaataactgccaaacacacataagcatcgaacagtgattcgaggcagaactttcaattagcattaatggatagaaattgaagagacccctagtcagggtcacgtcggttagtcattgacacctaggacacgcgtcacccatccgaacaagactctaggctgagtgaagtccacgtgcgaccaagaaggtcccgcaaagacatagggggaaaatgttatcctattttttgcaccttgacgtggcaatagaattgaatgacatatgtcccatatttttgatacctgggcaaaggaaaatatccctagtagcctataaatgattaaccagcatctgtaacgttcaagcatccgagcaggattgtggagaacatgtctgaccgagtatggatatgtttatgtcgagcgacgtacgagagatggcaactttggtgattgagctcattgtgtctagacgcgaagacaatctctggatcacaagattgagtcagagaaaaatgagaacctattctaagtttcccatttcatacattgtaattatagaatcattgtccttcctattttattcattgtaaggataagggaaaccatccatcctgtattaagtctctacaaataatgacctagcctcactatgaaagggatcgagagaattcctggagaaatattctctagagaaaacaaagtgatctaagagagaaagttgctcagagatcaattgtaagagcttttgaaaggaacaaaaattcattcctcctctaaagttaatacaaatacaagggagtaggctcttaccatactcaaacctctttaaaatttggtgctcactttattttactgtttttgcttgcttttatttatactacttaatcgctttattctttactcactatcgctagctagaagtgaggtcaacaatagaagattggaagtcatttatgtttacatgtattattcatgtttatggtttaatatacaatttctgttaaatccaaaacatatagttattgacaattacagt

SEQ ID NO: 317579 - DNA, 665 bp, Cannabis indica
aattaataattaataaagcataataatagggaatagagtggaagagcaatagtactactactactagtattagtagtacgtgtgcgtgcaagacacgtgcggaggaaaatcgtgtgagaaaaacggcatataaaaaggatcaaacgaagagataaataatattctgagtgaattgagaaaggacgttgtgccacgtgttacactacctggcaatcaggcatcgcatcttggatttggagccacgcgacacacccataacaaaacccccaacctctctctctctctctcttacttcttcttcttcttcttcctcctcttctctcaccaccgccaccaccaccctcaacggcgtcgttttattcttcatcttcttcttcttttgttacggactcagattcatactactttctcatttacagataaccctaaagctgagggttttctccgaatcgaagaagatagagaggttttctcttcctctctgtctctgattattcattgcccaattttcaggtatttgtttactcgattgtttgtcttattagatacttgattgttgttgtgtgtaaatggtggagagagattggaggattttgttttggttatgatcgaattattgagctttttgttttttcgttaggtgttctgttgttgttgttgttgtt

SEQ ID NO: 317580 - DNA, 903 bp, Cannabis indica
ctagggccggccacttatgttatcttttttaaatgattttttcattattttaatgccatataattcaaatcaaaccctagaggaatgctataaatagatagtgaaggcttcaggaaaattacacactttctgaatcagaaaaacctgagcctccactctcttctctagccgccactctctctctcttttcttcctcaatatttcgaacctctcttagtgaaaataatttccaacacaaacaaatcagattcatttggagatgataaggctgtcatggtaatgtgtgaagttgttgttgcggcagattttttggcaactttgtgagaaattgctgttgtattgtctaaggcttcctgttccatgatatgatgatcacgttgtggttggaattttgtagataaaccaaatgtagtaccaccaattaagttccccaattggtatttatggtggccaaaagtataaactgtaattgtatccatagagcccgacatggtgtttgataaacttaccgcaggattcaaaactgcttgtgcaaaaactataggtccccttctatcaatatgctcatttccttggtgaattcggggtcacgtgacaatttggtctgcagccattgtagatgattgatcttggtaatttttttcatggtcggaagcctcccgatagagtagtttccttggctatgactggtttctaagagggatggaaggtatgggtcaagcatttccttttgaaaaattagttcgataccgatcataagcagaagttggtaaagcagcccatttgatctctggtccataagcaagttcaggtccaatgccattgtccacaagttccaaaaaatttgcacacttttgaaatcggtgacccaagcagctgttgggaattattttaccaggatct

SEQ ID NO: 317581 - DNA, 633 bp, Cannabis indica
ttttgtgtagttatgtccgaagacatggttaaggacgggtacgaagacataatgaacatcgatatttcatcggtcgccattgaaatgatgaaaagaaaacatgtgaatactcctcagctgaaatgtatccttaacaaatgaaacttttcataaacataacataatcttattttgcttaaaagttatttcctataaaaattgtcacagatatgcaaatggatgttagggatatgagcgtcttccccgacgaatcattcgatggtgttcttgataaaggtttgaacatactcataactttcggtttcattcatcgaattgcaataatctttactaattttctcgtgtcggtgttaacatgttcgcgaaaatggcctttcgaactctattgtaggaactctggattctttgatggtatgtatgattcttgttcgtatgttcatattagttattagaataattaagatgtttaccctcgaactaaagttttgtcccttaaattattattatatttttcttttgtaagaagttcccgttgagttatggaattgcaaattttcctcttttattgcatttaacttttttttgagataatttattgatgtagtcagaaactattagagttaatcccacatt

SEQ ID NO: 317582 - DNA, 1338 bp, Cannabis indica
aaaaaaaaaaaaaaaaagtataacctacaataaatttttaaagaaaatgttaaataatttaagatttatacacgagatttttatttgatgagaaaagcaattgtacgacatatagttattattatactatctttggcattctaaaactatttttaatattataagtcaccaatatttcattaattaaagttagacatcatacatatacctaaataatctgaattatagaacataaaaataattctcgataaataatgaggcttttcattttttattatggccctcaaaaaatgtgggctctaaatacctgttatacccaaaatttggctagtacatcagaggaagacacgtgtcaaaccgggaagaatacgaatcaacaaatgtaatgataattatatttgaaattgaataactcattaaatgcaaaatagaccgagtatatttataacttgattaactgaatagtcttaggcgagataaagatatacaaattgttgcctcgtgcgttaacgagaaaccatgcaacttcaagatgtgtaaaacgaggcattaatctcgctacgcattacgaaatgaagacgatgcatattgactggtaagacacttagtgtataattcacattatacaaactaagtataacattcgagtaatctgaataactaatagcgaggtacccgtctcgctataggaagacgcactcatggaatcttcgttaatcagctccatatatctttcaatagggttcacagctccgtcgagtcagttctttcagatagaagctgacatacaaatgatgttgactgttgagattcaccctgtcaccaagaactgcaatttttagatggagcagtatgttttcaagtgcagaaacgacgagacctatattatcaacctcggaaagacatggaaaaagctctagcttgctaccaaggctattgttgctacgttcccagcgagatgtcccagaacgatacggttacaacatatttagtgcacatttacattgacctgataaaagcggacatatcacagctgtgtgattttcaaatattaaccgcatttattctacgtggtatgtaatcaaaccccataatttctgtaacatccccgcttcaagcctccattgggcccttacacccacggaatgatgactcttatacacgagtacgtcactctggctgctttatggaatgacgactgaccctacaaaccaacacgagtgttttcagcgtgctttttcctcactcacacgcttcctgggaaacttcccaggaggtcacccattctgaaattactccaggccaagcacgcttaactgtggagttctttcgtgatgg

SEQ ID NO: 317583 - DNA, 1390 bp, Cannabis indica
acacctactattttttttatatatataaacactatactattaatactattaattataaattcaaaaatagagttttttttttttttttgaaagagaatttaaaaatagattgatatgaatatttttcactccaaaattattaatggaaaatcagagatttattttgagattcattaatggagaaatcattctatacaaaacaaatttctgtgtaaatgtatttaatttagctttatattaatattatatatatgcattttcgtttttcatgaaaaacaaataaatatacattagatgaatttagtgatatacaacaatgagagatattagactagaaaaaaaataaaaaaatatttcgtaactgtattttttttttcacaaaacaattctaaaactgctactattttgtaatttttcttaacaaaccatttaattgttttcacaaatcaataactttaatttttaattattatttattttattagacttggacaatcaatgtgtagaagccattaatgacttctgagattaatgacttctgagttttctctttttcttttttcaatcgtaacttaaaagttttggggtgtattcaaaagatatcattttagtacacaaagtgggatgtaattgtaaaaacaaataatattttaattaaagaatgaggtaaatttagtaatagggtgtaattataattttatggggtgtaaatataatttttctattggtaattgtaatcatgagtcatgcctatgtaataagaatttatacaagtagtgtaatactcattataatgtaaagggattacaaaagttaataggatcaatcaaacattataattgtaatctccattccattccatttcaatcttgattacatcaaagcaaacattataatagtgattacacagaataataataataagtgttagtatttaatatttaaaataaatttttttagtaattacacaatgtaattataagtaattctcatgagagtatgagaattagggagtgtaattgagacatctcaattacctcaaattatgtcgtcacaacgtaattgtgtggtcaaacaaatacacaaaattatctttaattataccaaattctaattctcttttgcctttcgaaacacaccctaattatatattaatggtgtgtttggaattggaagtaactaggggtgcacgtgagctgggttggttggattacaagtgttttaaggggccaacccaatgattgtagtttggagaagctataaaacattcaatttttttattgtacaacccaacttagttagtaaaataaatatagtgtaacgccctaatctatagggacgccacgtgtgtgatttcataaactagtttaatactaatagaataattaat

SEQ ID NO: 317584 - DNA, 3558 bp, Cannabis indica
aaacactcgtgttggtttgtagggttagtcatcaatccaggaagccaccagagtggcgtactcgtgtataagagccattagttcgtgggtgtaagggcccaatggagacttgaagcggggccgttacaccatcaaccccaggcaccttcaaaggatcaatttgagacagcatcagccttatatcatctgccttaaacagcttcagcagccgttcattttccaaaaaagataaacaataaagaacgaatcaatggagttattggaagaccatgtcttgaccatgctgacacataaagagttgttgagaaatattgtgtaaaaattgcagcaactctatcttaggagtcctgccattcatagttctcatcgaagctaccattgatatcgtttttctttcggcgctttgaggcttgttggtggaaataacgagtgtttctattgtcattgttgcaccaaagagctcaactcctttagcgccaaagcatctcctcttttgccaactaattatttaactcttttccaccttagacaataatatccaatcttcaaattgagagaatacagacaatgaagccacctaatccttaagggtcttaacacgagtttgggcggccttttttgttgcttattccaattgtctagctgttgactgcacttgtatatatgatttgcaaattgtttaggtagcccaatcgagacctcactcttccaacactccatcactatttacctaaattcctcactatcattttgaacttgctgataatgaaactgagatccccatctatacataatatttttgcttgtgggtacaaaattacaacaaagcaacaaagggtaatgatcagaattccaccgaggtagatgcttcaccatagagacaggaaataaatagtgccaccccaaattcccaagaactctatccaaccgttaaaattctcggacttcctgtaacaccaggtgtacttactcccttcaaaagaaatctccttaaataattatcaatggctttctaaaaatttctcatcagactgctcggtttggtcccaccaccaccactctttttaagaagacccaagatacgctcatgcaaccgtctgaggagcgcccagcaattcacatgctaactcaaatctaagtcaccgtaaaatcctgtaaacttccaatcaatgtcccccaccgaacttacattcaaatcaatgtgatatcgagtgtaagagagaattctaacatccattggatcacgcgaaagcaaagcaagactatcactctttccaatcgaatccacacagaagaaactcgtaaagccaagatgcacacaaacccactccatttaggacaaagaagtctttgtttcagacaaaaagatcacactcaaaacatgctcacgaaccaaggactgaagggaatttatcgtctaagagttccccaacccttggacattctagaataaggaaatcatggctcttgatggccctgctgggcatggtgcgctaatctatcatccttgttagggttcaaatccaacacataggaaacatttcccttcccagtcaaacctgctacaatttgctccccataatcattctcagttgggtccaaataaatacgtgtttttttcggactagtccttttcggccctttctgagccacaaaattcctcggtttagggggacaattggtccatttttttatagacttccagagcataaagaaatcaaaatttccacttgaatattgagtaataagtggtcacatactgttaattttcaccatagcggaagcttggtcttcatcttgagaacccgaggactcaccttgagtgtattcttaatgatcttttggaaccataacagccttaaggcattccccaggagtggaattctgagggcgttggctttagcgacaatcacagggcttgggggagtgtcccgaatatgctgggcaagggaatggagatgagccccattaatcgcaaatggctctcgggggaattgaattcttggtgtcgcatcaatagccagccaagttctataagcttattccaaattcccttctgcatcttgatacattttctctgggcattacaatttttgctttcatgacccacttgcccacactgaaaaaatatatatggatatcgattatatcagaaaggaagtcatattttactgcctttagtcaggaatacaaaaacaggacaaatcttagaatgaatggcgctcataactttgaaatgaaagtagccatttattgccattttagtaacatctagttcttgaacagagatgactttgccagcgagtcttgcaaggtgtgtcatgttattcttcatcatggacgagttcagtaattgaagaactcgcccttccaagggaaaccagatcaattctgtgtcccaattaaggggaatgtggtccatttttgcaagaattaaaaatttgtgctgcaatacccagggcatctttgtcagcattcaatccaagtggctcagattgttgaaagatagaataagaaaaagactaaaattagttttccacttgaatttgaaatcccgatctttctcaattaaattctagatgtgtcataggacatgcttgaggaaggacttacagtgttcttgctcggtacacagttggccaaggaggcagagcttgcccaccaattcctatatggattcattgatctctcaactttcttcatcatttacattcaattgttttgtgtgctccgacaggtcctccatcgaaacatctctcaagaagaattaatcaataggcttttcgtcaaaaacgagagcatatcccaccttgggcagaaggcgaccaacgccgaagaaggaaaaaagaatcaaataggaaagggattcgggaaccctagtagagcttcttattctggtgatagtagacttctaacaaagtgagttatattttacatttgtatcatttgtatcacttatttgtattttcattggagatgctctaaaaaaataacggtctgtaacttaaaaaaaaaaaactgtttaggaagaaaagaaaacgccagtaaaaatataaaaaagataaaaaaaactgaattccgtaaaaaaaagtaatttttttattgttgttgggcatttctaaaataataaaatggaatatacgaagggatcacttgtgaaaaagcagattacatactaagggaaatttacatggtatactaacttttgctatttttttacaaaaatactgctaggcgtattttttacttttttactgtgtttttttataagtttcatactgcagtatactgtgttaaattttcactggtattctactggtgttttactagtgttttattgttattttgaattgttctgctttgttttttactggtgttttataaaaacacagtaattttgaaaaaatttccgtatgacattatttttgtaaaaattaatctaaattctagtatttttgttaatttccccataataaagatgactgagcttaaagtcctattaaagcccaatgacaaagcaaaataggcccaaattaataatatatattgtttttaaat

SEQ ID NO: 317585 - DNA, 1102 bp, Cannabis indica
cctttatatatattgatatatattgattagtcacgtcggtatttggattggagattaattagtcatttaaaattattattattaaggcaaagacttaatatcacgtggctatttgcatggtagaaagattagttcaattataattataatgacattagattagttataataacaatgtttagattccttaaattagaataaaaaatattattactctaccttattaattaattagtttaagcaagtacatcgatatatacatcccttattcttatctattcagaaaaatctaattattttatagtcacgtacgttatatatatggttgttaaagttttttggtgtgtaattttttttgaatttttcaaaattttacaagatgtgtcttaaataattaaaatatacacgttcaataaaaaaataaaaaaaataaaactatttttttttttctaaatactaatataaataaaaaggatcaatgtatcagtgcataattaattaatatggtagagtaacatcttttgttctgattatttaaagaatctaaacattgttgtatatatatatacttttgtacttcatgtgcatatcatgggtatatgttggtcaatgataataaattatttaagaaagacttgaagaaggctgtgatctatgtttgcctatattataaatagtataagatctaatcaaacaaatcacacacattaatccttaatggttcattaatcatccactaattaaaaaacagaagaaagaaaatggctcaagggaactattattgctcatatccgattaatataggtaaggcttctactccatatattttcagtagtactcttataacattatatatttatatattagttaaagaaatatcctcaaatatattatattccaattattttcaatgaaatattgttaattgtaaaaaaggtgtatagattcatgtcaattaaatttgtgtcggtttaattcatatatatgctattcatcattatctttatatattcattaagatttttattattattattattattattattattattattttgctaatattattgagactgaattagtttagttaaataaaatt

SEQ ID NO: 317586 - DNA, 662 bp, Cannabis indica
tatatatacttattgtttaattatgcaaatcaattatcatttgctgcaataataatgcggtatgggtatgtgatcatatgtgactagtataccattatagtgtacaactgtctaattaataataatattaatgattaatctataatttaattaacttcgacacatttaatttattatttgaattaatggaactgggtcgttgttataaacgtcacaaattttgtgctaaactagtggtggtggtgggtggcacgtgccagcctgaacatctagcttattgttatttgtttggttggattggaggaatatataataacgtaattctgaagtaaatttttggctcagtatatctgcctagctatataaatgacccaccacaccactgtatgtatgtgacactataaattgattaatcaaattggtcgtgtatgcttaatacattatttttgtcatatagctgcacacaaacaaacagaccattattaattaattaataattataactctggcgaaggagcaataatcaatttatacaattaaaatgcatgttatatgtttagattttttttaagtgatttatttgatatgtacgtactaatatatgatttcttatgaatgaattattaatttcttccaaacaaaataaaaataaataacaaata

SEQ ID NO: 317587 - DNA, 516 bp, Cannabis indica
aaactatatttaaattaaattttatttaaaaataaatttaattaatgtataaaaaaaatatattcttcaacttctcgctacaaacaaaggtttaaaacaagtcaaacaaacactacttataaagtgtacactcttaataaaatgttcatctcttcatcactcattttctcttgtaaaaacctataagctctattatggacctcttttttaattatattgtgttcattaatattgatacgtaaaaatatgcaatcgaatcaagtaatttaacgataaaatagagtattattcccacaaaaattgtttctatttgatcaataataatttttgagaaaaataaataaaacaaacaatacttaaaatttagagaaataaaagagaaaaattaatatgacaatttgacaagttcaataaaaaaaatatcctttattttacttcttaatgcaattatttaatttcgcttcttcctattcaattgacaagttgaattaagtagttcataatctgattaagact

SEQ ID NO: 317588 - DNA, 589 bp, Cannabis indica
tatatatatatgtaatatatagtgtatatatatatatgtattgtaacatatatttaatcaaatctcttttattgtccttgtattatttttacaattgagttgtacatatcttggtttatcttccattgttataaaatctctaacacaaagaaattaaatactaagagaaaaaaaaaatggaggaactaaaataattgtagttgatagctatcgacctgtaagcataacaatggagaggagtaccaacctcaccgacgatgaccattgatcatatggaggatcacatagtatgaagaaagagctttgttttcttaatttttactttactattttaactcgttatattaatatattgtggtctatgaaagggaatattaagctaaatgattttaaaaaaaaattcttttagttaggtaactttcatttttaaaaatttagttacattaactttatattttaacgaaacttttatatctagaatactcttttattattgcgaaatgtaagtaaatgactctatttctaactctatagatagttaatgtcttttttttaaaataataaagcaaatgtctttttttacttttta

SEQ ID NO: 317589 - DNA, 1381 bp, Cannabis indica
tttctgggttagaaaatgcattttctaggtaggcccgatgaaggtccgatgcaggcccgatgcatcatgatgaaaaaaattaaatttgggttgaagacaaaggcccgatggtcaatgcgatggggcctgatggtcagtctgatgggggccgatgatcagtccgatggggcccgatggctgtgtaaaaaaactagaattttatatggcccgatggtgtccccgatagtgggccgatggtaggcccaatgagcccgatagtgggtccgatgactatgaaataaaagagagaagaagaaagagggggggtgatgtaaatgggggggtattttaagaatattataaaatgtgtcatatcttacaaatataaaatattatgagtttagaaaaaaaaaattaagtatatataagcataaaaaatcaaatttcccttttattatttgtttttttttttggctttttaaagaaaatttaaaaacaatattaagtttgaaatttggaagaacatcaaagttaagatgtttggttgagcttgacctttaaaagtaatacttctattttactttttatttttattttaaacatatattttataacaaaaactaatgtctaaatattattccccagtccttttaaaaaaaaaaaatatatatatatatatatatatatatattattccctagtgctctataataaactatatcttccttatgtgtatattcgagagagctacacgtgttcttattcttctcaaacatatttatgaaaaaaagaagcattctttgagtattaatggtgtgtaacaccttcctattataatttcttagtaatattatctaaaaattattacattaaactatgtaggacctgatacttaatttgactaatagtaatattaacacgtagaaatgtgctaaatactactgataccttttagtatttctaaaaaaaaaaaaaaaaacattactattactcttggccattttaaaataccaacaccatatcaatgtagcgcattgggagttgttagcattatttattaactcaaaatgtttaggacctaatattaaattacatcaataacaatatataatactactttttatagcgcttgacaccttaatgagcaccttagcatattaagcaccacaaaatgtatcacattgttattgatgcattttaatattgagtctcacatgattcaatctagtaaataaattttttcatttttacacttcaaatttttaaaaaaatttacataacaactaatagaataacttaaatctcaattggagaacaaccaaaaccataaatttattctaaaaaaaaaaaccataaatttaaaatatatataaaaaataatatataaaataattctcaaata

SEQ ID NO: 317590 - DNA, 2071 bp, Cannabis indica
aggtacaagcttccaagtgctttgagaaggaagggtaaaaatttcatgttgcatagcatcattccaaacttgtaatttgttagcttctgtaaaataaaaagtttcaactgggacagaggtgagaacactataaaataattttggtttgaacatgcccgattttggtttgagacagtgggattagaggtaggagaaaggggtactagaggaggagtagtgaggacataaggaggcaaagagaagagggtggagagagaagaggagtacggtggaaagagatatcttgggcatgaggagtgacatacaatcgtcccaaagcaatatgaaggaaaagataccctttgtgatgactaatgtagccaagaaaaatacaagattgagaacgaaattcaagtttatgaacattgtgtatggatgaagaaatgaaaaacattcacacccaaagacacgaaaatgagtgtactgaagttgtttatgataaagaacatagtaagggctatgaagatcaagaactttggtaggtaagcgattgataagatatgcatccagtgaatggataaggtctgttgagaatcatggggttccatctcaaaaccattagcaatgagtggagtgcctatgttattatatatggttcaatacttttacatttaatccatatgagacaatgttctccaataaggtcaataggcaaagggaacctaggcatgggctaatagagtgagccccatctcaataacatgacggttcttacgtttgactcgcccattttgttgaggggtatgaggacacgataactcatgatgaacaccaaaggcagcaaaagcagagtgcatagagggaaattcacctctccaatcagtctcaacatgcttaatggaacactcaaattgggtggtgactattgttttgaaagtgtaaaataggaaaaaacatcaataaacaatataaactagcgaacaccaaaaatagaagacacaagaaaaggaccctataaatcatcatgtattaattcaaaaggctttgtagcctgagatacagaggtaggaaatagtattcatgaattaaatttggctacaatataaatatcacattttttatttacttatttttttgtcactcatttgtcaataaaatattgagtaatttgtagcgtaaatacttaagtttataactctcgattgcatgtaaaaaaattaagcttaattttttacagtaataaataattaagttacatttttagaacttccataagtacttgacggatatcaagttattattcacgttttattttttattagtatatttgaattaatttttaaataaaaatttgatgacctaaaccaatcagagacggtcatgtggttattggcttgacacttaatggttaattccctatggaagtttcagaaatataacttaagtatttttatcgtaaaaaattaaacttaaatatttatttattacaactaaaaattaaacttaaatatttatgtcacaaattattttaaaatatttgtcataagttcttctcttaatttataatatacgttcatcgataaaactcaaaaatttaacttttaaaataaatattaaatgttttcttttcttgaatatttccaataaaaatcaatgactcctaatttttttagtttgtctacttgcatcacaatatagaaactgaaccaactataatataatttttttttaatgcatgtaagattttattttgtaataataataactaatcctaattctttcaagaaaatatagtattgttattattattgttgatttttttattaaaataaggcattaaaaggttttttttaaaacctaaatatatgctggagagagaaaatataaagaattcttaaaaaaattaataaataaataaataaaacaaaaacagttaatgaattaataccaaatttatgtgtatataagacaaaaagactgcattcattatggtgtgtgagtttcaaatgcaattatttagtagtgtttaaggtcttggccgcctcaaattgacctaattttataacaagttttaattaaataaatatattta

SEQ ID NO: 317591 - DNA, 547 bp, Cannabis indica
tacaaaaattaagctaaaaaattctctaagatgcaataaataaaggtgcatagatcccttttaaaaaatacattataaaaacaacatttttaattttataatacaaataataatatcaatatatatataaatataaattaaataataataataattaaaatatatatataactaaagtgctacgacatatataccgtgcattatagttataaacgacatgtatgttgtaaagtttagtgctacattgaatgaattatatacactaaatccaaattttagtgcaacgttggaattgctcttacacagcgatcaaacaaagctgattataaatggatcataaattcaagaataaatctcctaaatatgtatgtgtaatacgttgtttggtattagtaattattcaaatctatattaaaaacttaattacacaaattatcctaacttcactaaatgtttaaaataataaaaaccacgcgctgctgggatgccatgatttattcaaatcatcaaatctccatccagaaaaaaaaaaaaaaaaaaaactaaa

SEQ ID NO: 317592 - DNA, 2047 bp, Cannabis indica
gcagcacactttctgcctatgcggacaacttatactctcggatcacatgctaattgtacagttcaactccatagtgccctgaagtcaattgttcaaaccgtgatcccaatttactctaagttctgggagagtttacagaaagtcatgggaaccaagttgaaattttttacagcctttcatcctcagatgtatggttagtctgagaaaactattcaaatactggaagacatgctatgagcatgtgtgatagatttttaaggttcctggaacaagtttctacctttgattgagttctcgtataataacacttatcagagtaccattggcatggcaccttacaagatgttgtatggaaaaaaatatcaatcgcctactcactgggatgaagtcagtgagagaagacatcttgggcctaaagtggttcatcgaaaagattcatctcgtatgcttgcttcaaaaagcagaaaaactatgctgatccaaagcatagagatattgagttccagctgggagattttgtatttttccaagtatcacctatgaaaaggatacgtagattaggaagaaagggatgctaagccctagatttattagtcctattggctaactttacctcctgcattgtcctgagtgcataatgtgtttcatatctccatgctaagaaagtatgtatcagatctaacacatattttgagatatgatgatattgagcttcaaatagacttatcatatgaggaacaacctgtccaagtttgagatcgaaaagaaaaagtgctttggaaccaagaaattccactggttaaagtgctatggagaaacaatgaggtcgaggaagcgacttggaagttagaatcacaaatatgagagcagtatcttgagttgtccaggtatattttgaggacaaaatttctattaggagggaatagttgtaatatcttggaaacctaattatgaataattaggactcattatataaatatggagtaattgggttacaatgagtaggattatgattctactaatctatttcactgtgaattaggaaattttgccataagttgataaataagcttaatttattaactatagagattttattaaaaatatgtgggtatgatgtatgttatacgtggaataaaaatatttttaggttcagcgacattggggacccgatggaggccaaaaatgtcataaggggtttagttagtaatcttaatagagttattatgataagttgattttataatatcgaagttttgcaaaataacgaaattggactattttacctctagggttacgaggtaacatagcaggaaggtaagggcattttagtctttcggccctttgatttgtcactcttttttttttggagctggtgtgtgaacgtatctcaccttttgaggatgaccaaaaacttagaaagaaacaaaaaggaaacaaagaaagaaaaaaaagacaaagaaaaacgtaaagtaaaaaatttaccaaattcactttttcttcttcatttcttctccatttttgaaccctccaaaaaaaaaaaaaaaaacgaatcagcaagatttcctccatttttgaatcttatttcagccaaggatatcttgaagaaatagctcatccatcttcccaagcaatctaaaggtccgagatcgttgatctttctccattttgggtcgacaaacatacctgaattacaacttgaggtaagaaagtacatctgtaccacatagcatgtcaagatacaattattatcatttattactcgattatcatcgaggtcaagatacggtaattaccgtcaagcaagaaaaagtcatgatgttaaattgaaaccactgttaagtttcatacttatcgattgtcttattagacaatgacaaaggtacgtggatgccaggatagggcatcatggttatcttattagacaacaagagatgtgtagatgtcgagttagggtatcagggttgtcatattagacaataaaagaaatgatcactttataaagtaacaaatatggcttgtcttattagacaagtacttgtgtatt

SEQ ID NO: 317593 - DNA, 935 bp, Cannabis indica
tatcccataaatgtaaaaattgtatcaagacttacaggcttggagatatacgagatatatctcagaaattcctctcgcattccttagttggtgcatgtgagctacctgcttagtggagatggttggatatctatccatgatatgttcagacatcctaccatctatgtgtcactttgagcattagaattttttgtacggcctactaggagttaaaccattcaccaaggttatgaattatattacacgtgtcatctagatggatgtcacgtcatagtgtaaaaatttggataacaattgatacgtcaattatcagagtgttaataaaacagactgccaactctaacatagttacatgaaaacaaaaaacaaaatcaaaataatgttgccagatctgtggcgcgagatgaacgtgaatttactttatgctttactatcgcaattgaataaatcgaggattgaaattcaggaaaataacgttaatgcaacatgtataattttagctactgtagtgatacatattttttcagattatacctaatttagattgatcgagaactcaagatctatttctcacatatctaaattttatatgaatctataaattaaatttaggagtactagttttatggaatttgaatcataattcaaggttgaatttatttttgaaaccagttttcctacagattttttcatcggtcggtaatggttcattgtcggtttgattttgttcttcttctcagctgacatcactagaattgatggtgtttcctcatccgccgaaattgatttatcgttgttgacccccttgtgtcgcacgaaaaattcatttctcttaagcattgatgatgcgatctcgaaggtgtacgtaagagatatttcagtattttttttattgagctgtataaatatttatttagttggctcacagtatttat

SEQ ID NO: 317594 - DNA, 441 bp, Cannabis indica
ctgataaaatatttccaacctgcacaatacgttaaaaatcaccaagcctaaattagttagggtgtaacatataatatttagagaattatgcttagctttctttttctctccacatggaagtttatacctaattacataacttgcgctatcttgtgaaacctaacccacgatggagataatatgcttactagaaaaattagatacggctgaattggtcaaaaccatatcctataattatgggcaattaatcataaattgattacttgatctttgtttggaaagtttttccttttagcttgacacgattctttcttgagatctggggaacatttatttcttcacttgtgcacaggaataaaagaagaaactagtctggtcttccaagaacaagttgttttaatcttccggcatcacagtactggattgttgggttttatgccc

SEQ ID NO: 317595 - DNA, 863 bp, Cannabis indica
ctctctctctctctcactatctatgcaggtggcggtccacggcgagagtgggttctaggttggcagtcgacgacgacattgggttcttggttctgagttggtggtcaacgacgactgggtttgtggttgatagcagtctgtggttgacgatggccatgaaacatttgtgttcctcttttgtgttctgtttgtattttttcttatatttttcattttttttttcacatgtgttctttggatctttattgtcttctatctagttgtaatggagagattttgatggttgttgacaaggctaagaagaactcctcattctttcttacgctgatttctctcaagtattgaaataagtacattctgagtattttttttggataaatgaattgttcatgcctaatgttatatgaatatttgttgaatcataaattattgtatagtgtttcaatttaaaattttagttaagtcattgtagtatcactattttgctctcagattttgtaatatttgtatttttattttctttttagattttttaggtccctaataatggaaaaaaagttcatcagtctatggcaaaagagctcatccgaataagctttcaagttctagtttttagatttggtgtttaaaaatgttatatttcaagtcttgaatgttacccattttgatctacaatttttctgaacactaaaattttatttctattgttgaattattgatgtattttgtagttttatgctttattctttttttaatgaaaggaaaataaaactaaaaaaaatttgaaataccatacatttatttttttttttaaaaaatgatatagtgacacactttacgtgtggccattgtcaagaaaatta

SEQ ID NO: 317596 - DNA, 4293 bp, Cannabis indica
gctaaattacaagtatcatgttatagcagttaatatatatatatatatatatatatagtagtctttcctatgagttactatactaaaaataatctcctacaaatatatatgcacatttgacagtggtagctacatcagtgttttgtggaattttatatgacagttattaagtattaacccataatacggttttggtaactaggtaactaggtaaatgcaatttttgataatttttttttttctaaaagttactctttacatttacttttttttttttttaatttgtaactatttgagcaatcttagagggtgcaacattatgctaaattattagtatagaatttccatactatcatactccaagaacaccaaattgcacgttgtgcacaccaaattatgcaatattagtaatgttggattttgaattaatttacactaaataattggtgcatatttttttttttcattctctcttttaatttgttttaaaaataattataaattatttgttgacattaatatacataattatatcataaattactaattaatatttgtttagtaattaaaaattcaaacaagacatagtcttatttagaattttaattgattaattaaaaccaattaatgtaatctacaagaaatattatcttaactaatgtagggaccgatgagcctatataatcaagctttcaataagtagttctagaatttattgagtaaattttcattacatagaatgctctattcaccaacaatagatatggtataattatccattgtccaaataatcaaagatcctctatagatgatttacatcgagtaaggacaaatttaccgttctacccctcaatgtattttatccttaaaacacttagttttctataaatgatattttattaaactaatataataactgaaataagaactcttccatttatgtctgttaagccaaacataaaggaaattatcattttacttttaaatagttatagaagctatagatttcatatctatcattagcgctccccctcaattgcatacaatgttcccaagatgtaagtattagaccgatctaattggtcagctttaacgaacaagtcaaagaacacaaataatacagttaagccaatacctaaccatcttaggatcaatatttattgacttaagatcaactaagtgatattgacttagaaaagatataacagtaattagtttatgatatcttctctactttcaatatcgatccagtccgatgtatactcaatattcgatactagtatacgttgctaatgccctgaaaaagacataccacttatcattgtgtaagtaaactttatcgttgattatcacgtcagtgtaaatccagtgcactgacactaaggaatttgaagcatgtaatcacaattactttctactgtgatgacttcactgtaattgtgaataatatattttctagacttaatagaaattgtatattaaatccataattataaaaaaaaaatacatttaaacttaaatgacttcgaatcttctattgatagcaaataaaattatattgaaataagttttttagggcataaaatcccaacaaaaactaacaaaattagaaataaaaaaaaagcaaaaattatagatatcttcaatcacggctagcctactaatcgtcattgaccactaacggtcgtcactccaagctgcagccacaatcaccaaccccaaacaacaatgatcgtcgttgatctgcaaaaaaaaaaaagaaagataataaacgacaattggaactgtttattctctgatctataataaacggtggttgggcgaggatttcatggcagtgggagtcgaaggaagacgttagagaccacctacacacaatgagacagatagagagatgagggagatgatagaacgagagaagccagtgatggagcagtgggagtcgaaggaagaccttcgttgggacagtcatgactcgggctttggactttagagacgttgttgtcttaggcaaagagatctcataagtttttttttgatagcagctggcgatgagaaacagttgagggttgaggcttgttttttgatttgtaagtttgataaattctatgctagggtttgggtctttgaccctttatattctactttatctttttaccaaaaataatgatattaataattaattattttatttcaaattaaaaaaaaacttattatctctgattggaaaaaaatattaatcatttaaaataagttatttagagtattgtgagcttattttattattttaaatataaatttaaagttgtgatatagtgatgcactaagtaagtcgagacaagtttacccattcatacatggtgggtcactatagatatcaatatttatttttaaaaaatgtaaaagaaattatgggagttactctttagtgacccttcatacttttagtgacccagattagatgacactaacattaatttttatagtctttttgtgcaggtcactaaaacttaccctaaccctttagtgacccacaccttttatgtgagtcattgaagagtgtcactgaaacgtaaatttgtagtagtggatacttcttggattggataattgtaattataccgaaagatagcgagaatcctctaataggctacaagaggtattgtcttctttttataaatctagatttaatctatatatattatattgagatctttaagcgtatggttcatattagataattaaaaattatttttatcaaatctgctttcacttttctaactatggaccattaaaactaacatggtcccaaatagcttacttgtccatcccgaaaaagtctcgtggaatgatagttgccattcagaaatgtgttcccgaatgtctatcatttccactccgggtgtagtcttcaagaaagttagtcctcatccgtaaaggagttccggatggctggctagttattcctcctggaagagtgtgttctggatagtcgactccagctgtctcttttcctatatgagctttagttcgttgtccaagaagcatatgtctcatccggaagcaccttatcttgtgctgatgtggagattctattacaaagagtttttttaagtttgttaagtcgtaactaacttaacaccttatcttttgccgacgcatctactaatgtcgccgttaaaaattgatatgccgacgaaccattgtcggcaaaaaaggtcaccggcaaagctacgccgacgacttcttcttagttttgccggcgagctaattggttgctggcaaaagtgtttttttttttttttgtaatgatccaccaacttaggatcttcatcctgagcctataaataccacaaacacttattatttcaagcatgctgaattgataagtttcaagaggagactttgagtttgagaggtggagagaggtttgggcttgggttttgtatgaaaaatcttctgtagatgaagaagattctatgtgagagttgaaacactttgtagagatccaacagagaatctttctccactatattgtacatgttctcgctcaatcaataaagaggatttggtagtgttctagaactggagtagagttataaatcacattgatctatcggacttgaaccagtatatgtatcttgatgttaattttttcgttttattgctttaatcatttttgaattttaatattctattcatccatgttttctccgattactattttttatttgttattctattcattgctaagaataatatgagctagcagtggtatccgatcctctccacatatatcaaatataaactttcttcataaaataatattttagactgttcttcaacatttaaatcaaatttttcattttagtttaatagtactattaagaagtagattctatttcactcacttcctcattctaagatacaagaacttagaaaagataagttttattatatattttttttcttaaattttttgctatttttacttgatttgatactaatcaatttttcgtttgtaaatatattgagaaaatgaaacacattttaggaatttcttttttaatatttaagttttattgtcgggctttctggggtatctctttcttatgtaagttgtaacgttaatgttatgactcatagattagtttagcatatgcccttataatagacagtaaacttttatggatggaaggaatctcttcactttattttttttaactttttctctaacatataagagtaactcttaaaaaaaaaaaaaaacttaattgaattataatgttgaca

SEQ ID NO: 317597 - DNA, 572 bp, Cannabis indica
gtaaaataattccaacacatttgcccctgtatcaacaaaccagagattgtcatccccaaatcaggcaagatagtagtgtattgtacctgattgtcattatccatgtcaagttcagtgagataggcacgaggaggggtacattttgaaggggcaaaatttttgtcaaagcgataatgacacacagcagcagtgtgtccacttttgaggcacaattgacaaattagtctggtttgaaacacaaaagaaccacaagaatccccctgtcagcatttcttgaagatgattctgtgttatttcctcgagcaggtggtggaatgtatctccctgagttagatttgttgtttccaactataagattggcctgaagtttcatagaaatgtctatcatggagctgtgatgctctaaacgactctcatgtgacataagtaaggcttgagcttcatcaagtgacaaggatcaaactcagcaccgaaaccattcaagatctgaagaacaacatcttgttcacttatgttagaaccagcgatgattaaagaatcaacaagagactgaactgttggaaatattttac

SEQ ID NO: 317598 - DNA, 1402 bp, Cannabis indica
aaacaccatcggccattattgtatttttggaaagggtggtaattaaagctgagatgaagatcaaatcctctttgtaattatagctttttatacagatatattataagagagtgatgagaaataaaatatgtggatgtagtattagtgatcaataatcgtttgaggcctacttcttttatatgtatgtatcttgacttgtagagatcacatgttattgaatagtattcctttgatttttcattgatgtaatgttaatactaaaggacaataaaagtaaggagagagagtttgaattttcttatgttgaaatatttagagtagaattgtggaccacttatctcttacacattagactaatcaattgtaaacacattgtaataattgaacaagtggggttccatgctgaattttcttgatcatcttatgatattttctagagtattgatattgggcactagtgatgcctaatactttgtataaatgacactttacgattagttaacgatagagtctaaaagttattttaagttatatggaactcaatacttaattaattacaccaatagcgataaaatacaaaaaaaaatatgctaaataatatcagttgtactttttaacaattatctctttttaaatgtagcaaaatataaagaaaattgattagtcatagtactaatgttgcctgatgaagaagagtgtcactgagtcatagaaggctgctttacaatacccaaagaaagctaccaaagatcaacaataatattaccattcatggaacgtacaaattctttgtaaacacctcaatattcatggaacctacattataagcaacaaattgaagaattattttgattcagttaattcaaggaaccaaattttgatttaattattttatttaattaatttttgtgtgtaagcttgtattgtatttttattgctttacgtaacagtttcattgtcttagatttttaactagctaataaatatgaccagtttattatcatatattatgagttgttgtgtgttattttttttttactttactttattatgaaactaattctgtttagatttatgactcagtatttctagagttgatttccacctttttattattattataactggtttttgaggtatcatatgttattagtttttactcactttgttgtggaactagtttgtttttaatttatgtttcagtattttaggaactgatttcttaatttttttttttaattatacttggtttgagttattttgtattatttgtttacattcattaatttatagaattggattaaaataatgtgttatttgttttcattcattatgttatagaactagttatattttaattgtaaaaattattatcctagccagagtgatgagaaataaaata

SEQ ID NO: 317599 - DNA, 1040 bp, Cannabis indica
ttttcttttattttctttttccttttctcttttactttttcttttctttcttctctttatttcaccacaggtattcttctttttcttatttctcttacataatctccaacagttacactattatagtgtatctttttcagtaagtacataatttattaattttagttcaactactccaatatttcacaccaaataaaaatattttgcttaaaaaatcttatattttattttacattatttatattaataactaatattaacaaatttatgatataattatataaattgtcaataaattaaatattatcatgactattagtaaaataatatagtaaaataaaatatttattaaattaattaatcattacacataatcttagaaaaaaaccttaaataaaatcacaattacacaatttaattttatatggggttctctcatgtgatcaattaatgcaaaaggaaatagtgaacaagtgtatcattcattaatttgtctttttgggcttttcattattttcacaaaacataaagatggtgatggcgaatgtaatttatttaaactacccattaggataaagaaagcaaaaataaataaggaaagatgacaaaaaaaaattctgctattgtttaaactattagagagaaaatgaacaattcattgaaatgttcgaccgaaaaaactcaattagagcacaaaattgtgaaatttagaagcaaagattggctttaaggaagaatattaagaagagaaagaatcttattgaaagatttaaattctatagttaaatcctattacacaaattttttttttaaaatgagtaaacaaagttatgcaaaaaagaactcagcaacaacaatatcaaggttcttaagatacctcaaagtctatataaactaatatgttgatactccaatcgtcaaggttagaatgctcaagtgatcaatttgaaccattgaatcattattttatttattattgtattttcttttacgttgttttttttagttttatgttatttttcatttaaaattaatatttt

SEQ ID NO: 317600 - DNA, 535 bp, Cannabis indica
tctatttatagatcatagaaacactagagacaactacaaatacgtttttacagttgtaagatactttcttaaaataaactccaatttgtagtgacagaatcacaatctgcaatgattgaatcgcaatctacaatgacagaatcacaatctacagtgacaagtcagatagaatcttcaaaactttccatataaagccaagatcaagatttttttccttaattcctatcataaaaagatcacacaatctgttatacaaatagtaataccaaaagtatcaaccaaggaatcaatcaaattcaattttaccataaataaacataatattcaatattttttataaagataattatttctcttctatggaaaacatttctaataaaaatcactcagccataaacattgattgacaaattaaaatcaatatttaatttccattaaatatgcaaaataagtaaaataatattttggcaattaaattatcaaaaaaaaagactttacaatctctccatttagcaatttagataatcaaaatatt

SEQ ID NO: 317601 - DNA, 1583 bp, Cannabis indica
tttaatcttgagcaactcggtaatttgaatcatgaattttagataagttgttctttcatatacaatgtatatgtattatattttgtttgctagctagtgcgctttacctagaggacaagtactacattatattagactaagggataacatatttgatcattatttctccacaaaatatacagagaattaatttaataaatatttatttatatagatgtttatagaaaaattgtagagcactatatttgtttatatcgatagagacatttaaaaaaattaaagtaatttttagtatcgaaaataataaattagaaatttaaaattgtcaaaaataatatttaaatattaaattatatatataattattttattttatacacctaaaaatgtgaaattaattaactatttttaaactctattttttcatagtaaattctgcataatttgaaatgaaaaaaaaaaatagataactaatatatagatatgtatgaaaattatataccaaaaataaaagtgctactaccatagataaaaatgacacctcataatactatataattgccaactatgcaatataccatgatgaagataagccagttgactacttgtcaaaactatacaatacaatgtgtaattaaattatatataatattgtcccttttaatcttatccactacttcaagttggcaactgaaatgaagatatttatatttattttattttggtgaaatggaaatcatgaacataaatatactaattgctatataagttatcattcaacctctaatggttttgtaatgaacaagtgggccttaatatctaaatacatttaaattaaattattatttctactttgaaaaaaggtatgcatggcatgcacttagtactatatgttttaaggataattagtgataatttttttttatattttatttttgagaaatgttaaagggtaagtgattattgattagcacattcttaagtgcatgtgaatatcattattgattcaattaagtattgagttcatatagtttaatataataatttatatgaagtattactagccaatcgcaagacaacacatctagaaagtactagacaccacgtgcttaataacaatgctctttatttttatacactaattcttttattttttttcagcaataccccattaattttatatttttttttataaatttgaagcattaattaaattttattataaaatatgctaaattggattatcagttgttactatttacactcgtatacatgtaacaataaaacttcataatcaataaaaataaaaggctaattaggatttttttttctcccgaactttaacatgtactaaatcatgcccttgaactttttttgccattaaaaattttccctgaactattgagattgttagatttaaagacttttgtctaactccattcaattttactgtttcagtgattgtttatatactaaaccatgctccccagacattgatatctaccaaatcctgtccctcaaactttgatatgtactaaattatgctccatgaactttcatccatgttagaatttttttactaa

SEQ ID NO: 317602 - DNA, 499 bp, Cannabis indica
tggaacctcctcgaaccaggatagctcatcgtctaaccgcagagcatgctttgccaaccataggccgcgaaaaatctaagagtataatactaagagttaatcaaagttggattaacttaattaattaatcctatatttaattacactaagagtataatactaaaaaaaaaaatactaaacaccaataatattttttgataattctcttaaaaataatatgttcactgtccacattttattttaattaagttaatccaactttgatcactttgttctcctaaacaaaagcttgatcaatatttgtttatcaaaacgttcatcaacattcaacacatacctcaaatagctaaaaatgagcaaaaaataatagtgatactttaaaataatcacactacttttaaatatgtactcatgtataattatgtgtttcgaaagcataattaaattacataaattttagagtaaattgcggcataaatacttaatattttagatttta

SEQ ID NO: 317603 - DNA, 866 bp, Cannabis indica
cataaacaatcactgaaacagtaaaattgaaagaaattagacaaaagtccttaaatttaacaatctcaatagtttgggggaatttttaatggccaaaaaacttcagggggcacgatttactacatctcaaagttcaggaggaaaaattactaattagcctttagttaaatagttatgctttatatatatggaacacttcttaatgtgtattattcattgatagatttaaacaaatttaactataaatattaattttaaaaatattaaattattagattttgatccaatagcgaataataaaagaaaattttgaatttttatacttaattttactacttaattatctcaaaaactacttcttttttcactatgtcaaaaatatattattatggaatattaaaattttctaatattacccacttacaagtaataccgattaagagtgcatcatatttattagggttgttcatcgaaattggaaaattgtagtttaaatccggaccacgacaattcgaaccgctgtagagggtaatcggggaaaccgtttttgatggtccagttaattcggactgtttaccgtgtaatggttcggttgcagttcgtataaattattaacgattacatcggaccggaccgtttataataaataattgatttatatatatatatatattttttatatatgactatatgtataatgtataaataattttaaacttttttgtgtgtcggattttttattgcatgaattttgaattttatttgatatttgacttttgagaatgattttatttattgttatttatatgttttgatgtcggtttggtttataatactttaaaaaccgttatactagtttggttcaa

SEQ ID NO: 317604 - DNA, 611 bp, Cannabis indica
aataatgtacatatatatatatatatatttattatataatttacataaataccaagaatgaatggacaagctttccaggttccagtttgtttcttgagagcaggcctatttttaaaatcagtagttccatcctttgtatacatatcttgatcctcagccatatatatataatttctactaaatagtaagactatatatatataaatatatatatatatatgtatgaacctcaactcaaatataaattgatagatattccaagtattttgctgaaattttgaacatgtatattgtatcagagagtgtttatatatatgcatggcactcaattcaaaattaaaccacgcctagatatcaacgaaacgaaataataatagtaaatgtattacaatagtaggagaagagtaacgtccaattacattattaatgtgatattaaatgcatgggtgagaaaatcatttaatagtgtgattttgttctttcaaaaaaaaaaaattaaaaattgtgatttgatctataaaattcaactcttttctcttttgtgctttaggttttgggattgaggaaagtacactctatattttttttgggtaagttgaaaaatacccctt

SEQ ID NO: 317605 - DNA, 679 bp, Cannabis indica
tttttcttaattatccaaaatttcctaaatggattaatgaattttttgaagttgccttgtaaatggtaaaaaagtagttttgatatgaaagtggtaagagaaaggtcaaaggttgtcgttatgaatatgaaggggacaaagagacaaaggtgggacccaaaccacatgtgtgaaaccctttcttgagcgccacgtaagccgacaaggtacgcggctgaccttcccaatctcccctgcgtggggaccactctctcttattccttcaattacgtttctttcactttcacttcataaaatccttaaatctttcttctcacgcgctcttttctaccttatttatttattttaaatttgtttctatgttagtattactttggttattttagtgctttaaattcttgtgtgtcatgctaatttaatttgacacatattaaatattgtattaatttaacaaaatatttactatgatttaaaatttacaccataataaatgtattacttttttatttacgtttatgtcatttgtattattttaatagtatatttaactatgacattaaatttgaaacatttatattattttttattgtcttacagattaaaataaggctaataagtaatttttcctcccgaactttgacatgtaccaaatcatacctcctgaacttttttgaccgtt

SEQ ID NO: 317606 - DNA, 685 bp, Cannabis indica
ggagcttctgttcattttcaggttgttttctgctttagttgtgtttttactgttgttaaagcttgtattatagtgatcttgccctgtgatggaaaaactcatttttggaaacaaattctccttgcttttcatctttgtcctttacatctttgctacctcattatcattaccattaccatttctcactttctttcttttctactctctctctctacctattctaagaggtgtgtgaagatgtaaatgggttttgatgaaaaatctgtggttaatattgttaatgatccaatatagctatgagatctgagggctttctaatagcaatacatctgttgcatttggtggattactacttgtcttacttgtgtagtgtccttttgtttcatgcatgtctggatatttgcattcatactcttttctgtacactctaatactattgaaaaaccaatcatatttaatgtcttactgaagttaatccatgattagtaggtaacaataatatctgtaaagttgatcttactgttctttttcctttcaatgctttgtgggtttctacaaatgatagtttcctttgccctgtgatggaattactcaattttgtaaacgattccatgtcttttcaatgtatgcctccacatcttttttgcctcgtatctttgtcatcatcatcatcctcttcttcttc

SEQ ID NO: 317607 - DNA, 2543 bp, Cannabis indica
attataatttgagagatggatatgaaaatttcaccgtttctaagatttttgagccaaatgatatattagagcaagcacatgaatcgtaagaaggagaaggtaatgttatcaatgaaaataaaaattttgaattaagaaaaatacttgataaattgcatgttaactgttatgtaatttaaaaaactctaatgccaattattttgtaggaaacaaatattgagaagagtcaaaataatgaatgatggaataaattttattaactgttattattcaattttaaaagataaattagtttacataataatgttttcctttataatcaatatatgacaggattgtaatttggaagatgaagatattgacaacacacatgttactggtgccggtgaaagtagaaagagaaaactcctcattcttgatgatgaagatgaagaagctggtgataatgttgaagatgaaaataattagttaattagtgtttattgttggagttttgaggtggttgggcctgtaggccacttttatttgtgtggttttagtgtgattctggtttttttatttccttatgtgtgtttagtttttgtctggttgttaggcctttaggccatttctctttgtgtgtttttacattatatggttatgtaatggtactatttccactttataaatattttaatcgagatttaatatgactttaaatattattttattttattaatttttacaataacaatactaagtcatttataaattaaataataattaataatacagtaaaaatgtaataaattatataataatagtaaaatatataatatataactataaacttaattataaaactgtaacaatgattatcatatctaatttgtctttcatttttttcatttttcaaattttaatgttgaaataaatctaagaatctaataactacagaaccaattattaaattaaaaataataataataaaactttggatatttttgtagcacttaatatgcattattacaatatataatatatattctctcttttttatcaaaagctatagcccgcagttattattttccttaataaatttataattataaaaaatttaaagaaaatgtatattagttttgattttattctaatttattgttattcaacagaataaaaaaatgtaaatagactatataattaaggatcttggttccttaatgataatgtttcaatatgatattgcatttgaacaattttttagttttgaagagaagggtatgttttttttttggtcagctattaatctagaatacttggttggtaacaaaacaaaaataatatagcaatacatgcttgagtttagaatgtttgaatggtaggaaaaaaaatccgtattatacttatatgatattaagaaaagaaattcttagtaaaataattagtaatgaatttgtaggaagtaggatccctaaagataagaaaaagtataataatacatcaaactttatatgagttaaggaaaaatgtacatttgtaagtgaatacttttagatagttataaaccttcaagagtcacatttattttttgataattcttcacaagagtcatatttaagataataaaaatgagtattaatacccagtttttacatcaaatagtaactactaaaaaataacattaaatcagattatagtaatacacccttacatcaaatagtaacaactaaagtaattacattaaaccatatgaagtaatacctcattattaaatcaaatattaactgctcactaacaaacataatatatttattatagagtattgctattagacaccagtagtgcctagcacctttgtgacatgtcacgttgcgattggctagcgatatttcctaaacgttattatataaattatatggaatccgatacttagttagaccaagagccatattgacaagtagaaaagtgctagacaccactgataccttttagtatttctcatttaatatgagtacattaataattatattgtaatatgataatgcaacgtatccactaaaaaatcttaaaaaatgtatgggaaacttttcagtttcatatttgcagttgcaattatatatatatattttttttttttgaaatgacctctttattaattaataattacatttactgtttttcttaacaaatttattattataaaaaatttaaagaaaacgtatattaattttgtttttactctaatttattgctatttaatttagttttgtaagtattaataataaatctgcacagttttttttgttacttttaacctattttaaattttaattaaaaacagacacctatgtttttttaaaaatcatatcaatataataatataattataatcaatatgtaaatcatgagtttctgaagaatactgtgatgataaaaaatgagtgtcaaaacaagacagaaaagttattattataaagagtacaaaaaagataaaaaaacgttgattaacaaaaaaggatagatggacaaaaactatttcgttttaggattattccatgtacgtt

SEQ ID NO: 317608 - DNA, 953 bp, Cannabis indica
ggcataaaacccaacattttgtaatgcttcgagtttcacctataaaagggattcagagaattgggaagaaatggaagttaagccctaaattaactggtcccttcgagatcctggaaaaggtaggccaagtagccttaccccctactttatgtggagttcatgacatgtttcatatttcaatgctcagaaaatacatttcagactcgacacatattttaagctatgatgatattaagctccaagaagatatactgtatgacaaacaacctacccaaatcttggataaaaaaagaaaaaagtattgcaaaacaaggcgattctactggttaaagtattgtggaaaaacagcaaggtaagggaagcaacttgagaattaaagttgcgtgtgcaggaacatattttatgaaatatgaaacctaatatgtattagggaattaataagtaagattatagtcttactaactttatatcagaaattaggcttatttttagaaatagaaaaattaggagtaatttattaattacgaatattttattaaattatatgtgtaatatatatgttaaatgtggaataaaaatttttcaagttatgctacggtggaaactcaattaattgaccagaaatatcaccacgatataagtttgtatttgagttgtaccgggagattttgcgtaatgtttagaaattttgaggttaagcagattataaatcaatgaccatattatccttaagctaagggtgtgtggagaaaaattagtaatttaccatgaatttgattattttaataaagttttattttaagttgattttatcttattattattatatctattttatataaagtgtggttatgtaatagaattttagtttaacgatactttttagatttctacgttaactttaacagaatattctattaattaacagattattctttattaaatttataata

SEQ ID NO: 317609 - DNA, 1184 bp, Cannabis indica
tctacgagcatagttatctacgagcatatttatctgtgattatagccatctacgagcatagttatttacgagcagatttatttatgattgtagttatctctgatcacagttatctatgagcatagttatctacgagcatagtaatctacaagcatagttatctacgagtaaatttatctgtgattgtagttatctacgagcagatttatctgtgatcgtagttatctacaagcatagttatctatgagcatggttatctacgagtagattaatctgtgattgtagttatctacaagtagagttatatatgagcataattatctacgagcagatttatctgtgatcgtagttatctgtgagcacagttatctatgagcatatttatctgtgatcgtagttatctacgagcacagttatctatgagcagatttatatgtgatcgtagttatctacgagcagatttatctgtgattgtagttctctacaagcatagctatctacaagtacagttatctacgagcaaatttatctgtgatcgtagttatctatgagcaaattgtgttttggggctatgatttaacaagattttttcctttcatcactttgtcccaatttggctttgggaattatataaatccattgacaaccacttgaatagtcagtaagtgaacaacccaagcatttcttattatttatgacaaataaaatgtcttgaacgttgacaccattcaatatttctctcatatatatatgtatttattctgtatatttatatatatatgaatatacgtatatatagcatttttctcatatatataagaatatatgtatatatattctatttatgctcttttggtgaccaaaaacttatatatacttcacatatatagttataatattatgtaaagtaggtaagaattttaaaattacttcctacatgctttgacgatgattagtagaagaagatttcactagactctcaattttaactattttcatagttgggattgtgaagatgatgaattcgaatctcttcctcttgaatcttttgaaacttccttctcttaatgaaaacactaaattgttgacgcaattttttgtcaacttaatctaagaagattattaattcaagaaaagaagaaacaaaaataataaatgaatactagatatttttatgtggtttt

SEQ ID NO: 317610 - DNA, 1020 bp, Cannabis indica
tgctgaccatcattcatgtttatgattgttgaagagttttccaacctcgttgtttccaccggggcagttcttgatccacaaaactagaaacatttttgtttatgaactgttgtttgtaattagtaatagtagtttgtagacattgttttcagcttctttttacttttcttttggtactgaattttaagctagtataactattaatacatatatcgtgtatttctttcttccttgttatgaagtatttgaaatggtattagtgatattatgtgtttacacgtacagtcctgtcaaaacagatgcccaagataactttgaatggtcattttgaaactataaaacttagaaagttttctttgtcatttggctattttgttttatttaatacaatacatttatggattactctttttgttttcgtttttttcaactttcctttaagaaatcatgtaatgactattctacaatttgagggatatgttttaatgcaaaattagggaaatcaaaattatgatgtgcataattgattgaaaaaattcaatttgtcccaaaactaagaagaggactcgaaccctccacactcttttatatatactattataaattttcctaggaataaaccttggtttctaatcaaacagtaataaacctaataatcttttctttttgaaaataattaagagaaatgctaaatggctggtgcctagcaccctttaatatggctattggtcctattaagggtttaggttattataaaaacaactttaatagggtatcaaatataaaatattcaataatgtattaaccaatcacaaaggatggcttgagagccacggttaagaagcctatatatacttgattacactccagtagtttcccacaattcaatctctagtgtcttgctctctacgccattccattcatcactgctacaagtcatggagttttgcactcaaattgcagcacaattaattcttgacgagatgaaaaagaatgagagtagtgctaaaaacgttgtaa

SEQ ID NO: 317611 - DNA, 969 bp, Cannabis indica
aacaaatacatatgttctggacataatagaatttatacattaaaagatcatgaaataaatcatgtgaaccatgcaacataaaaaaaatgttattctgatctttattaacaactaaatctgattatattgaaatgggttttatttagggcacaaaatccaacactttcttccttgaattttatagtggaaaggctaggttttcatgtaatttgtgagatttttagctctcctcgttttgggattttagagaaggttttcttgggttgtttttaagttatatattttgttatatactgatttgaatggttatggtagagattgaactaggcttgggcttttaagttcaagtttatctctttaatggtgattttgcttccagggggttaaggatgcttttagttattgaaataggtttgttttagccttatttgaagtttttaacagtttggggaggtttggatttgagttggggtagtttttgggtttggggaaaaatgtgttgtgaaaatggcaagctatatcaaggaaaacgacctaccatttttccaggtagaaaacctgccattttttgggggtacttttcccaaaatcccatttttcaatgattttcttgatatgtagggtttattcatgctatttatcgataggaaaacttttgctttcatgtttagagtccccgaaactgatttagtagattgcttaccagttttacgtaaaatgttactttgggccttaaatcgtcttgtagtagttttcactgagagttaccagcacaattgcattcagaatcaaggtaagatttagtataataattacatatatttatgcatatttagtgtgcatgttagttgctgtcagaatacatattaaggtatcagtggggtgcacatagagttacaccgagatgccaacagatatattttagccaaatcagtagccaaaagtgtaacaccctaactatcttaggcg

SEQ ID NO: 317612 - DNA, 1146 bp, Cannabis indica
ctgttcgtgggtgtggaatatggaagctataaatatatttttcttcgttctttttggctatttttgtggttcttttattctcattctcctataaatacatttgacgagctcactgacaaaagagttttgaagtgtgtaattcttttatatttttctaagtggttatgtctgctttattgctttacaattatttttgtgttgttttagtagtttttttttattctgattttttaggactggcttgtaagtatagtcgttattgcatctagtgttgagactgtgtagaagattgttagttttttttaatcattttttttattttatttttttttatttgttttactatttttttttagttgtttttaccatgattatttatgtgacgtcgatttcactatttttgcttaatcacgtcggaattaatggttgttttccgactgtcctggtgttgctgtggtggttctgtctgtggatgtggaagatagaggccttcgttttttttttttttttttgtttactagtataaaagaaaaataaaggaggacattataaatgtaatttctgccgtgcggtaatattttttatcaaaattcaatatttttgtaaaaagacctataaataatgcacatttttgggcccatttggctatgatgtcaataacatatcaattgattaccttttttataaaatggtcctccctaaaataaaaatatcacatattgataacttttaattttttcattagttacttttaagattatatgtttaattttagaatctattatgttgtttaagatacttttaagttaccatcaaaaatatatttacttttaagttattttgttataataaagtaaaagaaattacatatcttaatagcaaaaattttggatgtttaaattaagtactaattagttattttaaaattatattatggtatcgtcatattatttaaggtatattttttgataagtttaacttattgtagaaactaattagttatatagtataacataattaaattaattaaattctaaaataaatattaacaaagattaaaaaaaaaaaattgtaaaacggtaactaaccactattagtatcaaatagtttatttgattattgaaatactgaaaaaaaaaaaaaaaa

SEQ ID NO: 317613 - DNA, 893 bp, Cannabis indica
taaattggattttttttttttttaaaaaaaaagttcggtttgggcggtttaaaccgaggttcaaaacggtcggttttaatataagttctggattggtcggtcggttttcagattgcaccaatccaaaccaaaaatcgaattttggatttttatatagaaaaaaaccgaccaaactgatcgatgttcaccccttgtggcctaagcccaattttgtcctctgtacagcctacaaaggctggtttagaaatgtgtctattttgggataattttaagttttatgttttaatatgttatataaatgtataggttagtagtagtgattatctttctagtaatgaatgaaaagtaaaataaagaagaaaaaaacgaagcaagacttataataatgccaaagtcacaccacgccattttcaatgtcttatccgcgtctgccacaaacaaccatcaattattgactttttatttttatttttaataattattttatttatttatttatttatttatcaggcaaaataaatataaggaggcaattattgactttatattataatgagaccactttaaatatggtcttataattcgtttatattatagacttattttttttttttttttttgaacagtatattatagactatttaatttggttatcacaattcaaaaattaaaaatcaaaattacaaagtttatcataaaaaaatgtatatattttcttaaaaattcacatcattttgattattgcaatttcaaattagatacaattaatgattgtgctttgtattttttaaataattactctcacatggccttaaattacaaagggccagtttggcacagctgtgctgtggggaaaagcagctgtagctctgctgtgggaaaaagcagctgta

SEQ ID NO: 317614 - DNA, 1823 bp, Cannabis indica
tatttttaagtttttaggttttgaaaaacataattaaattgtaagggtattttgggtaaaatgaggagttattagaatagtattgtataaaataagtaatagggtattttttgtaataaggattgttattaagtataaaaaatacaatttccataataataataataataaataaataaaccaaaaaaatgggtctacgtagtacacttacatcaaccgtttgcatactattttacataataaattatttataaattttatagaattgagcattatttgacacgttgaggtgtctaacaccacactgatgtatgcaatactctataattagttagcgatttcttatattatttattaaatcaaatgtgtaagatgcgatattaaaatacaatataatgaatgagctgacttgaattagttaaaatcagttagagaagttggttaggagaagttgctagttagttagttacttgctacctgtaactaattagtttcttgtatctctaagatatatagcttgtactttgtttttcctaattcattgaataataaatagagttttcactctcttcctttctttttctttccataaccttatattgtatcagagcaggtctctttgtaaattccttttctgtttctttcttccatggctcggggtgaaggagttcaaactcaaagcacttttgaaacatccaatcattttttgttttagattcgaataatctatcgttttttgatgatgctcgaaatccttattttctttctaggagtgatcaccctagagctattttagttcaaaaactctttactggatgtgaaaattttggctcatagtgtcgagctatgcaagtggctttaattgcaaggaaaaagttaaaattcatcaatgacaagctccatgctcttgaagaagacgatgatgaatttgaattatggaacgaatgcaatagcattgttatctcctcgattcttcatgacgtgtctaatgaaatagttgaaagcatcatgtacatggataatgccacaacaatctagtctaatattgaagaaagatttaattagaaaaatcacccctcttattttagaagccattcgagctaaataatcttttgttcaaggtgcaaatagtattactacatattttactcatctcaaatttctgtgggatttaattcaagaatatacaccataacctgtttgtacttgtggtgctatgaagataattcaagattaccaaaatgaagatcaagttcttgaatttttggttggtcttaatgagtcgttcaatagagctagtattggtatttattttactaggatctagatttactgacatatttgtttcattaacaccccaaatatgaattttttaaaacaatgaaactaagcacataaaagtttagaaaaccttacattgatgcagcgaaataataatgactccttccgctcagatctctaacccttgttcctttctgtcgtagagtaataacaagatctgtgcctgaatctctttctctcctttgggttggttaccactgtctttcagactatgattgagtacttgacttgctatgtgtgggaataatactctatcactatggctcgaattggtgatgaacaatgcatgaggtgtgaaatcactatgaaaggagtctctcatttactagttgtcagagaatgaaaactaggtttaggttggttgaattaggttgttggatgagaatgagagcatcgtgttctttttatagtatttcaactagggtttatgatttaattatatggattaaaaaagaataaaataatgggcaaaaatcacacta

SEQ ID NO: 317615 - DNA, 2071 bp, Cannabis indica
ataataataaataaataaatatagatttttgaatgacacacatggtagctcaatagtgtcataatttgaccacttaataattaagttagctaggctcgtggcttttgcttttctaaaaatatataaaacaaaaatagtatttgtatattcaatgcttatattaaattaaaataaaaatgtatagggttggtactaacacatccaaattcctatatcgatttaatatttggccatatgttgagatttttttatctatgtatttattatagtatatagactatatagtagggtacattggataagagaatagaaagggttctgcctttttggtgaaaaactaaactggtccatttttttttaataactggtccactactactttggtattaaatgcatatatataattataaatatacacatatatatatatatatatatcatcatcttcttcttcatttaaatttcttttacttatagccacaaaaatgtcctgacacgtacacccaccctcttatctcactacatgcatttaattacttaaaactaactgaccatagacccgtattagataagaggactgttaattattcttattataatttttaattaagttgtacgtccaaaattttatattagaatattttttttaaaatttttttcataaatttttaaaaaaatttaaataatttacagtatcaaaaacatagttcatgatattttaatttactctgtatattcaaaaaaactgcatatatatttttgatactatatacaaattatttgaaattttttaaaaatctacaagaataatattgtaagcagaacaaacactgttataagaaaattgaaacaaaatattatgataagtattttcaagtacgaaaattgactaaaaaatcgtaataacagatttaactgtaactattttgattttatttgaacatataaaaggcattggctctgtgtttctccctcttaattaattttgaaggaaggacatataatccgtactgaaatggcgatctataatagtgtagtattgtccaaaaatgtacaacttatagtgctttcaatggttttgtacacaaaaataattcgaccataagccacactacgtgattttcggcttcaagatgtatagcattgttttataaatagtattttcttttatataaaataatattaatagtgcttctattaaaatataatgaatttgtgttaaaatggccttggattagtttatataaaacatatcttttaattagatttttatgtggattgctatataaattttaattgcgatttaagttactcaattttaaagtgtgaaataaaaaaaaaaatccataatatatttcatttaaatcttattaataaaaaattataaaatatatttatatgttggggtttcatttttgttttaaattcattatatcttatagttaatatggtatagaatattcgtgttaacgatcttaattttattattaccactaaaaattttggtaatgggtaaaaactatgtgatttcattaaaaaaaacttgtagtatgtgtttgtcccactaaaaatttgtggtgtttatttattggtccctctcaaattatttttggtgtactttgatccccttacaaaaactttttgtggtcgtctttgtgtaggtcaccatgcaaataaacaaatggtggtttatgatttgtatcaacatattaattagtatgtaaaaataatgaattcgatgatgcatttgaaaatacttcatgaaacatatacattatctttatttctttaaattttgaaaagagtattataatttaggaaaattttataatatacccttttaaaagagatgcatgttggattaaaaatcttaagtgggcacatatgtataatgtatatgctattataaagtgtgatacaaaattaagtgaccaattatgttatgggtatcaaaagggtattaaagtgtcatggaattaatgtgtagataccataagctaatttataatttgttgaggggccaaattataaatacccaagagttattctaagatgactctataaataggta

SEQ ID NO: 317616 - DNA, 644 bp, Cannabis indica
tgagtctttctgtcctatttcttttagttaatattaatatttataatattgatgttttgcttgatttacattcagtaaaatgttttctatgcactctttgatttgatcaatatattatttgattttgtgtgtgtatttatactaacttgttagtttttttttctcaatttattggcctatgtgactcttttgttgttgttatttttcctttagttatataattattttaaattattatcaattataataatgttcttgttatatgtttattttttttttaataatctcatcaattttctgttttgaattttaggccataaatttgaagacaaagaaataccaaaagagaggaagagtagaagattattgaaattgatgattgatgattataaaaattatatattttatattgttcaaatttgtaataactatttagttagtaggtctttaattgaatggttgtaatgcttagtttttaatttgtagagctttgaattaatttacctcatatttaaattttcttttttttgttcaacttgagattttcatatttaaattttaactaccaatgaaggttgtaactccgacccaacccaacccaacccgtaattttttgggtttggttggtttgggttgtacataaa

SEQ ID NO: 317617 - DNA, 869 bp, Cannabis indica
aaaaaaaaaaaaaaaacatgtcactttttaatctgtgcatgttactgttgcattaaaacaaaaaaaaaaaattatagcacattaaccaactttaatatttcatgtaacaagttactttagaaaacataataaaagacaacaaaaaaacatgttacttttgtattaaaaccagcaaaaatataacacattaaactaaattcaataattcaggtgtcgggttactttaggaaacatcgggttagtttttaatgttgctaataggttacatgtgtaaaaaatgtagcacgtcaactaaaattaatattccaggtaccaagttactttaaaaaataggataaagacaaaaacagaaaaatatgttacttttgcattgaaaccagtcaaaatgtagcacactcaaccaaatttaatattctagttactaggttactttagaaacatcgagttactttttgatgtttccaataagttacatgtgtaaaaatatagaacatcgaccaaatttaatatttcaggtactaagttactttagaaagaaaaataaccagatttaaaatttctttcagtgtcaacaaggtctgtcaattcatgaccatatcttattcattcaacatacctgcaactccatgactcttatacttgtgtatgtcgatgatataatcatcactggtagtgatccttaaaagattgcagccttggttaaagctttggattcaaaatttgctctaaaaaatcttggcaatcttcactattttcttagcattgaaattcatcatgttggaaattattttacagagagagagtgggcggccaagtatagagagagaaggctcaggtttttctgaatgagaagtgtaattttcctgaag

SEQ ID NO: 317618 - DNA, 1308 bp, Cannabis indica
actgaagaaatataagttttttttttttttgaaaaagagaaatatatgtttgttgactataataaatttactttaattcagaaaaatatgaaattttgaagaaaatttataaagattgcaaagacatattgttccctttcgagagagaactttcatactgaactaaaaaaaacttgaaaattacttaaataagtttaaactttgttagaatttagggataagatgaattgggctccatctcaaaactaattggcaatgggaggagtagctcattcatcttatatatcacaatttattttcacacattatcaatattgtgggactaactctaatacaccatgctcacgttacgttggaaaatttgtagattttgaaacaggtcaaagacccaacactagaaaatagtacacattggtcgaaaggtcctaaatggagattaaagaggagatagcagaagtatccgtttggaccgacgtacactttggctcacaacggataacaaacgactttttagaccggtgtaacggataacaattagctctgataccatgttaaaatttggggataaaataaatgagaggttctatctcaaaaccaattaacaataggaagagatcacattcatcttatatatcacaatttatttccacacattaacaatgtgggactaactctaataaacttttttcaaatcatctcgtgtactattttatttattaaattaatgtgaaaattttacattattcaacttagatatacttgaattagtgtctatcaaatttcacattgaatcaacactaaattagtgcttatactttttcttttcattttaattgttttttaaaatttatttttattatttattaatgtaaataatttaagatatgcgagaaatttgtaactaaaatataattatttagtgtaaattatttgcatttcacaataaataagtaaaaaaaagtaataataaatagtatatccatcgaagatagtaataaaatatgcccacataaattacatacaaatataacacatatttattatatacttatttaataagttattttttataagtaagacccatcttatataaggtaccgtcttataatttattagtgaatttctataaaaattattaaagtaaaataatacgagattcgatattaaattccgccaataactcacagtgatattacacattacaattctacttctacgtgttattatcgaggtaaattgcggcataaatacctactgttttttattttatacacttaaatacctaatgtttatttttggtggtaaaaa

SEQ ID NO: 317619 - DNA, 1966 bp, Cannabis indica
aaaaatattctagtatgtattttctgacacaaagattgactttgagattgtaataaaaaattaacgacagcagtacaaattataatgatataaatagttaaatagcgaaacaaaatcctaaattatggagtttaaggaaaaaaaaaggcacacaatttatttttattaataaacaatgttttgaactttattaatgaaggtaaaagtatatatacacacatgtatattacaaaggactcgataaaggaaaaataatagaattaattagaataactaactacaactaacaaggtgaagttgaaataaggcacgacttgttgccaaagggtattcacaacagcatagtacagattatgctgagatttttgccccagttgctaaactcaatacacttaaaactttttctagcacttgctgcaatcaacaactggtccctacaccaaatgaacataacaatgcttttttgcatggtgaccttaaagaacaggtttacatgacactccccaagggatatatacatgaggggagctaccctccaaccatatatgcctattgcacaaaagcctttatggccttaaacaaacatcccgtaaatggtttgccaaactttgcattactttaattgaccatagttttcaacaatcagcatttgatcactccttattcatcaaaaaatcaccaacaagctttattgctttattagtctatgtcgatgacataataattgcaagcactaaagactctactacaactgcctttaaaacttttctcaatttcaaattcaaattaaaagaccttggcctctgagagcaggcatctttgtttcacaaagacccttcaccttacaattgctttctgaaacaggtcttctaagatccaaagctatttccacacctatggatgccaacacctcattcagtaaagatgttgcacctctcgtgaatgatgccacttcttatcgaagcctcattgaaaaacttcttttcctcaccatttctcgacctaacatagcttatgctgtcaatcgactcaatcagtacatcagtgctcctcgacaacctattctcaaagctgcttatcaaattttccagtcccttatttcaactcctctcctctcaactctctacagatgaatcatttcaactctaagcattcgctgatgctgattagggcacatgcccagacacaagacgctccatcataggattttacatcttcttaggccagtccctcatttcttggaaatcaaagaaccaatctattatttcaaagtcctctgcagaagctgaatatcgatcccttgccaacaccacctgtgaaatactatggctccacaacattttatttgattttggcatctcacaaactcatccaacagtactctattgtgacaatcaagctgcaatacacatatctaaaaatgttgtcttccatgaatgtaccaaacatgttgatatcgactgtcattgtaacgccctaacaattaggcacgctacgataaccgataatgaaacactaatcccgctaacccgggactactagaaagacaagcgcgggaaatttaaactttatttgcaacggaagaaaaaatatacttgtaatagtttctaactatacaataaattaaaagatacaagccttgggatcctataaatattttcacaaaatattacaagtttacttcacgtgccaacccaagcggcaaaatctaagattacaaaatacattcattggtagaccacaacccgcttggtctagtttggctcaaacatgtacaagcaccgccaagctctcacactcatggctaatcacagactgatttaccctttcctggatagtagaacacctgtgagccaagcctagcaagatagtattgttgggttttgtgccctaaataaactcatttcaatataatcaaatttactagttaataaagatcggaaataacattttatgttgcatggtt

SEQ ID NO: 317620 - DNA, 1037 bp, Cannabis indica
gtccaacagtttctaccaaaacaccagcccaagatccgtgtccaacaaatggagatggttcgcacttgaagaagtcgaacttagggttctcgcagtttggggtctcggggttgatgatggggctggtatcttggggtcccaccgtctggtgtctcgcctaaggtcggcggcaaggttgatcgcatgtggtctcagtcttcttagggttttgggattttgatggtggtaatggaagaagaagaagaagaagaagaagaagaagaagaaggtttctaaaaaaagagaaagaataaaaaagattgaaaaaaaaaacaaaaaaaattatattcttaaattatatttaaaaagtttaattaatttttaaattcttacgtggattactaaaaatatgtcgtgtgtacacttttgtacacataggcagtttacggtgacacttaattgaagtttttagacgaaaatgtaaaaagcaaaatagaataagagttcaatagattttgccgtcaaatattaaatttatggttaaatattaaaaaatataaaattcaaataactttgtcaccaatattctttgaaatttttttactttgaaacaagccaacaaagagacacatacatgcttcaaaatgaacaataatatctctatctcaataccaatgtgtatacatacaataagtttcatttacaagattaaacaaagaacgtcattcaatttaacaaattaacccacttactaatcaaaatccacaaattgaatttgagatcaacattcccagaaacaacctctaaattgaaaaattacaaataagtattataaatccaaatgtctaaattccaaatcaagcacatattgaggtgctgcccaaagctagggcaagaaacactccactatattctataatatatctcatatctcctatttacagtcccatttttataatcagaaaaacaattcactaagaaacaattaattaaggaacaaaaataggcaaactaataataaaaaaaaaagagtaatttgcggtataaatacctaagtt

SEQ ID NO: 317621 - DNA, 1272 bp, Cannabis indica
acttatcattggaggtcatgagcccaagttattggatccacagttaaggatgggtttaataattttagttcatgggctgatttcttggaatcttgatagtgaggcctactttcctaaattttctatcccaataggacctggacctttccccaaagggcatgttcaatttaaacaaaacccattttttccaaagcctacgagaatatcagattatacatataaggacactatgaaaatattttttccttatgtatactctgtctattggcggtcaacttctcaattgccaaggcaaagtgttgccaattaccatgccatggacggtagggaatcactctacttcatgttggagagggtgttttcattgatgctattggaaaagctctcttatgtcatattaaatgaggtaagctctcaacctttgattgggttcactgaattttatttctgtcacacaaagaaattctgttgtgaattcttaactaaaggagatgctatggaatacttgtgtgggaatgtgccaaccaattacttggtgttctcgggaatacttgaaagggttaaggaattgcaacatgattcaattaaacttttagcgcaagatcaaaactctatcctcccaacaatgattgctgaattttctctctcttttgcatcttattcctgggaggggtgggagcgaaaacaccaactagatgaattatacattgaagttgctttatggaagtacaactatcaatttttggtgtgtaatgtttctctttcattcttggggcctcattgttgctgggtttttgaccggggcaagaaaatgaatcctgaacataatcaatttttggcaaactcagttttttgtccttctcttctcgaccggctttcaggagcaccctttgcagccacaacagcgactgtcctaccattttttctgcacgcgaagggcgacactatcaatttactcagctggtttttcgatcgaggtcgactcactaaggagagatgtctctcccctagcttgaacatcatacatttgctggcttggttcttcgacagaggacgagccaaaaattgttgtggaggcttgtgttcttcaccttgaggacaaggtgaatttcgggcggccggtattgttaggccttagggtaattaataaagagggtaattaggtaattgtaattggagtgttgagattgtataaataggagagtaatagaagggtttgaggggggaatgatttagttaagtgagcttatagctcttgggagagagctgggt

SEQ ID NO: 317622 - DNA, 1019 bp, Cannabis indica
tcttcatttatcaaacttgcatcatataaaattggggtttttagaaatcgaagctgagatattatatgcccttaagccattaaaacaagctcctcagtccccacgtctaccatgcctaataccctcaagcctgcctgccacaatcgcttacaaaatcaacaccgtcaccttataataacttgaaaaaaacacaatattgtacttacacttttaaaatgcgctgacatgatatggttgaacattgcttaggctgccatagaattagaaaacttgtttaagtgtcagaaaaaggttcatgtacttaatgaatcaaatatggaatttcatcatgcagtcgcttttttttaacacttgcatctagaaagctgatacgaaggtttcgctggctttctcaacttttatattccaaacatgtcaagaaagaaagtacatacaagagaaagaaaacatgttgactctattaattaaaactctgagaatctgtaaaatcatactagccaatgaaaatataacaattttatggtaaattgttccatttatttctgcttgttctgcatgcaggtagttagatatccccaacatgcttttacttgtattggaagctgtccatattggattacgtatctcaggttgtttgtctcttttttaattcaaaatttgtttcatatattattatttcacactcatataatatacttacccaatattctagtttggaaattaagtatgaatatattagatttggttaggtaattacttattaaaaagcacattaaaaattaataatctactgtatataacttagtcctgttgaaaaatttccttcctaatttttactttctatatataaatttcattgacgaagttcgtgtctaatttgtttttcttcatgacttattattactgacaaattatttaatttattgtattgtaaatactattttggtatcttgtgttttgtaaaagttatagattggaggcttatgttttgttaaatgacaaaatagatcttatatttt

SEQ ID NO: 317623 - DNA, 761 bp, Cannabis indica
tttttttttttttggttatttatgaaaaaaaatctcctttttatttacatatatagtaaatcaaaagttttttcagaaaaattaaaaattatttttatgtagagcaacagtgaaagatatgcaaagtattaactctaacaatatatgatctgtaaaatgaaaataaaatcatgactattaaacacaagtttctaatattgattttcttttctttgtatgggaatttcacttattgaaatttgatttaaagattaagattgtttgtgaagtgtgcaaattctcatatgctaaatgtcttctaatagaaaagtagataattagcctttctttagatttgtaccacttatcattaaattgtcatttgggccattgacaaatataattgtgtaaagattacacaagtttctatcataaatggaaaattttaattttccttttccaattgcaaattatattggacttgtttaaaaataaaaaaaattgcaaattatattggaccttctttttaaaaaatattattaaacatggaagagatatttaattacaaatctgtagaagttgtttacaaaaacaaaattatatttttgtaaataaaatttgtattttttctataagattttgcattttgcatttttgtttatttttaaaaagtccccatccaaaattgtccattgggccatttaaagtttctaatcatactatggtttaggagtaatatagagggacaatttcaaaaaaaaaacacaaaaacaacaacaaca

SEQ ID NO: 317624 - DNA, 2001 bp, Cannabis indica
ctatgagataaaatatataagagtaaaacaatataaaaagaatcatatttatattttaattttactttcattgttacatatatacataaaatttttactaaaatcttatataaaaaatataatatttattttatgttatatattaaattgaaaatagataaaaaaaaaattagtcgggttcataggtgggtacgagtttgacccaaactagcgggttagcaaaaattaaactcgaacccgcacgaaagagttgaccgggttggacccaacttgcccgtagggaactggttttcccaaacaaatgggttggctgggtcgggtccgggcaggttggtcaggtccaggttaaaccctgccaaaaagttcagtcataacactgggtgcttattttagagcttttaagatgtcgttttgatacttccaaggttcttgaacttgaggacaacgtctcctaccccaattttttactattctggagaaaatgcttagatcagatttggcttttgaaagatcaaaaccagtgcaccaggtcatcctgggcgctcggctcagcattgaggctctcaggtttgtggttttttccccgagttttcttgaatcttcattattttttatgatggaaaaaattctcagaacaccttttcaagaaactgattagaaatagcccaagttgacaatatatcaacttgggcgctaggcccagtgctaggtgtcaacctgggcactgggtcccagttttggccccttgaaagttttgtttcgtccttagaagtagttgaatcaatctttaccaaaaacgtagaatattcctagaagagttctcagaaaacatcatcagaatcagcccaggttgaggaaatgtaaacctgggcgctgggccagccccaagtgtcaacctgggtgctaggccttgtttctggcacccaaggaatgttgtttatactttgaaagtacttatttcctcgtttttgatgaagacaagaatatgcaaaagtcaaatagtcgatctaatacttggaagccgcccagattgacgaattgtctacctgggcgctaggtgcctggagagtgcccgggcaccgagtgctccgagtgctaagaaatgaactttttctaaatctgatttgatgcctcaaatatgtttgtggtatgtttagttcatgtcccaatgtaaaagtttgacccattttcactaagatggccccaaaaattgaaccctaagtgcctaggttgacatctaggtgcaggttcatgtaattttagctctcgggcctagatttaattgcttcatgtcttcatggtacagaatactgaaagatagtgagttggaaatgagttattgaagtccaaacttccaccccaaagttcccgcagtcaacctgggcgcaaggctaggacccctcctaggtcaactgctatgactcgagactacacaactccgcgatgtcatctttcttgccacgcatcaaacattgatgtctacatcataagggaaagcttttgggttaataatatttatttaattcaaatgaaataagagattaatgagaattaatcaactattattgattgtgaaataaataataaatcttatttaagataaaattgagaaattaattttaggctttaaaatatggcccacacttgtggtagtgttaggtttcattccctgtaaaagtttgtaaaaatagttttgattatgaataaaagtttaacattttgatatacgcatgaatgttaaattattaatatttaatattgaataatttatatataaatattagaaaattcataattcatacatgagtcagtgacttgtattgtacagagaattaagatcatttagccatgaataaaatagtcaacaacatattaaagtttaagaatttttaatcaatagttgctagtacggttcgactgatgcccgttatttggtgcatagcatgacatctaagtgaatgtgttgtatataatagagattatatatgacaagaaacgata

SEQ ID NO: 317625 - DNA, 1306 bp, Cannabis indica
ttggatcgtgcggattggattggatcggatacttagtgaacacccctaattttaatacattaacaaaacacattaagatttatctatctatttcatttggaatacctaatcaaataaataatgaagcaatatttaacttgttgaatttttctaaaaaaaaaaaaacttgttgaattgccttttatttttatttgtttttaaatgtaattagttatttgacattctgtgttgcattaatatgagtttgccttttaagtattcctttttttttttttgattattaatcatctcattattatattgaaggattttttttttctcacctaaatagaaagtaaaatgtgaaagggaaaattaatgggtatatacttaacttacttaacatttgagtaatgagagacattaataatgagcacgagaatagatacaccaaagtagagtaccacgttgaatttgaatgatacaattcataaaaagtcaagcaaagaaaactaccactcaataataaggttttaccgacaagactttttaaaacaattaccatatacactaatatggtacattaccttactttgacactaattcattctaatttgatgtattatgtcaaaggttagcaagttgattcctacgtatgtatggtttggcttcagcccaaaactgaacccttttctacctctatgaaccttaatttaacaacatatttagttcagtcaagcccttgttgctgaacaggactacacattacttaatttacacaaatcaaccaaaaatagtgttgagaatgacaatagtgttgagttagttagatcatggtcgagtgtctttctctcctactagtctctccatttcaatgttgttcatgcatgaaaacacaattgatgattactcttctctgccattaatcttcttttctatatgcataccaagcttttcttctcctccctcacttgtagtcaagcctgagtttttctctttgctttcaccgaaggacaagctggattcctccatgttgctccatggagagcatgcaacttgtcatgatctaaggtgacaactttgttgttgtccaactccatcaccatcatcttcactgtaattgatattttcatcataatccaattcatgcgctctagtttcgttgctaatgtccatctcttgctgactattgaaatatttatcgctttgatgatcagatgaacaagctgacatgggagaatatcctcctgaagtttcattaataatattactagttaataggaaaacaaagtaacatcatttgaggtagctgtttttaccatacttg

SEQ ID NO: 317626 - DNA, 614 bp, Cannabis indica
aataaaaataataaaaatccattacccttaatggcattccttacaaaattggtgggagaagttctccctttcttttctcccttatttaatcaacttctccctttcctaattttaataatgcaagtaaacaaatgtaagggaatgattaccttactattgattcccattacttattagtaaacatgccataaattaactagagagtgcaaaagagagtgtgatagagagtgttcttagcactactcataatatatatttgacgtggatagaaatgaacgtgtcgaaaggttagaagcacgcgtcattacattattttattattatttttcgttatattcccatgtacggtcaatcccaatattaaacgccaataataaaaataataaaataatttatcctaataagagcacactcttctcatttctcaacttttgattttcttcctttatatatacttctctcactctcaccattattacatatatatatatatatatatcacgttattattacacacagcacaacacacactctcttctcttctctaatggcggccaacgaagaaggaacaaccgtagaccctgagaagcagaagcttctcatcagtcaacaca

SEQ ID NO: 317627 - DNA, 393 bp, Cannabis indica
aatcacgtaatacgcctatgctagttagggttttacaatagtagtcttagataaatagtagactctgccaccttaagcaagtatttggcacctaggattaggattggtgtagctgcttttattgtagaagtggaaaatagcattggaaacttaagaacaaaaaaatgggctataggtagtagctctgatgctattaccttgtctcgcgcagttaaatagcaggccgctatggtaagcacgtcactttgggtcctttatgttgggttttatgccctaaataaaacccatttcaaaataatcagatttacttattaataaaaatcagaaataacattttatattgcatggttcacatgatttatttcatgattatatatacatataatgtatgaa

SEQ ID NO: 317628 - DNA, 1031 bp, Cannabis indica
ctttaacaaccttgtgtaataataattttatgaaattaattttatattttatgcattgattatttctaaacttcgatattttgaataaaattttattttgtttttttattaaaaaaaataacaaaatttaggattttagtaataatagtttaataatttagggtttatattttacttcttttctacttctaattttgtttgttgtacttatactaacttgctggtattttatattgatcgagagtatttttgtcgactcatattcactctttcaaacatactaatgtgtaatgtttcttttgtttagaataaataaaaatagaacaaaacagttcttcttaaagaaaacttagctaataattaatggtccatggttgaatccaaaataaattctttacttgtatttattgtttgttactttgaaaaaagtattactagtaggcatcaataaagtgacgccttaaaaatgagtaacagtattgtataacagttattatattaaattgtgtgggactcaatacttaattttatcaatagtaatatgagagctaggtattagtatttacttataaatttctaatggactctgaatttattattgattaaactattatttagctttaaaaagagaaaaatttcaagaccaaaagataaaattaacatactataaaattttgaaaatatatttaaattatggctcacgtgcttcgcatgttagaccccaactagttaattataaaactctacgtaaaaaaatagtctgtcacataaaaaaaactaatattattttaggcaaataagaaattactcaattaatctcgagataaatattaataagaaatatcattatactttttcaagtactattgtgactaatttacatttaagctttgtaatttttgtttgagcaattcaatgggcgtattttttttttttttttaaaaaaaaaggttactatattgtgactaattcacataaaatttattttggtatatatatatataacacttacttaatgggtattacccatt

SEQ ID NO: 317629 - DNA, 528 bp, Cannabis indica
acaaccaggaaaaaatatagaagctctacagttatgagctaccatatttgctgatcgtttaacaaataaaacaataacagttttcaactcagacaacaaagttttacactcctgaataacttgaccataccatttcaatcgcacttcttaatgcttgaaccaccgtgagacagtccgtttcgagtataacatgttgccatttttgtctcttaatccagcttaaggcctctcggacgctaatagcttcagccgcttctgcttgaaccacaccagtaaaaagaagcgtctttccctctatgagcataccataatgatttctagcaattagactacatccatatctagtgccactgtcaaataaagcggcgtcgacatttaccttgatgttattcacatttggtgccaaccaatgctcggtttcgtcatccggtagcagaaactatcgatttacgatttaagtatgatgatggcttggttttcatcactaagagcctcattttcccctgaatttgcaagctcaatgtgcat

SEQ ID NO: 317630 - DNA, 991 bp, Cannabis indica
ttttaacgatgtacaaaaactaatagaagaaaagaaaaaaggaacacttaaagaaataaaaggagccctaaataaaatgcgaagaagtctctttaagggtaaaaataagtaagaggaaacaacattttgagaagtctggtccaaatatagaggcggtgaatgaatccacgagtgacagttatccatcggatcatttttctaatgaccctatttatgatgtagcaagatatgaagaaaatgattatcataattgtgaatttactcctaaggaattttcattctcattcctagttggtgatctagacaaccaaaatggtgatctagataaccaagatcgaagaaattaattttggtattaaacgtgtaattaagaatttgttgcaatataaagtatttttctgttcttttaaattttcttaatagtcttaattttttttttttatgtaattttgttcaaattagtattttattgataatttaattggttaatttattttttttagttctatatatattaatatataaagggagaagtttcaaaagtttgtaactatagtgagaagccttacacaaaatattgactacttttattgtattctttttgacctacacccacctaccaaagaaaaacataggaggggagagagaaagttgtactagaaaattaatgagagagaaagggataggaataaagagagaagtatctttgtcgagagagatgtggagtgtgttccaataaataatgacctttttagatataaatgagagcaatgctatcatcaaactctattttcagactctaccttagagtttcagacgcttcacaatttattacacctgtaaagattttttctaattgtactatcactactacaaattaggcatttagtgacactatatagtaacactcataaaagtgtgtgtcactaaaaaattaagagtggttttttgggacacacagcattagactctaaatgttcggtatttatta

SEQ ID NO: 317631 - DNA, 845 bp, Cannabis indica
aataagatcaatctttgtcttcaatatctatctctcttcttctttctattattttctctgtcttttctctttcatttgcttagtttttgataagtccatatttatcttataaatatggtcaattttatgtgaatatttttaaattaattttttaaatcattaattagtttgattttaatttttttggctattggaagattaaccatgcatttggagtcatttagaaggttttaacacattttggtggaaaatagtggaagttagagagctcggtttgacaaaactaaatgtaatttcatattgtgacggctttataggtagaactggatttggagctctacaagaaagttgtagatctcatttttatttttctagatcatcttgaattgtccaattttgaattgtattgacggagtactggctaaaaaactgatttaagcactcaaggaaccatcgagcatcaaattttcaactgtggcctcccagtgcatcgatcctaaagcttcactccagtgagcgagtcatggttgaagagagcgatttgtttgttgcagtgaagacattattgaaattttgggtttttgctctaggcactctcgtcgtagcgaacctaaagcttagccgtagcgagagcacaatttttggattttaaatttagttttttaattaaaatcaaaggaatttttagggatttaaatagaacttttagggttcattttttgggacttttagactgcattttgaagggaaagaagaagatgaagatttcttcatcagttgttcatcattatagattcttttcttctctttaatattttactctttattataatttttattataat

SEQ ID NO: 317632 - DNA, 1414 bp, Cannabis indica
gtgcggaggggttaggggacatgctgattagtgatgattatgactttatgtggcaatccctaaatggaacactccgatcactagtactaaagatgttgccaaatgtagtgactattcttcctatgggtatccaacatcttaccagcttacaacaacttgaagttttctggtgtgatagtctaacaacaattccagagtggatccacaacctcaaatcacttaagaggctttggttatccaactgccccaatctgacatcattccctgaaggaattcgaagcctcaccactttgaacgtgttacatatttttaaatgtcccatgttattgaagagatgcaaaaggaatacaggtgaagattgggataagatttctcatataaaagacttgttcttacgtccagatcccaacaaagaagaagaagaagaaaatgaggtacaaacgtcaatgtctaatgttttcttttattttcatattaaattaaaaatcagtgcttataatgtttatcctgatattatattgcagaatacaaagggatgcaacctcttcaacaagtttagaaatcaaggatagatatcatatgtgtagcgtaggtaattacttccttctcatatgatttatatctaaaacatttttttttttttaaaaaaaacaagagtaaaatttgtcatggactgaagctatatattattgttaatgtatacaatctagaaatttttccataaactgattttactgaacaaatggaggagaaaaatataaactctgatatttctattgattggaaagttttgggtgtttcgatgatcatgagttcattgttgttttgaataatgtaagtactttgaattattttttgaactgggtttttgttaaagataatgaaaaatatgatctataaatttctgaagggtttactaaattagtagaggaaacaaaaaaaaaaaggtttattttgagtgggattcaactactaataactttgttttaaatttttttgtttaactagtccgatggctgtctaaactaagttagcatatgttagtgaaatctttattcccttgtatgtttctttgtttttaattgattctaaattatttataactaaaggagcaaaagagagtgaagaagaaaaggaagcaaagtatgaaggaaatgtaagggtacttaggaggatgtgcaattgaaagagtgactgttttaacagtaagaagagaaacacaagagcaagagcattatcggataagatcagttgagtgaactaagttgtttaagctacaaatatcattatgttgtatgaatttgtatggtatatgtattagtactttttaatttaagttgagttagatgttatgacttcattttcataataaatcctgtttggtgtatggaacagatataattttgcatgagaa

SEQ ID NO: 317633 - DNA, 1135 bp, Cannabis indica
ttaaaataaattttaaaaataatttttaaataataatattaagtgtaccaatatgaacgtgtcatgtgtacaagagtgtacatataagcagcctatagtaacagttaaccgaatgacaccttaaatttgctactagctcagtaatttggagaattttacagctaaaaatttgagcttaaaaagttaaatacaattgaaacaacacttaggaaggttttgctgctaaaaactattattattatttttattattattattatttaaacatctaattttgcaataaaatttccgtggttttataaaaaataagatttttgaaaaataaaattaggtgaactttatatttgagatgtacttttttttttggtgtgaataaaagtcccctaaaaattcttacttttaaaaataacttcttaaaacaatttttaggaataaactaggagatcctaaattcactagaaaaatctttaaaattatctaaaaattttcaagtacatgtttttaattctacattaaaaaaatatttttaattctagatatgataagggtttttctcataaatatgtttttgttatttgttttttaaattttatttacatttttaagatctgtacttatttttatttataattatacaatttttttttttaaaatacgatagtaaaattttaaaattacaaaaataaatttttttagcaaaaaataaaaatataagaaaacaacaatagatcaacctcacaacaactataaataaactataaaacaataaaaaaatcaaatcacatgacagctataaataaaatataaaacaaataaaagaatattgaaccgtttattatttttactgtaaaaaatatttttataaataaaataattcaaacggtaaaaataaaataaaattgtactaatgtattttgtaatttttcaaaattttaatatattatgtaaaaatttatatgctaaaagcaagtaaaaataaacatacataagataatagtctataaatttaagttgcagttattatattggattttcaacataaatgcccctttaattattctttattttgaaattagaaatctttttcagtaatcaagtccttcaattgaaaaacagtagcaataaattctattag

SEQ ID NO: 317634 - DNA, 1403 bp, Cannabis indica
gcggagcccactctggcctcgcagggtgggcccttgtggttgcgagctggagcaaccatagcttatggctagagcaatgggaggggaccccaacagagagaacaataaggataacgagcgcagagcccgcttttcgggcatcaggagctacgggcaagtacttaataggccaacagcccagtgaaccgggtggggcactcgacaaaaggagagcgcaatgagcaagtacgagaaattagccccgctgagccttctatctaaacttgtttctgagtatcagggtgcctttattaagttaagggctttagcgccagacaaaataacataggattggcatcggagcttgttaatttgttgcagctgaaagctagagggttgaaattggacattcggaaggcgtatgacaccaataaatggcgcttttttttttcataagttctcgcttgagcaaaaatggttggattatcgtccttccttccctaacttttattgggataaggcctgtaagcttcttctttgatagctagatgtgactcaggtagtttttgtattgaaatccctgagttagattgttcatgtcacactaactaaaataactgccaactgtcaaggcaattagttagttgtttaagtgttctaaaccccataatttccaccaggtttagtacattttaacaacatggtaatccaagccataaaagtaaccaatagaactcaatccaatgtccaatgaatgtgaatctcaatttgagactctagtttgagttgatgttgagcaagtcaagacaagtctaaacttgtctctagtcaaactctttgtaaaagcatcagcaaggttttcatgagtattaatattccttacaaagacaattttggattgaatcacatctctaataaaatgcatattgatgtcaatgtgtttagttctctcatgaaacatgggatttttcatgagatgtagtgcactttgattttcacagtgcactgttacatcttctgagttaattttgagctcacatgtcaatcccttgagccaaattgcttctttaatggcctctgttgtagccaaatattcagcttctgtagagacagtgcaacaaccttttgtaggttagattttcaactaacacaacccccatagacagtgaaaacaaaccatgttaatgactttctagtgtctaaacaccatgcataatccgaatcaacatgaccagtcaccaactccttgaatttgctagtgccatcataggttaaactagtgttcaatgttcattttatatacctcatcacccatttcaaagcagtccagtgagcatttcctggattagcaacaaaccaacttgtcatgctcatggcatgagccaaatcaggccttgtacaaaccattgagtacatcaaactcc

SEQ ID NO: 317635 - DNA, 857 bp, Cannabis indica
ctgcgaattatatttccaacaagccgttccatgctaagtgtacttttcatttgcatgtttgagttcttcgttcttcccagctcgacacgtgtcttcctctaatgtgcttaccgaattttggatataacagtaggaattatttttactgtcatcctctcctgcttgggttaaggatttgaaacccaccccagcccctcttgaaagtgattaaagggattcaagaaaggttcttggttcttgttaaaggtggtgccatccatgtgatcggaacccttgaggtgactaccaatgacccaattaaggtaagttatataatataaaagaaagtttttagagagttaatatggcatgtttaagctctaattatttttattagttatttttttcttttttcaaatattttaaaatcatttttttttcaattgctttaaatattgtaagttacataaggcacaataaattatttttcaaattaatattttaattacttattaaaacatgaaactcatataacatatcaattcaatataaatgtaaggaatataaaatttattactatgtaaaagttagcacaaggtggcaaaataaatttatatataataaaaactaaaatagcaaaaggaatgtgtatcaaattacaccaatatataacataatgcacacagagcatgaaaatagcaagtaataatatgtagctggcatatatgaagttgttagggaaatttgaatttatatacttaaataattaaaaaaatttattattataccaaaaatttacaccataaaaaaactatactttttttttcaaaactccaaaaatacccccctcacaattctctctctctctgcatcatctc

SEQ ID NO: 317636 - DNA, 2137 bp, Cannabis indica
aaatggaatagccattccaccaaaatggtggaaagagcattccattggaatgccattccaatactttaaaatgcaaccaaacaaggaatggaatgaaaactatttcctttccattctattccatttcattacctccaaccaaacgccaccttaattaattaatatatttttttttaagaggaatattatcctattgttttggatttgatttaatatagaattatgtatattttaattcaatagatagtatagaaaaatattgagcattcataaaatgtcacttcttattatgtttgatatcttaagatgtttaaaaacacttgcaatatattctaaaagagagtaaatctttaaaatgaataagagaagtgtaaaatctatgctacatcaaacaaagtattttaaagaagagaaatattaaaaggcatgcactagtggtgtgtgttatattgttattggtacaattaaatatcatgtttaatatgatttaggccccgtttggaggagctttttaaaaagctaaaattacttttggaaaaaattatgagttaatatgagtttggtaaaatttaaaaaatagctttttaaaaaaatttaagtgaaatttatagcttttaggaaaagttggtccaccctagctttgggattttagctattaagggaagctacaattttggtttaatgaattttttaattgacctaattgccctcatctaattttaaaattttccatttaccaattaattttagggcttcttacattctttcaatctcattcttatttaaaaaaaaaaatgcttctctgatcaaaaactactcaacagtcatcttattattattattattagtagtagtagtaaaaatgtaatttattattttattatataaatatttaaaagaattaaatattagaagaaaaaaattatggtaagttataatataataaataatatttataaatatattaatatgtataaaattatttaaataaattagataacaaatgtcatacctattttagtaattatatatttaacaactatttaatcatttagcttaccaaacacttatatacaactttttcaactcacatctgttttaaaattatatttaccaaacactcagtagctttttctcacagcacagctacagctgctttttctcacggcacagctacatctgctttttctcacagcacagctacagctactatttctcacagcacagttgtgtcaaattggcctttaatgtattaacttttatggaatatcgctaattaatcacaagacattacctctaagtggtgctagacactattggtgtcttatagcaatgctcttaaaagaaaaatttgtgattcatgctaaaaaaatattttatatttatttaaatactattttatttatatttgataaatatatatattcttttttgaacataataaatatatattaaaaaataatatattaatatatgaatagtttagaaaaaaaaaataaagaagccatgaaattttaataatgtattttaaaaactaaaataaaaaaatttatagatgtgcacttacttgtatttatacagaaagcatttttattttttttgaataaagagaaagcatttttattaggtacatactactgtaaaataatgtcttgtaaatgattattaataattaaattatattaaatttaatatttaattatattaataataatatatatgatattatctaatgacgtgacagaaatggatatgctttatataaatgaaaattagaagtgtgtccaaatttattctttttcactgatttggttaaaattaataaaatatgcatctcttaattaattaataaataaatatgcatccattaattattttatatatactttaatggttagtttttttttgaagaaaagcgtacttatattagactagaaacggttagacctcgcggtcattacaaaatataatatcaggcatagaggaaattggcacagagccaaacatctgatgggaaaatgcccaattagccacattatgggccataaaattacactgtctacgaacaaattgaaaagtacaaccaataaaagaggtggaggtatttttacaaaaagagacatagttatcaagctcc

SEQ ID NO: 317637 - DNA, 1714 bp, Cannabis indica
ttacgttcttaaagtaataggtgtgagcaatgtagtcacaatcatcttcgtcctcaggcacataaatttgttgccaatttgaaaacttgggagttttaaagtcattggtacattggtctttgccaagaatggtgcatgccttcaaattgttgttgtgcaataaaaagtcagcgacttgcagacaataaggaaggttgagcaaaatctcatgcatttccttgaattatggggtgtggatgggtctcttggtgatcgctgaaaacatgacagaagaacataattagttaagtataaaaaacttaaaataagagtttgagagaaattggtacttatgtatgattcagaatctggttttgttgattaattataaactagtggtccaaaagaagtcaccttaaactcctttttgttgggaaaccttacaatgatcttacgatcactaatatgggttccgagataataaaatcctcctgctctgtgcttcctcgtaggataggctttgatagagtaaaaataaataatttctaggggtgttaaacactcccattttaagatatggtagagggatatcaaaatggctagaattttgcaataatttggggaaagtttaaagggtgtgatcccaaggtaattgtaaaactccttgaaatagtccctgagggggagaactgctccacccctaatgtgctcgacactccaagccccaatattggaaggctcgctagtgttgcagccctcatcttggtatatgcgctcaggtgggtaacatctaaactccccctgagcaactgatcgaatgcgacatcctctctcattccttatgccacatgaccttaagacatctctgacgtaagggccaatggatatgaccctagatttaattaattctacctcgaaagtgacaaaagggttttgtggagtcttggatttgcgagctttgtaagccatgagtttaaattccaagtcacctagtgaaaagcaacagtgactggtggtaaaaatattggcttcgctgggggaatattaactaagcaagacgattcaagccaagctgcttctcacaagaaacgtcatttaccctcaataacttcttgtaaaaattgcctatagtggttagaagtttcttcttgactagacctaatgaggtgattccgaattttcgcatcattaatttgaagtaaggtttgaggtttttgggtttgaggtttataaactaaggcttgaaattgaggacattctgattctgatgtttgtgggagcatgaattctgggctaaattaggacatgatttcagagaaaaataccctaattcttgaaaaaatagagcacaaataaaaataccttaaattttctaagccctaaattacccaaacattcatacagagcttacttaaacatatggtaattgcaaaataccatactcgtaaagaaatcaagattaaaaaacttaaaaagtcgaaaggaaaaggggaaagtcacttactggatttttgaagaattatggttttgaagaactttgcaatgggaactccgaatgtagaaagatcgggtcttgaagattttgaagttgaggggtgcagtccgatgaaactcgaaggaagaatgtgagagacaaagagggcatgcaagttcagagaagaaggtggttgagagtttttcaaaatctgaaggtttcgtgggcagtaatggcaaaaataaagggaaacttgaaatt

SEQ ID NO: 317638 - DNA, 1952 bp, Cannabis indica
ttttttttttttttgtcttaaagctttgtgctcaacttttcatcttaaaacatatgcaagaatattattttattatgctggtatttgttatagttacaacatgtaaaatttataaaaatttaaataagttattgtgaaaaaaaaaaaaagagaatttttttataacaccaatggtaaattggcacattgaaaactctattataagtattaaaatttatttaaaatttttcgaaaaattacaaaaacaatagtgtaactataacgaacacatttttattgttcaaaatatataatctcatcgttgtgggttgtacatccaccttcccaaaaatattgattcctaattagaagaggtaaagtaattttaacatgtgtatcaatatggatcaatatagacccaaaagaacattcacacctttaggctcactagtcactaccctttggatgtttgcatattatagagtactgttataaggtatcagtgatgtttcgtaccacttaaaagtgatgctttataattaattaataatatttatttaatacttaattataataataataatataatatattagaagatggtagacacttgtaactttaatattttctcatagttatttgtaccaactaggattattgctatttatttgaggtctattgtagatcttgggcctttggttctctaaccatcctagtccacacccatagatggatttgttgtttggaagaaattgcattatatacccacttagctttatttattttaattttaccttcatttccatattcattgagatataaccatttttatatgtgatgttcctattatatcatttagattaatataaatcatatgctaaacttaagtagaagggtgagggtatattaggcaactcaatcacaaaagtgagttttaatgaaatataatatgataatatttttaattaatggatacaaaaaatatgtatttttcaacttatcccatttgcttgtataggcaaccaaaaccaaattctcataatttgtagtttatgggcttattggagttgggccatggtccaatttaagattttaccaaactctcaacaaaataaaataaaagtttcaccgggggtatagatcaaattggaataaaaaacggataattaatattttctctctaaattttgataaaattatgtatcctgaattttttaagttgttaaaaatttctcgcaaattattgaaattattatattaaagaatttttgtctaattttattaataaaagtcagacgtgaataaaagttcaggaggcactgcgcgttgcatgtcaaagttcgagagacacaatttaatacgtattaaagtttagggggcacaatttagtataacgacaatcgcaaggccaaccttgagaatatatgggcctaaggccatttaaattttaggaccctcactttcagaaatataaaaaaaaaatattgaaaaagattgtcattgtactcaaactcactgtgtaatacgccatacaccccaaccaactaacttatgaatatctgttatttacaatacatttaattttacttaataaggccattcattttttattttgggctctcagaaagtgtgtgccttagtcacgagcttagcttgcctatgtgagggccgaccttggacaatcatcacgttagtaaaattgaacgaaattatgaaaagtccatccataatctcaataatgcatgctcaggagaaatttttaacgatcgaataacataattcgttacacatcaaaattaagaggacaaaaaatatcctaattatccataaaaagaatagcacataatgtggagagtgattcgagggtagtgatcaacgtacttaatgggaatgaatcctgttgggagcttgataactatgtctctttttgtaaaaactacctccccctttttattggttgtacgtttcaattt

SEQ ID NO: 317639 - DNA, 1232 bp, Cannabis indica
acacagttcaagacaaagagaaaacaaaagataggtaccccaaccataaggaagaaaaccagactcaaaagccaaaaccgccaccttggaatccaattctatcttgaccttacgcactcgacgttctgttgcctccttcaaagctaactgaattcccagcaattccccttccagcacacacgacaccttggagaagtcaacaacaatccaaggatttgagaggatctcatcatacaaacaaactacccccaccaatgcatcaacacccgacacagaggcaacgattttgcattaccagtagtcatcccacttggagtttggtgtgatgtccttcaaggtaactcgagtctcttggcaatcttcccagtaatggctagaagaaaactcctgaaatctcgccatgcaatcccaaaagacacgctccacatcacagccaacattcttaaatatcatgtcatttcgccacttccaaagagtgtcacacacgcaagccgtaaacaggataagtgcctcatcattaaggctcatccaccatccaccaaaatgcgatagacaattccagccaagccgatcaatgcaaatcccccaagaacttctgaaccatatacccctggtcacagaacattgacaaaacaaatggaaagtagattctgcttccaaattgcaaaataaacagttcctgtgctcaacctactttaaacccaatctgacagatgtggggagaagatcagatagaattttctaccccataaactttagacgaggatgcaggcgcagcttccaccacttttcccatagcttatttggcgtattgaatctgtgttgttggctagcccagtaagcacttttgaagaaaaagttgcccgactttgcagcattccaaaacacaatgtccgtgccccctgttaaaggcttgatattgagaatatcattagcaattcctccattgatcacggacaagttactcattccacattcgagagccctccacaaacagatccttgacttgccaaaggggctgattcttcttgaatttaaaatttagcttgatttcctccgccttcctacctgggatccaaggtctgtcccaaatttcacaattaccatccgcaatcataatgcccgcttcctccacacaaatatttcgcacctccaaaagacttttccagcatcttgaattagtccctttttttccacagtccaaatcggacagatatgacaatacttatctt

SEQ ID NO: 317640 - DNA, 1368 bp, Cannabis indica
tgatcatgcttggaattccatgtcgtatgcctgggctctagctagagtgtttaagaaggttggggccactcgactggtgctgagtaagtggaatagagaataatttggtaagctggattactgtattggctagatggaatggaaacttaaggatattcagaaattaccaactggtttaaaagttgggactttgaggtcaatgtgagaaaatcccttaataaagatttaagatgaaaagctctttactagtagtagatatctcgtgtttcttggatcaaggatggtgataaatgttctaagttcttcttcattacgaccactattcgtaataggaagaatgtcgtggagagtatcttaaatagtggtggggtctagttaacaaataggtgggacattggtcgggaattttttaattttcttagggacatcttctctaatccagttcaaggccctatagagaatctgggtcctttgattttagatcatttgtcgcccattgagtaggttgactttgatttaatccccaaccatgacaaaattagacaaactcatttctcaatgggaagttttaaagctccgggtgcagatggtatgtctgctctgttctttaagcattacaggaattctgtgggtgagaatttttctgagattgtggtggacttcttccaatctagaactatgcatttgggaatcaacgaaacaaatttagtcctaattccaaaggttcccaacctaaaaaaagtggcacaattcagacatattttcctttgcaatgttatttacaaggttatttcaaaaataattgcaaatataattaaaagagtcctcccaaggatgatatgtcctactcaggaagctatcaacccagggcagaatatccaagacaacaatgtgttaatacaagaaatcatccactcgtttaagctcaagaaagaaaaagagggcttctttcctataaagatagatctggttaaagcctttgataaattaagctggcaatttattgaccatgttctctgcagcttcaaggctctgaacaagttttgtggttgggtccgtcagtgcttatgcacgacctctttcaatgtttacctgaatgggggaaaagttattatacttacccttatgtctggtattagcaaggggaccccctttccccttatcattttatctgggctactaaaatcctctcgcgtatccttaaaagtgccctagattttggttccatcagtggaatcaagttgagtaggaatgggcctcgactttttcatcttttcttcgtacacgatctaatcgtagtgggtagggccacgttaaaggaagctaaggaaatttggcattgtttggagaaattctgtgattggtcgg

SEQ ID NO: 317641 - DNA, 1729 bp, Cannabis indica
tctctcacggacattcagccttcattggaaatctgaatacacgtgtcctttaaagaggagtctggtctcgagtttctaggtgagagaaatctcactataacaatcacattaactatccataattaaaggacacaatatgaacaactatcaccgtgatcagatttccaaatcaacatacatgtattgcctcatgggctgagcttaactagataaaacaaatttatatatttgtaaactccccattagaggaaaagagtaattaagtaagacctttattattctataaatacacattgaatccttcatgaaaagggttagaaattcttgacttacttacttgctcaagaagagaatagattgctcatactcattgtaattccttgggcttttctagcctatctaataactacactgactcatagactaacgcttattaacaccccaaccacgtaaaaaactctgagtgtcctttttatttattgatctgctaattgtattttctttagctctgatattaaataattagtttttcaaaaatctcggtaaataattatttaaaaccattttaaattaattaagttaatttaaaattactaagttaatttgaaaattaatcttagtccatttacatattttcggtttcaaaacggtaataaatacgtaggacaatccttatatattttactatgagatgcatgataattaagctgtgtggaatttttatgtatggcatgttattcgctagtgcataatcatgttataaattaattattaatgaacatttatttatatgaaataaataaacaatgatgatgaattagataaaatttggggtattgctaattttataactcttaaaaaaattagaaaataaattataaatctgatttccatcatcttgattcactctaagagcgattttgtaattttatatgatcatcgtaaaccacttaattaattaaatatttttttatttaatttattcttaaataaaccattttatctaagataatattaaaacaattttaatgagtttattcttaaataaaatatttttatttaagacaatatatatcaattttattttgtctttaattattaaataataaaataattttatcatttaattgaaaaaaattaagacaataattgtcttaacaagtcaaagtggttatagattttgaatttgaattttaaatctaaaaccataactatatttattttaaattcaaattgaattgacaaaataaatatcatacaaaataaactaattatttaataaaataattagtaatagattatagtgtgtatagattgtatatgtaccatatatattatatatacacatatatgaatatatatttatacaatataggggccgaccacctagccactactgtggctggcggctctagagagcccccatggccacgttggccatggagatccatgaaggaagtgttagatattttattacaatggaagaaaatcaagatattacaactctattgtaatacaatacaaggagcaacaaagagattaaataattgttacaacaacataatatacaatatatatacactatatatattatatataagaaatgtagaagaagataagaacacatgtaatataaaatatgtatatatatataataagagaataatatatatatatataaaaactcactcacaaccttgagtgtagattagtggggatcaccatgact

SEQ ID NO: 317642 - DNA, 1345 bp, Cannabis indica
gggtaattaagtttttatgccatatatatcaaaacatatcttcattttcccatatttttgtaaatagcccttttaatttccctattaattttgtcaatctgatatgaaatgcatttctactactagtctttcttttttaataaatggagttgttatagggtctattaagccttctgggggccttaggcaaggagatcccttatctccttatctttttattctgtgtgcggagggattctcttcccttcttagggacaggcaagatgttggccttcttaaagggattgctatctttaggagtggtcctttgatctctcacctttttttttgctgatgttagtcttattttttgttctgttgatagcaaacctgtcgtgctattcatgatgtttttagtatttactttagggcttcgggtcaggctataaatttctcaaagtcctctattctctttttttcccaatactttgcaagagatcaaaaatattttctttcatacttttaacttagaagatggaccttttatcagtaaatacttaggtctccctcaatgtctctctagatctaaataccactccttcgcttttcttaaagataatgttgcttctgtccttagatgttggtctgctaaatgtttttcaagggcgggtaaggaagttctactgaaggctgtgattcaagccattcctgctcatgctatggcttatttcaggttaccaattaagctttgcaagggtattgaggcagcgatggccaggttctggtggggttctactggggtttcgaggaaaatccattggaagtcctggaagtttatgtgtcaatccaaatttaaaggggacatgggttttcgatcgcttgtacatttcaatcaggctatactagccaaacaggattggcgaattcttaaaaatctcaattcttttcttagtctggttcttaaggctcgatattttccccgctcttctattcttgaggttgtccctggtcataacccttcatacacatggagaagtattatttggggtcgagatttaatggtttcaggacttattttgaaagttggggatggtagtggtattaggactttggatgaccattggcaggggcggagccacagccaagagaagagtggccatggcccccccaacaatttttaatatcccttttgtatatataagtaaatatttatatatttataaataaaaatacatatataaataaaaactaattaatatatataatatatgatagtaaaatgtatagacaacgtaataatatatatatagtataaattaagtgtttaatttattaaaaataaaataaaaattaattttttttagaa

SEQ ID NO: 317643 - DNA, 689 bp, Cannabis indica
tttttttatttcttattctcaattgtgccataaatactaattttactataaataaagatgaaattaaatctaaaatacaaatattttcaatatataaatatataacattaattttatgaaaatgttatttaaaagttaattaactttgtatttttacactattaaatctgtaatattttgacatttaacatccaacaaccacatcaagcctcgcaagaacttcgtcttccgataaagacctagggatgaagctatcactttttgaggttcatccgcaatagctccaccttcaaattcatacatctagccatccgagagatcgctcatctaaaagatataaaagattttttcaacgtgttgtgagtgcgatttaaaagaggagtgtcctcacacaaataacatattcaaattcaacaaaagcaacaaaactaactccaaaatagagcagagtggttgggtgtatcacagtgactcaagaattatacgagaaagtaaacattaaatctttgtgatacactcaaccactaccaactttgtcagtctagggtcagtctgaactaaatacgcgaatattcaaaatgttctaaccaaaagtttgagtattcaaagttgtcgcaaagaggatgcaagtattcaagtcataggtagatttttttagaaaaaactccctattttccttaatttctctc

SEQ ID NO: 317644 - DNA, 948 bp, Cannabis indica
cctggcaactcggtctccccccttttttaggatgttggtaatggtatcatgctcaaatagtgaattgagcatggcaatgtcccagttcccctcttcatttagcaaatcaaccacccttacagccctctcaggcttagggttaacgggtcttgggtagaactcattaccatgaataacccaaggatccgaccaaacattcgtgtcttccccatttgatacaagtttacaagccccttttctgagaatcactttagatttaaccacatttttgcagaaccaagagtctgattttttgtaggtagcctccatgaatggcttacctctcaaatatttagcccttaacaccttgcaacaaagggtttgctcatcagtaagaagggcccatccccatttcgccagtaaagcctggttcaattctatggacttacgaaatctgagtccaccttttgatttaggaaggcataattggtcccaagctttcaagcacaagccacggttaccctgctcacaaccccaccaaaaatctctgatcataccatcaattccagaagcaagatttttagagagcttggtagtttgcattgcgtaaactggcatagccagccccacagatttgataagagtggcgcgaccagctttcgaaagtaatttcatcttccaaccatgcccttttgagaccaagttgtcaaggaatgaaattagaaaatctgcatccttctgattagatcgaaacagaggagcctaaataagttgatgttcgtagtggccatgttaagcatgataccccttttcatcctgtcactggtattatcgctgaaacaaatagaggttttgagcttattcaaactttgtcccgaccagctgcagaatttctcaaggcagttccaatagcctttggcctcctcgaaagttgctcttcccacaagaatcatgttgggttttgtgccc

SEQ ID NO: 317645 - DNA, 782 bp, Cannabis indica
tcattttttttttcaaaaatatatatgtaatgggtgctcgatggggatccttccccccgtcgggtaatacctgccccgcccccgctttaatttaaacgggtattaggacgggtatggggtgaatttaagaagcgggtataggggtgggggagcaatccccgcacccgtcccgccccgtttacatccctacatttaaataaatagtatcttacaactcttacttcaaaatcatttcaagcgaataaatcaatcacacaattaagaaaaaaaaatataatactactttttaaacaaatacaatgaacaaaagatttttatttttattttaagtatttatgtagaagactcacacactttataaaccatgtgaattttttttttcaaaagtaaagtgattaagaaatcaaataaccttttttttattggaacaaaatataaaattttacatttttttttagaaaagaataaaaaactatacaaaaatcagctaaactcatttgcactttcctttatagactatagaatggatgcattttaataactagaactaattaactgagacaaataaaaataacaaaagaagtaatttatttataatgcatatgtgaagactcacaatccttctaaataatgtgaaattatcataaaaataagaataaatactattttggaccctgtattttgcaaaagttaccaattggatcctctgttttgttcaatgacaaaaaaattttattattttttttctagctaatggaccaatcccagcccatataatgtaa

SEQ ID NO: 317646 - DNA, 980 bp, Cannabis indica
aacaattagctagcataactgagtacaaattatacaacaaaaacacatttaatctcacctacattgctcattcaaattttcaaataaacttggacagaacgccctaatttggtatccttaaaaagcaattagtatcagaaatggaatagaacacaaacctcaagtcatttcagtcaaactctagtaaaaaatccttaaatctgcaaaaacccatgtatcccaaactccaagctcaaatctttttcctcagttgtaaaaacccactttccaaaatcagcaaaagagacgaaaccagcataaaagaacagctttttttttttttttacaaatgggcaacctttcaaattccaatcaatctagcaaacaaagcccatttccatttccatttccatttccatttccaaagcaaaacaagctcaaaaatttacccctttcttcaacacaaaggcaatgtacaaagagatctgaactcataaaagccaaaacaacaaaatgtacgaagtccaaaaaccacgatcagaactgaaaccaagaatgaaggaaggacacatataataaagaaaaatgaaattaatttaatggtgggagagtggggttcaggtacaggttggtcaaataggagactgagatgagagagagagaaagaatagagtttgaaaatgggagactgagttgaggtgagtcgagtcgagtcgagtcgagtcgagttgagtaataaattaaaaaggtttgcattaaaatctttcgttggtcttcttcactgaaaaacactattttttaagatactgaccagttttattgcttatactgcaatgccacgtggcatgtttatgtgggtctacctaggccccacttttccatttcagacaattgtctattttatttgtttagtgtcattgctttggacataaaggaaaaataataataataataataataaggccaaaaaaaattaaaaataaaaagtaaattttcaataa

SEQ ID NO: 317647 - DNA, 1300 bp, Cannabis indica
tagacaagcaattgataacatgaaccaaaacatatacatatgaatgaaaaatacttctatttctttattgatgttaaataaaatggattacattgaaatggagttttatttagggcataaaacccaacatatagtgcctgttattctgaattctggccacctgacgtgacacctccatggtaaaaagcagaagacatattgaagacaggtcaacactaaccggctaggtaagtgtcgtacaacctcccaacctacaagatcttatggctacatagttgacacaagcaggttcatcctgttatcaatatcatctgcaaagataaaaatgtaaaagaattgttagatccttgacggacctatagctggccggccaagcatataggcatgccccaacacttgtatttttcccacaagccttccaatttttcctcatcactcctacgacttcagagtagttcgaattgcccacgtttctagggattcttcataaaaagataacaaccctattcttcagggattattaattatttatattgcatttcaaatatacaatgtaaattacctattttaaaaggatattttcctgtttgttagacgtagtagcttgcaaccctagtactatataatggacaaggtgcatatgctcaagatctcaagctgaattgttcatgcaaatatgctcagaagcactaaagtaataagtcctctctcttttatcatacttctcacctgcaaaaacacattctcattataatactaaaataagcctagctagaaattacaagatttcagcctgtaatctacttggtattatctcaagagtgaatacaacaaaagaggagtaggtcattacctgaacaaaggggccaaacctctataaatctttgtgtctccacatttattattattccacacgtgacagtcataagcgaaatctgatcctagttaaactccgtttcggttggctaaatccacaagcaacattttggtgatttcattgagagcctagaattctcgtctaaaaagctctcgtctttttttatctcaattctacatggctgtcacaagacatgaaaattcaactaaaccataagacccaatggccatggatcctaatgtccaagtgccatttgccgtgaccaacccgagtgtggctggccgaccatcacgtttcggcctgctaactggagcctcaaccacagaagtctggccaagagagtagactcctactggacccaggggcggacccacattgtagcgagtgcccccccctgaaaaaaaaatcgggaaaaaaatgtat

SEQ ID NO: 317648 - DNA, 1441 bp, Cannabis indica
taaaacaaatcctattaatatttgaactgatattaaatattcgagaatcacaccccatttaaaaagaaaacaacggagattaatctcaaatcctatacgattgattatgatgagatggtcttataaaattgaaggctaccacacctttgttctctcgcctcattctcacctgctccgatccaagcatcgtctttaagaaaacccgatcctaatcgtcgcaagcctggtcagttaactggtagacttgctcttcggctaccactccaatccggagtacatcgtcatctcaaccggagaacagaatgcggcttcaaatcttgaagttgagtcagatcgtttattctacaatgatgtcgttcgagtctccgattcaggtattgtttcatttttattcatttataaatacataatatatagatatatatatttggttggttgttgagaaatgtagatgaaaatcgaaaaaggaattgtttcaatttctttattttattttcagttgatcgattgcagattttggacaatagcaatgacaatatttatatggattgaattttaagtcgtgttgcttcaactgccaggtaaaaaataaaatttggactttcaagatggttcttattgtttcttattgttttactattcgagtttgattgcttcatgtaaataattttctaagcaattgtctcttggtattagtcccacggccacggtgtcatgaccatgatcatgaccaacagctacctagctatatactcttcatcttcttcttcgacatggcttgctgttctttgcagttacctacttctgattttgaatattctacaacaactacaaggacatggaggagtaagagtaagacacctcgtccatttcaaaccatctgctcttctcttcaaaatggaggagaaaaccagaacccacttcctcctgatcgtgcccaagtaactgaaaattaaaatacaatttgagtccttcttcaattgttataatttaaatgaaccatctagcatcatgtcgattgatcaattgttgggtagtttttctgctgtagatgtggaggaggagtcgaagaagtgattttggttgaaagatatggcaatggtactgctaagaggtccttactttgttactttcctccttttttttttttttttttttttttttcattttgattaataaataacaatcataacaactaattactaaatttactaaattccaacaaagttggttgtttaaggggcgacaatgaacacatttcccataaaatatttttttaagaaaaaagtttgaagttttggtagtttcaaactaatgtttttttattgatgaacttttttttttatgtaaaattgatgaaattggtagttttggttaggaggaatgaaaatataggaatgggaatgggagtaggaataagaataggaatggaatggaataa

SEQ ID NO: 317649 - DNA, 1151 bp, Cannabis indica
attatgcatgttgcatggtgaagagaggtgactgacaatatagaatttttatataatatagtatgaatttagggtgcaaagcgctatttatgtaatttatatatttttatggagttcgataactttattatttaataaataaatggttttataacaaaagaagcaaaaggatgaatgatgagagaggctgctgaaggcttaagctgcgtaatggaagggtcaaatgagagcatatcacatgtttttattcttttttatttgtaataataataatattattattatttcattacattatattatgaaaaggtgtaccagttttatttgccaaaaccttaacctacttcaatctttttgtgtggatataattgtgtggacatttatgactcacaccatttcttctctttacactcgtgttattttatatgtttgtagacgtatatgtatacgtatgtcctttaaagttatttttcagtttttttaagattaaaaaaattaaaaatatttagataaaaaagattttttttttcttttaatttactttccgaagactttttcgcatgaagttaagtttccaaaaagacctaagaaattatttttaaaaataaaatattttgcataatttctaattatttacatataaaagatttttctcttttaaaaaaatatatttatttaaggttatccaaaaaagaaaaggaaaatcaaaacttttacttttcttatatattttaatctctaaaacaaaaacagaagcttaaccaaaatctaacattaatctctcaacatcgttctctctttttccttctaaatgcattattaaaattttattttctcaattttatataaaatttcacattacatcaatcatcaatactcatctgtttcttctatattatttaagtattctatcttttaatagggatttttttttcatatatatataaaaaaaagtaattaaattacaaaaaatacttaagatgggccctatcaacattaatacaactcataaataaatattaccaaattaaataccatttctctactatttaagccccgcggaacaaaacaacaacctcacggacgcaaccttcgatcgaccaacccaacaatccaacacaactaaaataaaacctaaccagaaagagaac

SEQ ID NO: 317650 - DNA, 612 bp, Cannabis indica
gttgtccactcctaatcataatggactcatcattcaattgtccctgaaagggttattttggtaacatataaaacaatatttttcccttgatattttttttaatgttttatttctcttgtataattaaaaactttatttaaatgaatacatgcatttaccttgtaagtacttttgaattgtggattaaaaaagagatgtgcttgccttttctatttaaaattatatttaggcaaaaaatgtgtagatgtataaatattcttatctagctatgatggtaatgatgcaatgaaacaattgagatttctcatttaaagaattatatcatcgtagtgatcttgaaacaatgataaagatatttaaaagttaactatcaatatactctaatcctgaagtacttctagactctaataattttttgtttatatcaactatttggtgctagagtctaataatattattaattaaacattttattgtttgattttcactctcaatcactatctcttagattttaaataggaatacttacaaaaatactgactttttccctaatttttacaaaaatactgttggaaattattttaccaggattttagatctactcacaagtat

SEQ ID NO: 317651 - DNA, 3045 bp, Cannabis indica
tataatcatgaaataaatcatatcaaccatgcaacattaaaagcaattttttgatctttacattaattagtaaatctgattatattaaatgggttttatttagggcacaaaacccaaaataaccaggatgctcaaatccatgttggggttggccagccaggctatgtagatggatctctttgcaacattgttgcacctttccttagcatcagcctcggctccctcaagcttcacatttgctttattgagttcttcttggagtttttgataggcctcgcattgttctttggcttctttttgagcagcctcgagcttagccttatggtttctctttaactcctcgacatccttagtcaagcgcgtgtttttcttcttggcatcattccactgctttgcaatgacttcgtgttgttcaatggacttgcagagttcagcttccagttgttgattttttgaagacctcaatgttgtgccacatgagacagaaaggatggctacaaaaaatatataatttcttttatatatagaatttgaaagaaagataaagaagagtaaagagaataaagaaagaaactaactgagaggctaaagttgagactcctctcaaacaactcctataagttgccattatcaatcaaatcccaatcgacagactgaaaggatttgaaatgacgccagctggaggtggcacattgggagcagtactctgagccggtgctttctgcttcattgggcaaagggcaagaaggttcaagtagaaccatttcaggccatttacccgaagacgtagcctggtgagtcaaactttaggcttgctcctaaacgtgtacgatggccagagtgtgagcttgaacctgatcttccactggctcgagagttataggctgcaaggcacgtttcttgttggcagtggtcttccttgatctcttcagaggctctggagtcacccctgatgaagtttccgaggtagcaatcctcttctttccctttttgcaagaggtgttgggaagattttctagatccatatctgcgaggcaaagaaatacatcaacacttgttcaaaaatagataaaagaaaaatggggaataaactcccacttagagaaaagttaccataatcatcagatgatgaagaggaagaactatggtaaaaactaaactccctagaccctgtgatcatgaatatatcataagagtttattggagataagtcccaatttgaatctggatggctcgccctatccaagttggtaccatactgctcggcaattccgtaatatgaactagtgcaactaagctggacatggaatcgagggtaccaactatcaaacctatgggttatgcaatctatacagaagttgtaccatgtataaaaattacattggctaaccctaaaggttactagcaaggtacgtgcagtcctaagtacagtgggtgaccatccacattgattacctcaggatgcttcttctttagcttcctgaggggttactttcttgagatagtggatgcgagcaacgtaatcctggatttcctcatcggttaggacaagaaccttctgccacttaaaatatttcggaaccttataatcacaagtgaattggtccatgccaaggaggttgatagtcctcagattagctttgttcagtaggaaatctgctgatcgcagtccgaaaggaagacccagcaagattttatgatgctcaaccatctcaggggtggggattggtcttttggtaaccgctgtcaacacaataagtgaaataagtaagcgacctcaattttataaatataaaaagaaaactcaaaaccaagtttttgagacaaaagtcacttacgtataatacgaaatgcagttgtgttgataggagagagaccagtagtccagaagaaaacattcttgaactcagtcttgtttggtaacctcacaatgatcttgcgatcatttgtgtgggtaccgaggtagtagaaacctcctgaatcgcatttccttgcaggaacaactttgactgaataaaaatatacaatctcgaggggagtgggacactcccagcctaaaatatggtacatgacttttaggcctgctagaatcctgtaagaacttggaatcaactgaaaaagggaaattccaagataattacaaaattctttgtagtactctctcaaggggagaactgctccggccttgatgtgctcgaggctccaagtgcctatcccaaacgagccactggtattggcactaccatactcctcgcgaattactctttctggtggaaagtatctgaatcccctaagagcaacagattggatgtcgcatcctcgcccttgcttaatgccaaaagtctttaatacgccaccatcatagtctccaacggcccttatcttggatttaataagctcggcctcaaatgtgacattaggatcctggagggtctttgatttatgagtcttggtggacataatttcaaaatctaactcacctggtgaaaaaacaacggtgacccgaggtaaaaacaagagtctcgctaaagagatagaagataaagtttaaggttcaagccaagctgcatcttgcagataacgacatttaccctcaattttctcttgcaagaaccgcctatagcgactggaaatttcattttgattagtttttattagatgattcctaattttggcatcattaatctcaagtttggatttaggtttttggattctgagtttgaatggaagggctaattctttaggacattctatttctagaaaatctagagttgaaatctcaaaaccagattgggacatattgacaaaaaaataataataatcctaattcctgaaaggagttaattcgacttaaaccagaaacctaggaatttaataaacctaagttcactcctcaaagccctataaattacccaaaaacaaaattgaaaaaaaatacttaaaccaaacacagtaaaagaagatgcaatcggaaacaaaaataaaagtatcaactcaggaaaaagggaataacaaagactaagaaataaactgttgggttttatg

SEQ ID NO: 317652 - DNA, 1491 bp, Cannabis indica
gagtacatcaagcttgcagcaaaatcattagaggagtctatgttttattcaagtcaattactgtgtacttgttgaaatttgactaatgaatcttatctttgggtatggctccctggactagtagcgatctgcaaggattgctgataccacgtacaaaatatcgtgtgtcattttaatttctacaattttactttctgcagtttaattttgatctatcaggttcagtttttgatagagtagatttcaattttgttcaaacaattttataacagttccacattaattaaattgtttgttaattttacttggtaatattaaaaatggaatttcaattggtatcatagcggttcactaaactcttagtgaaatattgtgattatttttcgtttaatttattttgtgtgaaatgttttcttttgcagaagttagtttggtgtatcgtcctccacttctaaatgacttaaactatccgtattggaaagttaggatgagagctttcattaaagcttaagatgagaaaacatggagagcgattttgtctggatggtcacctcctactaaaaaaggtgaagatggaaacatgaaggtaaaatctaaactttttaaacagaagaggaaaaactttctagctctaataataaagctcttcatgtcattttcaatggtgttggggaaagcttcattaaacttgtttctacttacgtttttgctaaagatgcatggactatccttcaaacccagtttgaagtaactgtagatgttaagagatctagattgatcatgttacaaacaaggtttgatgatttaagaatgactgattctgaaatactgtataaattctatgaaaggttatctgatatttctaatgaatgttttgcccttggtgaaaaacttgatgattctgttttggtgaaaaagatagtgcgagtacttcctgataggttcaatgttaaactcacggctatgaaagaggcaaaggattttagtactatgaaagtggaagaattgatgggatctctttgtacctttgaactaaattaaaatattcgtcaaaaaggtaaccaaagcgctttcaaagaaaaagagaagaccatagctttcaaaagtattgaaaaagaagcaacagatgatgaagatggtgataatgaaatgacaatagttgtaatgaactttcaaaaatacatgaagaaagtcattaaaagctaatgcttttcgccttaaaccttttcaatctaataacaaaagtatttagtgtagggagtgtgaaggatttggtcacatccattcagaatgcgcaaacatcttgaaaatgaagaaaaaaggtatgattactagttggagtgacaatggctttgaaagtagtgaggatgaggaatgtaatattgttggaatttatttttaccaggatctgttcgaaatttagaagaggaaaagagagggaatgatttcggccgttttactaaaagtagtatgttttgactgagcaatcac

SEQ ID NO: 317653 - DNA, 746 bp, Cannabis indica
atgagtatgatatgtccttaatttaacaagaacaacccctttgtttgtgtttcacttcctactaataattagttgaaatgattggcaggtatcattccaagtggcagatgctttggaacaaccatttgaagatgggaaatttgatcttgtttggtccatggagagtggagaacacatgcctgacaaacaaaaggcatgtcttaaatcttaattaatgtaaaatcaagtaactcataattatgtacttaactagtaaccaatgtgagtgtgcagtttgtgagtgaattggttagagttgcagccccaggaggaagaatcataatagtgacatggtgtcatagagatcttgaggaaggagaggagtcattgcaagagtgggaacagaatttactcaaaaagatatgtgatgctttctatcttcctgcttggtgttccacagctcactatgtcaaattgcttcaatcccactctcttgaggtcttaaatcaaaatcccttttatataaatttataacaaaacaaaagaatgttactcattcatacatctcttaactaacaaattaacattataaacaggatatcaaatcagcagattggtctgcaaatgttgctcctttctggcctgctgtcataaaatccgccctcacttggaaaggcttcacctctcttttgcgcgctggtaaccaatactaataaatttctacttccgtttatttttactgtttcgataactattatatgaagatc

SEQ ID NO: 317654 - DNA, 1693 bp, Cannabis indica
aatatatttaatttctactaaaaaaaaagaaagaaaataaataattaaggtgaaatttacaatgattaaaacttagaatgatttattttgattgcatctactttatatggttatataatttaattctcaaattccaatttttattttatagcagatttcctaaaaaaacttatattcgggctaagacatattaatctcaacctatatgtaaattttctactctcatgataaatttaaacacataggtggcattacgcataaaaatcctaaatgctacacaaaccatataggcactctcgtcctatatcaaaatttatatctatttcactatagcataatcaatactcacttatcaggttttatattaaaatcataaaacatttaattggtgatcaagaaattaaaaataattaagtacaaatgaaatatgcacatagaaaattgagaaagaactaaatcatattaaaatcaaaataaaatgttaaacaatctccattaacaaagtatgtaagtttatgcaaaaaccactccaaactcattggcttacaatcaagcgcattctgagatatgtaatggtactgtcaactatggcctttaacttaataagcctctaaattatgaatttaagaacttttgtgatgctaattgcaactgatctagatgatagaacgtttacctctagctttgcaataatttttggccccaatctcattatgttatgcccatattttgagcaaaaatatggtcacgacacatgtacaagagatgaaaaatgaaccagctagaatattgaagaattaatatgttatttatattgcctcaaaaaatactagtcacggttataaattgaagtctttccttaggtgacaaaggataagtcaaaataatagctgactagtagaccaacaagatcaatcacaaccaactcgggaaaagcagagtacaagaaaattaagacaaggaactttgattgatcgaacaagacagtataaaggagttcaacttaaggagcaagcataaatgatacaatttgaagagcttactcaaaagcttaaaaagaattgcccaaacttcatcatgaatgatcaataatgcgagaagaatgtccaaacatgtgtctcacatatatcgtctcgtcatcgtacaacacaaggcataactaaatacaggataaatgcgtccttataagaaatgcaaagatatgtacgaagacgagatgatgagtcattacaaagagcaagtatacagtgagatagattgagataaatctccatagaagttttatctaagtgaattgcgagcagcactttaaaagcgggtatctcggtaaaataactacatgcgtataggataaggctaaataaatggttaatttagaatcacatattatcaacacgttgtaattgtatgaaatgtgagaattataagtttcacgagaagttatttaaattcaaaaaaataaccgccaatatatctcagaaatcctataaatatggacaaaacctacggtgtaagggggaattgagagaatataaagatccttacgatcaatacttgtatgatacttgtactctgtgtaaacaaaaaacctagaaatgaaatggactcgtggataatgaagatttaacttcaacactacgtaaaactgttaggttatttgtaatattaattttagattaagtttagtatattt

SEQ ID NO: 317655 - DNA, 666 bp, Cannabis indica
ccacatattttaaccaaccctacgtgcgactgtctaaatatttataatacattaattaataacattgaagtgccaagtgagaaattgaagcccatctaaccaataagaacattataaaatttattggatttttggtgaggtgcacagatgttactattggaaaggatgtcattctacaaatttatatggatgctatattgtagcattgatgctatttatattttaaataaaaaattattatagctaaaagttaggatttatatattaaataataatgtgtgagatcataattatagcatttttaaagagtgctatacattagagtattttagaagtaagagtgcaaaaaataatgtgaaagaaaaatataataaaatattatatttttagataatgtgtaaatttttaacatccttaaaaaaatactactattggagttgctctaagatagctagagaaagaaaaaataaatctaaaaaacacaaaggtagcaccacgtaaagagctttattattggatacagataatacattttagcaattctctcacctaaagtaatagcataactaactatactctatcatttaaaatacatcatcaaaattttattttctctattttacaacataattttatattacaacatacatcaatttctttatattt

SEQ ID NO: 317656 - DNA, 625 bp, Cannabis indica
aaagaaaaaaaaaaagcaaagactgtataaatgtaatttttaccgtgtgacagtataaatgtaaacatttactcaaaattcagcattttgtaagtttccctacatttatacatgactatttggccccttagaaggtttcctctcgtggggcaacatttccatatgactgagaccattgttggtgcaaggcacgtgttgcacgaagatcacgcctgacagacagagatgtcattggagtcgtcagacaaaaaggggtattggtggtacacatactactatggtctaccgcaggggatagtatctaatcttgtgtcaaagaggacacatcgttttagggtaaatatccggctctcatcctgcggtagacatccgatattcaccttgcaatgaacattcgactcccaaactatggtaggcttccagatgtcatcctttgcgtcgtacctccaagtaggcacttatcttcattaagatgtattcaatccttctgtgtccctgaaggctagggaggcttccgtgtttcaagaaagtgacatttctcgaaggcgatgtcctgaacctttgctgggtgtcacgagccgcctatttggacacccccaagtaggtggaacgtgcggcacttgct

SEQ ID NO: 317657 - DNA, 1990 bp, Cannabis indica
agacacagtgcatgcgccccatacaatggggtgttcctattggttttgtctttttgagttaattaattcaatagataaatatttaaatttgaaaagtagttaagatattctcttaagtggttgagagatttccttaatcgattattagatttaaatatctgtaatcgaattgagctatattatttatttaattaattaaatatgatttaatgaatttgaatttaaataattaattaaataaaatatttattataattatttatatataccgtataacaaagctctaaaaaaacttttggaatagattttcttacataacttttctgaaagcttaaaaaaggattttttgcaaaaaaaaatttctctctatcacataagaaattgttcttgttcatgtgttgagatatatataagaacttcatgtacactttatcctagtagtccacattattccctatgtgtcgtagattgatctagaagacaaccgtgtgagtttccaatcaacctaaaaggatacaacttacgaaaagaatcaaggataccctaataggcatcaagaagtatttatttttttttcatgcaatttatattttagatttaatgtatatacatttagagatccttgagactatgagacaatgataatcatatatacaattctttcgctgcgtacctaatttagtaccataaaattaatacaaaggtcctctaataacctttgatttcatccttataccaaatctgcctggtatttcccataccactttctagtagtgattcatcatgcttccgttgatatatggatgggaattatgcttgaacgtcggaggcacaagccattgttagttttatagtactaaattaagtacatagcggaataataatttttgaatatcatcgtatcacatccctaggatcatcatatgtatgtaaattaaatttgaaataaataaataaaaagaaaatttaccttttgaaacctatcaagatatccttgtttgtttttgtaagttgtatccttggatgacggtgaagaactcacaacatattcttcaaaatcttccaccacaacaaggaatagtgtgggctattatgataaagtgtatattgtgttcttgtttaatctcaacacatgagcaagagagtgatgatcatgaaaaaaggttaatcagactaatcctttttaggcttcctaaaaataatacgtattttttatttgggtttaaacagtatatctcaaataaaattaataaagattttatttaaataaatattttaattcaaaaataaattaaataatatttaattatttgaataaatatttatatctgaatttgtcatagatatttattttgaattagatattaaggtttgaattaaatatataataaccgattgagggaatctctcaactacttggagagaatctctcaactactttgagggaatattttaaccaacttaaatatttataactactttttaaattcaattataaataaatatttatcttttgaatttaattagttaacctaataataaatccagtgaggcccaccatatcttataggcgcttataagacacaatgaatgtgacaccaccaatgtcttaagtaagcagtggtcgtgtctttgttcagaaaacttttatcttttccctaatttatgtaattgataaattttaaaaaaatttacaaaataaataattactattttaaaaaatcaaaatagaattttctaaacaacaatatacaacttctatctctacccttgacagtgttttaaggtagtgatctggagaccatggacctataattctaagcttgtaacgcccgtacttttataaaaatattaattttatttacaagcgttaaacgcggaaaatcataatgtcgcatttttatttaatacttgaaaatattcacaactggccagttttcgtacaaagacatgataataataactaaataattgcgacataagtttaata

SEQ ID NO: 317658 - DNA, 612 bp, Cannabis indica
gagagagagagagagaagaaaagggcattttcattgggaaggagtaaggaagagaaagaaagaactcaaaaacacaaatacacataatagcaaagagagaaagaaagaaaacaaggttttatatttgtatgtagtaattgtattatatatgtctagctagtgttgggaaagatagggggcaaagtttcagcatttggtctctttatttctcagcaaaccctcctttttttctgcctcccttgtctccccaccacttccggccactgtctccggcaacccctcaccggatttttccaacctgggtcaacccatatctaaacaaagtcttttactttcttctcttttctcttctgggtttcgattgattttgtattttactgagctgagctgagctgatctgagctcaaaggtggaattttggcatctgggtattgcttctttcttcaatctgattgctggaggaaatgagtcagtgacatttttgggtgttttgtttaaagtcaaagtcgccggaacgagcaatgaaggctccggcgaacggtgttgctggtgcttctgttgctgcttctcctaatccattggaaggtcagatttctctctctctctctctct

SEQ ID NO: 317659 - DNA, 652 bp, Cannabis indica
cttacttttaatttattttttgtagtaatgtacttggatattgatttataaaatgaaatcaaaagaaaataagacatttacaaataaagagaatgaagaaccaaacacaaaaaaataaaaattagtacaggagaatattatggtagcagagcaagagtcaactgaagtatttatgaatgaagagaagaatatcgcagtacaacaagaaccaccaaagaatgcgtcaacagaattaatgaagaatgagctcgagagcataactgccaatctcgataacttattagcagatccaaatttactggcagacttagatcaaatttttcagaacataataaattccatattgtcattaataacatgttgtttaccaaacatatgaagtccaaatcacaaaccatgtataacagaattaactacctttctgtgtgtaacacaggtgaaagccagactggtatgtttgaataataccactgaacaagaagaatctaattctgatgattataaaatttgtgaagagtcccttgctaaatcatacaaagtcatgtatgaaaagtggatacaagttacttctgaaaatagagtgttgattaaaatgaataaaaaaatgtcttatcaaattaaaacttttgagttaaaaataaaagaatatgag

SEQ ID NO: 317660 - DNA, 1332 bp, Cannabis indica
atataaattcaaattttcctaatttgaattaccaccctccctcagcgaaagatagaaaaaatttcgttgaaaatatagagagagcgagaaagaagagaagaagacattagtatggtagaaaccctaaacacaattctgtaagtaaatggaatattcttatttttaaaataatattttgttaaatcaacaaaaaatctaaatagccatattttatatatagagatatagatagatagttattaaattataatgtgtaatacatgatatttataaaagaaatcactccatataccgcttttaatttttttttctattttttctatttgttttttttatttgtacaatttgggtcgcttcgttggttgtgatctgaattgttgtgtaggttgcgatgtgaattgcgctttgaatcgggttacaatttatgttgctccgtgaattgcacagtatattttataaaaataccaaaaaaaaaactttaaaatatagaaatagaaaacttctatttataatggcaataataataacacaagacttcattacttgtatttgttagaagttttcgattagttataaaaattcattaagaaaaatcatttttaggtactaaaacttctaccaaatatctcaaaagatggcaaatgtgatattaaaaaaaaagtttccaataatgagacaaaagaattaaatccaagcttcttacgggctattttgatttatttttttgggaactactcaagtagatttgcgatttgtgtaaagattccctatctcatctttgagacataatcaagcaaggaaagattgggagttttggtaaaacttttagttagcccaaaaggaggtttttagacaaacaccaaagacaaggaaacaatgcgaagctaataacagacaaacaccaaccagaagttgaaaaaggtcaggcatacaaagacaaggaaacactgaagaaagtttacagcttctacgcaatcaaaaacaacttccaatacagtttttgaaaacatatttaattgggattcagtaagaaattttttaatatcttcaataacagagtaataaatagagtttataactctggaatggtagtattccgatcgggtgtacttagattttcaatcttataaaaaacataaaaaaaacactactaaaacaacaacaaaaaaaaaaaaaataaagaacataaaaacaagcattaaaaaactctggaatggtagtattccgattgggtgtatttggattcccaatcctataaaaacataagaaaacactactaaaacaaaactaaaacaacacaaaaaaaatgaagaatataaaaaacaagcataa

SEQ ID NO: 317661 - DNA, 1458 bp, Cannabis indica
gttcaacttcgttttcaggtgtatcgatgtactcttatctaattgggtaattaaaaaaaaatatttcaaaatttttttgtggttgtataagataggtcgtgcgggagaaaatagtacacaagacacggtgtatactcttttacctttaagtcaggagtttgatacttgtttaattcttttaattttatatagaataaattaaaaaaaaaatagtgtagttgtggtgaatcaaatgagagtgagtaatgacaaggataattaactcaagcaattcggttgtcaccactagggtagtacataaatttttgtaaaccgtctaatttgaacaactcgtccaaaccaaatcgagataaccagacgaaaaatacaaactgaaaaactcgacgaaaatataatcagctcaatctttatattgggcgagttgaaaataatatcaatctgcccaatcaacccgaacttatactatgatattatattggtattattaaattttttgtattaaaaaaaagaaatgatttatcttttcggggcctgagttggatggggctctaggcgcgtgcttacactgcctacctttaaaactggttctacgtatatattacagttatttatgatattttacaaaattttgagaaattaagaaaaatttaaaactggccctacgtatatattacagttataatttgattttatcaaatataagttaactatataaataatgaaaaaaataataatgcttttgattaaaatactactataaaaattagcaaaaaaattagggagagtccctatccattctattatagaaagacattctttgtgtaattagttagagctaattttttcaagtgtctcgatattttagctaaagagtatgtttagagattgtggttagaaatgctcttagaaaatgtcttaagtttgaatcttcatgccttaatattagataaaaaaaaaatctcaaaaaatattaagattgttagtctatatttggatgttggattttagtgagaaaaataaagtagagaaaatgtaagaaaaaaaaagtgtgcacaacttgatatggaaaatttgattgtattgagtgtttttgtatacaatttttctttccatacctaatgtgagaatttaatgttttttattttctacttttttttcgttatatttttcatacttttttatttttttactattaaaatctaacttccaaacatagccttagattttaagaatttttgttcacttttattaatagaagtctgacgttgatgaaagtttaaggagtacaatttatagtacatattaaaatttgtagggcttgatatagtagatatcgaaagtctagagacatgatttggtaaacgtgcaatcgtctcattagtaaatttgaacaaaattgaacaaaaatttttgaatccaacaatctcaatagttaaaaaaaaaaatttaaacaatcta

SEQ ID NO: 317662 - DNA, 1076 bp, Cannabis indica
tcttgagatcttctagttaacacaagttttttcggtaaaaacttcaagattttggtgaaagctctcaatgaaagtaccaaaatactgactagatttttagccagccgacacgaagtcgtatgaaatgagatttaaaccaaaatcgtaacagtaaatgtatataatgataccagaattcgtaataaatgtaaagaaagacaccaaaatttaaagaggttcgactctagatgtcggtaatagcctactccctttgtcttttattaattagagtcgcaaaagtcaagaacagacccttgaatgcaaagaaataaagagtgttttttctctaagtgctcaaaattgctgatcccttttccaagtcatgggtgaccccttatataggggaaaaggtcagtacttctcacttcaggagtcgcgaccaacgcagagctatctcaaccgtcttcttggttttcggaggtggttgaagtttaatttttgtgataatatctcgttattttgtgggtttgtaactatctttgagcttcttacgagatttaaatatttgaatttgccactaaagatgagggtctcctaagggtgtgacatgatcgctaaccagatttaggaatagaagctaatacttagggggtgacacccccgagaccaaacatgagaagggtgtcaattgttatctcggggttaccccccaagaccccttctatgttctgtagtcatggtgtcatgaggatgtactcatctacctttgagaatgtcattatgtccatggtggggatagtgtcatctaccccctagactaatttggcccataggtatgtggtgattatttatcctcacttatgaaggtgttagtccatcatttttcctttaggcacccaccttcctcaagctaggggtaaaggtaaccatcaaacttctattccaatggttatgacccccatcatgattaacggttaccccaacagtcacgactacatattttcattaattcagtcccggtattttcgtggccacgtgtcattactcttgcaacatcatcgtcgtcagtatttgggtaaacactaataatagtaaat

SEQ ID NO: 317663 - DNA, 3157 bp, Cannabis indica
taattatctcagattgagatttatagtttactttcaaatgttgaatgagcttgtaacaagcacgtctaatatattttgggggttcttgaaataagcatcttccatttcatataataacattttattagagtactgttgatttggcactgtataatatgctttatggaagtaaaggtcgttcacccattcatttgaatgcagtcagtgaacggaggaaccttggacctgatatggtctaaggaatgagtgaggccataggaaagatttgagtttatatgtttgctttatagagtggatgggagagctatgttaatccaaagtctacagacatgaaattccaagttaggaagaaaggaaagttaaatctcaaatttatcggtctattttgggtttctgtaaacggggaggttagatagcttatcagttagccatactcccttccttacctggagttaatattttgtatatcaatattcagaagtatgaggcagatacgattcccatactgagttacgaaaatatggaattttgaatagacctgacatatgtgacatagttgatttaggtttataaaaaaaaaaagaagagaaagttctgcgaaacaaagaatatctcgttagctaagtactatggatgaacaacaagattaaagatgacttagaaattaaagtcacagctacgggaacagtgtcccaaattttttcgataaattttgaggacgaaatttctataaggagggaatagttgtaatatcttagaaaattattatgataattaattggacatattttattaaatatgtgattgaattaatgttggggtaagattatgatcttacttaggctagttgtgtgataattagtgaaaatttaatatgtgaataaataaagcgtaatttagtaattacggagattttattggattaagtgggtattagtagataccattttttaagtaaaatatttttgggccaggcgaccgtgggagctcgacggagtggtcagagatgccacgacaatattaaatagattgaattggaaatatatcggactagtttagggttctaagttattgatttggtgggtttagctagaaagaccattatgccctaggttattctatagcttatgttcttggaagaggggtaaaatagtcattttaccctagttttttttttttgtggttttctagtaggtgtgggctgattgataacatgggttttattatatattttagatagatattttattaaaaaaaaagagtgaataagacttggaaaataacatgggttttctttctccctctacccttcgaaagcttaggagcagcaacaatcgaacgtttgttccatcaatttcagtcagtttgtagaaagtttgatcaggaattgaagttctctaagttgaggggacccaggatcgtcaagctttgtttcctctcaggtcggcccgcacgcataatttctggattgaggtaagcaaagtgttaagcactatttatggttaatgatatgattgttatagtctcgattatgatcgagatctcgatatgtgtttgctgtgacttgatttggatcgatgtagttgaggaacaattattatcgtttgtgactcgattatgatcgaggtaatgatatggaatgattattatcgtttgtgactcgattatgatcgagtaaaagatacgatcattatcgttatgagtaattactcaatgaaactatagatagatttcttacttatcattcgctttatcgggcaacgatagtgacataaatagctcgtagataacgagtagtaagagtactttatgaagcattgagattatatgattacggtaatgtgtgaattagagtgctttatgaagcactgagattgagtgtttataattatgttttattagagtgctttatgaagcactaagattatgtggctatgtactgaacgaatgtatgtttagtaaaagaaaaaattattgattatgaattgctataaatattcttaattatgtaataaatgtgcttgcatagatgttgagttatatatgcatgctgaatatgtactagtatgtactttacattgtaatgaaaattgctagcacttactatgatttctatctagtagcttttcttgctgagtcattgtgactcattggtgctccgtggtggaggtaattaggatagaagctgtcttcgatcatgagtcagagatctcccagcgatgtacatatcagtcgtggtctcttggcttccagaccccattttctatgtttgaaaatgtaatcttacttttgtaaatttgttataaaggaatttttataaacagggatccacatattataatggtactttgtatggaagttttattgtaatttaaaatttgaaaggattttaacctaaactacacttttcataaactaatagactagtgagaaataggtttgtaaaagcatacacgtggcgtccctgagggtcagggcattacagtaggcgtgtgagagagatgaagtgaggaagagagagagtttattagatacttagagcttaagattaggtttctagcttagaggcaactttggttttcaacctaaggttaaggcctttatataggagacctaaaaccctaggtttacaattcaaatcccttagtattcgtatagttttttagatatttataaaagaccaaagtgcccttgattctagatgttatttagccattctgttgggcttttagggcccaattcatagcccatagttgttgtcaagatgtagaagtgtccaggaatgcctatagtgcactcctttgctggccaggcccctgtggaggacaggctggccgaccaaggtgttgtcccaaggctgaccagccatagggctggccagctcgtgagagggagctagtttgtcacttgatgcatgtttgagtgctggggtcgtcgtttgttcaggtgctgacttgaccttccttttagtgagttgtattgccacgtcgtgagaacaaaaattgggataacatttataatctttaaaatctaaaagcatatttttgtaaataaaaatttttagttcttttttgtgtattctaaaatttacttatagttgatttatagctatcgtaatgtagatttctagttgcttttagctatttttttttttttt

SEQ ID NO: 317664 - DNA, 1544 bp, Cannabis indica
ttttcgtttttttttcgttttttttttcgtttttttttttttttttttgactttgaatttttaatttttttaaaaaaaacagcattgattgtacaatttttgtcccttaagttattgcctttgatgacctaattagccacgtgttgtatgtataggtaatacataattattattaattatataaattggattagagaaaaagatatcactgtaaccaaacagagtcggtgcctatcatgtgcttgtgagtttgggtttttttttataattgaccgaccaagtcatggacacgtgtcagcatatgcattgtccaaactgtggattgcatgttattggggtttgtactatatatatagtaaaattaatccatgaaatgtataatatgtaaatttaattaaaaattaattacatttaaaataagcatcattctgattagtgcttacagctgacacaaaactagcaattagcaaatataatctaaatttatacaaatcttaaaattacttaagtagccctatctagacatataaaaggccatgcaaacaatttactttaatatgacaagtttgataaagtatgattacattagaaaaaaaattatctaaacaaaaattaaattactactagtaatgtaggtttattttctatatctccccaaattatttttttatattaaaaatttcactcactttcttttttcttttatggcataaattttaagcacttatctggctactatcacaccatatcgtacctttattaactgtcgtactattatcgaattttcatccctaacttccagattgcactactatcgtaccatataaaaaaaatcacaaattaaaaatacaaatttcatcaaaactcaatttcttacaaaaaacaataaacaaaaaatacaaagaaaccacaaattgttcgtctgtccgttcgactgtggttgtcgtgggtcgtcggtcatgcaccagagagagagagagagagagagagacgtgggtggtggtcatcgatgttcgacgagaagtttggtgagaaccaaaaaaagagaaagagagaacgagctgatgggaaaaagagaaagactgagaaaatttgaggtatacaatgtgcctatactactaatattgagcaacttaggtttaagttcttatttttaacatacaatatgaattaaaaaattaaatttctccttaatatataaataaaataatgttttgttataattaaaaatatatattagtttaaaaaactgatatttaattctaattagtttataacataaaaatatgttatattaaggttaaaattatttatgaaattatgaataaatattcacataattatattaataatctattatattaagttatcattgtgattttcataaaccaagagaaagggacatgtatcacattaaccaaaaaataaaatataataaaaaaaataatattccgtgtgttaaggaagttgtcccgagcaattacttttaacactaaaatgtgaaaattttaattatgttaaaaaaaaatgtaaaaaaatttact

SEQ ID NO: 317665 - DNA, 1212 bp, Cannabis indica
catttttctcttgttgcataactgtatataggagagaaatgttgagtttttatttgttggaagcattacataataacatatatgtgaagatattattggaaaaaagtgtcaatttgaaaaatctgcttagatagtatataaaaggtttgtacttctcttatttaagatcatttatttttttcactttaattaacaaatgaaatgagcaatgaagtaaatctctctaagaactcactattatgagttgttaattgaaaactaaacttaaataaaatttacagaatacatttttattttctgtttttaaaattgaaaaacaaaatggttaaagaacatatttttatttttcaaaaacaaaaatgttaccaatgccacctcaactaaatatattttttaactaacttttacaccaattgttctaactaataaggagatgatgccatttgaagtttggatttgaggtaactaaattggtcagtagacaaaggtttagttaagatatttgcaacgtgatccaaagagagaacataacgaattgagagttgtttttcaatgatttgatcatgaacaaagtgaaggtcgatctcgatatgttagcttcaggcacaaaaaatagggttgtaagccaatgcaactgcaccttgagtattaacccaaagtattgaaggttgaggaagcaccacttaaagctcaaacaacaagaaagaaatccatatgatctcaacaacattagcaattgctcgaaactcattttcaatgttagaacgagcaacgacttgttactttttagcagaccaagagactaaattgtgacctaaaaacatgagatagccacctattgaacatctttcattgatacaacttgcccaatcaatgtcactgtaccactgtagtattaatgatgaagtaggtttaagccataaaccatctgaaatggaccctatgagataggggtgcacatcgggtgggttttaacgggtttaaaattttcgagtttgggtgtatagaattagtagattgaatcagcccgtttgtgtgcacgagttgtcgggtttcaagctcgagtgggtcagggtgcgggtcggtctgtgtttgggtgggttggtgttgagttttgtgctccaattaaagctctattttaatgtaatcttgaatagagtaatttgcggtgaaacccttttatgttttaatttttatacacttaaccctctt

SEQ ID NO: 317666 - DNA, 1094 bp, Cannabis indica
aaaacacttaagaaatgaagcatacagtaacatggttgatgacatcaatagagtcatcaatacaaaaccagacttgcaaacttatcccctcaaccaatgattcattgcattcaatcacacaaaaacaccaagaagatcaaaatggacaatagaggcaaagggaacaacacttcccttattctcgtgcccataacgaatcagtaaaacaggacctaaattccaaatcactataacaacagaaaccagtaatacataactatatataatcagaaccattactcaaatgcataaaatacaataacagctctaatgtctttaaacccttgtgcgtacaagctaaccctagccacaaaaaaacgtcattgaatgaaaccagacaagagagagctacaatatgaatatatattatatacgagtaaataataagtaaaacataccttacgaagcatgcgctcaacggagcgaatctggttcttgagagagacgggcttaggtttctttttctcagcggccaaagacttggatcgacgccccgggggtttggccctgcggttggcgtagcctccatgagccatggtttacccaaaatcgctaaagattttggaaactagagactcagagtcgttatatatagctgtgaatatgtatagatgaaggcgtaattggtgtgaagtgaaaaggagggtttggagtgtttaaaacataaaaccccaacaacagaaacggctatggcttcctcttcttcttcttactcttttctctctctctctcttcactattttttattatttcttcctttctgtcttcgaccctaattcttgccacataagatttcaattcgtacttttattaaataagattttactttcttcaaaaaaaaaaaaaaaaaaaagattctactgttttatacaattttgcttacttgagatattgccatattactcaaccatcgatttgttacatttaatcactacaaaccaataacatattaaattaggaaataattcgagtttcgtgcgggtgatggactcagaatttttaatttgtgggggcttaattgttataaaaatatttattatttactttacattaaa

SEQ ID NO: 317667 - DNA, 1346 bp, Cannabis indica
tatagaaagaaagccaggacggatattaataatatctatataagtggaaggaatatgcagctaattaataaataaaaattacataaaagtcaaattagatttttttttggtttttttttttcttttgagacatagtcaaatagatttcttagtatttagtacttattaattttatgtaattaaggcatcacggtcggggaggaaggatgtaaatataagagaattaactttttaatcttaaaataacttaaaataatttttaaagaatacggataaacatctataagaggaagttttgaaaaggatcattgattggtcatgatgttgtctaagaatctcctccttgctgcacttcaaggtgcttttgttctgatcactgtacttctcgtagaggctagggctcaggctcaatcgggtttcataaacaaccatataatcttctgacttttgttaaataattataactaatatgcagcttaattatggctcacttttatttcagggttcattagcattgactgtggaatatcagagaactcaagctatacagatgaaacaacaggtctagcttacatttctgacacaaacttcacagaagctggcgaaaaccacgaaataacaccaactaacaaattacaaaccgatgaaaaacagttctggaatctgagaagcttccctcaaggaaaaagaaactgttatacccttaaacctgttcatggcaaaggtcaacgttacttgatccgagcaaggttcatgtatggaaattatgataacgaaaatacaatcccaaaattcgatttgtatattggagttgacttttggagcactatattgctaaaatatacgtggagtgttcaaaatgaagaaatcgtacatgttgcgttgtcggattacattcatgtttgcctagtcaatacaggttttggggttccattcatttcagccttggaattaaggcctttaaacaacgaaacatatgtaagtgaaatcggaacatcgttaaatctttatggacgctttgattttgcttcagctaccgatcgaaccaccaggtacgtaaaataattatttatattaattagccaaatatggctataaggttaattaatatgtttatattgtagaattaaattgagaagcattgctattaggcaccagtagtgtgcttcacattttttaaacgtgtcatcttgcgatgggcttgtgatacccttaaaagttattaaattaaactatataagatccgataattaattgaaccaataacaatattgacacttaggagaatgttaaacaccactagtgtcctttagtatttcttactttttaaaacaatagcatattgt

SEQ ID NO: 317668 - DNA, 957 bp, Cannabis indica
taatttctaataagatgaaatttccattcaaaaaaattaataataaattataaaatatttttatcaattaaaaatgtcaaaaatagaattaacacaactacaactttattgtacacatctcttagttgaaatagaaaattatcgaacccacctgattgtaaggccatgtatgctattgttgaactacatctgttcatgctagctcattacgttagaagtcactgcttctggaacttcacggttcgaacataaaaaaatgcatttgtgatgagattaccaactcatgattgtgtacaggttaaatactcatacaatttaattgataataggtattatttaatcaataaaaaaatataataggatcctatatatattctaaaaaaaatacaaagtataaaattatattttaaatctcaaaataaagaaaaatgaaataaataaatatctaaaattttattataataaaaaatatataaagtagttaagaaacaaatataaattatttaaattaacacaaagaatgtaaaatataaaatattaagactataatttaaaaattaatttaagttaatttttgtaataatagggtacctatattaaattttgggtgtaaatataatatcattttggatgttttctttagcaattctagtaccattgatacccttaattaaaaatatcatataaataacttttaatttattataaaaaattcaagtcccaatttaaaacaattaattataaataagaataactttaaattgtaattagtattacataatttaaatctctgacaaagtatatctcttatctctatataataataataataattatatcttaataatctatatagggaaatttgattttctatacttaaaaattttaaaaaaaaaatttctaaaccaatacattttacactacaaaaaatatgacacttttttcaaaaccccaaaa

SEQ ID NO: 317669 - DNA, 1795 bp, Cannabis indica
ttgtaagaatgaatttctcttttgataaaccttttttaatgacatcaagaaaaatgaacatgttttgaaagaaaaaaaacgaatgtgttgttgctcccaacaaaaagatcctccatgtttaatacatttttatatttagtgtaaagataatatagtaatttaagcaaagtaaatttatttcgaaaaataatttttaattggttagaatcatcataattaagaaaataaatatagtttttttttttaaaaaaaaatcttgttggtcacctactatactactagcaggtcatcaaattgtcatctcatcaatttttttattatccatgaatgaatattactcattgacaaatcatccatatatatctttatggaagcagcatgaatagacaaagaaaattaattaagattagatttgagaagatataatttcaagaaaataaaagatcggattagatttttctttttgttttgtttttaatttgaggctcacgtgaatgttggtttggtccgcaaacattcacgatgactaatattgttggtcatttgtaagaggcagtttttccttggttttagaattagtcgcaactcacaagtcctattacatatataatatacaccaaatcctataattgagtaccataataataataataattaagggataacaaaattctcaaattatacaaaagttaattatgatttttgtcctctaaattttgatatgcatttaatcatacttttaaatttttctaatcgttaatttttttttttgaactattgaaattgctagatttaaggatttttgtccaattttattcgattttactaatttgatgattgtttatgtacaaaatcatgctcccacactttgatatttaacatatcatgtccctcaaatttttagcctcctgaattttcatttatattatacttttttttttataattggacaaaaatctttaaatctaacaatctcaatagttcacaaaaaatatttaacggacttaaatgttcttgtagaaaattttgtaaatagaaactatttttcaaagtgattatatttagttaaaagtattggaaaaggtttgttattttgtaaactttatctgttttggtatttagaaaattttagtctaatttttttataattgcgtacgttgtagttatttagaatcacttataaatttttaaaaaattctaaataatttataatgcaaaagtaagatttaaattgatattttattataggtataagaaaaaaatagttgcacgtataaaaaaatatgaattttattttcagcactataagttattcaaattttcttaaaaaatttacaaatcaccctaaataattataatatatacaatcataagaaagaaaaaaaaccaaaaaattcctttaaatgtcgataaaaagtctaaatacctatttaaagtgtacaatgtagacaagtattttacttttagtaatagttatgtatactatagtggaagtcaataatttgtggtataaatacttaagtttaactcctggttgcaaataaatatttaagtttaattcttaggagtaataatacctaaattataacttttacacttctgtaggtacctaacggttaagtgttaattaaattgtcatgtggggaatcctgatttggtccaggttattattttttattttttaaaaaaaattaatttaaatatatcaataaaaaaatgatacatggataataacttgacactaaactaccaaatacctacatagtttcaaaaatataacttaagtattaataat

SEQ ID NO: 317670 - DNA, 846 bp, Cannabis indica
ctccaaacacccacaaaattgttaggatccgattcaatgaacgtaccaataaaattcctgagagccgtcactacgctaagagtcatgttgcccgattgtagatcatgaagttgaatccacatgtccatatgattaatttcgacaagccgtgggttatcacccttcttcaatctagtaaaataaaaggtttgcgatcataggtccaagggctcccatctataactctttgtatatcaatctcatgataatattggaaaaggaatagattcggattgagttccttcacatacgttcccatccccggctgccaaagaaatgccatcatgttctgaaaaacgttaaaatctgagacccgcccagtcagaagtttacccaccaaacaccatcgtgtttcaatcaccacctcttctaccctgctcaccggtacccttaacacttcttcctcttcttcatccagcctaacgagtcctcctctgacctccatatccctctctacactactatttgatgtcatagaaacactcacaaacagaaacacagcaaactctcaaaaaagagagacaaaaaaacgtatcagaggatactacaataaaaattaaatattcacacaattaaaaattaaacatgaaataattttaaattatgaaaaatttaagtacagaagaacaattagataaacgaaattgaggtggtgatgtgtcactttgaaatttttcctaacctatttaaactagggaacgtgctatgatttgagtatggttgtttatatataaactagacaatatagctgctcttcgcgtgactaatgtaattttttttagtattataataaataattacttaaaa

SEQ ID NO: 317671 - DNA, 1290 bp, Cannabis indica
tttacacttctccaaaattcactgctctaccccgagggtaatcactatctcttaagtagatttttagcattgatgcaagtctagacacctgagtaggtatagcctatgggttttaaaacaccacatttatcaactaacatatattttctctttttgtatttcaggatatatttaattatttttcaattttcatttttcagttttgattgatatttactcacaactctcactcaacagtagatctctggcctagtgcatacaagattgtacataagacctcctactattgatgcatatggaatttttttattggcctttatcttttttggagtacctagaaacaatttctaagataaataaactctatgtttggaagtcaagtaacctccattagagttagccatttgaaaaactctctagcaccttactaatgtatgctgcttgagatagagtaagtaaattaccaaatataccacaagctataggcttttatgttctcatcaaacccttgatactaggaatgggaagtttgcttaagtccattgaatagactaagcatggttttccatcttatccttgtatactgaaaactctaggttgctccatgtgaatggataaaccatagttctctacgctttgagtcttagttccttattaggactatccatttcttgtttgagcaaacaatgaatctccatcactagtgtcacccaagtaataacaaggtgggttctactatgacaaggtataacaattatgtgtctaggaacttcagtggtatagacctcttcggttgtgttatctgcgtttctggcattggacacgtgaaatctaggttagcatccaaggtccattagtgggaccctcaagaaaggttaagtgggccaagccaatttggataagtccttctaggaacgtatctcagatccacaatcataaaaccttctacgctgcgagctgtacctgaaagcatattcaagaacttcattggtatcaatttctattactacagtaacaagttaattggaacaattacatgatcaagaataagttctaatagtttgctaatgtgttcattatattacatccacgtctaatcaaaatatgtgtgtcatagagatactgtggtgtattgagtatagtttagagttcaaaattaaaaagaaatctgaactacatatgtcaataacttcttccacccctaagtgttatagagattccgtggagttatgaatataatctagagtttaaaagatataaaagatcgttgaactgcacatattacttctt

SEQ ID NO: 317672 - DNA, 1956 bp, Cannabis indica
ccttatttatcagttgtaatctttatattagcaggacttgtaataatgttgcccataatgtggttaagtgggctttatctaccaattgtactgctctatcccgatctcctctttctggagaatctattttgtaatgaccgcgaggtctaactgcttgtttgattaatataaaatacgcttattttacgaaaaaagaattagaaataaaaaaaaatgttacaaaaagaaaaataaaatatcttaactaaattaaagtagaaataaaattgaaaacataagaaaataaatttgggtaaattaaagtaattttagtgtgtttttttaataaattttcgttattaattaataattgataaattaaatttttaacatatcatctagtgccgtgatcatatataccataaatattaattgatgttcacttccgcaaaaactcaacttactttagaattgaatttcaaatattgaggtttaaaaaaaattacaaatattgaaataattctatgtaatttatacctacaaaaaaaattataagaggatgaagaatagtatatgctttcaataatataaatacacatatatgattaaataatatatattttagggtatttttacattgcacacccttttatagggtgcagggattcatcctttatctgtttcgacattcaaaataattttttaatctattttttttgtttcataattgtgtatgttataggtatttaagacatctcacaaaactctgaaaaattcagaataatttacaatatagaaagcggtgttcaaacaatctatttcacacgcgtataaaataaaatagtcacgtgtgcaacagactatttgaatcctatttttggagtattaaatttctccaaagatctaaattttttgaaagatatcttacataattacaccatacacgactatgaaaaaagttagactaaaaaaattcttacagatgccaaaataaaaagagttgcatcggtgcatcccttttgggaatgtgcattgtataatttttctatattttctatattttatttggttataaaaatatatgaatcaattttggaaatctaaatgtggctaaaaaagattaaaaataaaacagacggattaatgtaaaaataaataaattatgtagtatacctcataaggaaagtggatcatcgagtgtttctattagaaatatgctaaagatgagtgtttccattagaaatctactaaagaggagtgtttccattataaatttgctaaagatacagtttagctctatggttgctattagccttcatcaatagttcaataataattctgaaaattatttatgtatgaaaaagcaacatattttataacatttaaataatacaagaaagtctattctgatattagaaattgtattatggtagaagagatcatattactgtgtatgatatgtatactttacctgatagctttcaagattctaacttaaaaattcaacaatatgaaatgttagaagatcaccaatagaacaaaaaaaccattaatttatgatacaaataactaaagaactactcatattgaaatcaatatataaataaaaaataataaagttaaaagtaaaactattaaattaggctaatttgtaattttcccccgcactttgacacttaccaaattgtgccacctgaattacttttgacgttaacattttttcctaaacttttgataatgttaaatttgtggtattccatcttgttccattcattttaataacatagtgctgacgtgaatcctattatgcagtccacgtaatttgacacatgtaattttctataacgctctaatgttaaggcacgctacagtactttttcaattacagtgcaatcttcgctaatcgaagagttttcttgaaaaacgtgtcaaattaaaacttttatattaattaaataactttataatatattaaaa

SEQ ID NO: 317673 - DNA, 1105 bp, Cannabis indica
aaaaataataaaaaaaaataactgtgattttgattaaaatattattaaaagtgtttagtaaaaagtagcaaactctctacatttagagaagttcatatccatcttctattatagagagccattttttatattggagctcatattttcaagtttcactccttattttcgctaaaaagtgtgtttaaagaaaatagttggagataaatacctaggtatttggcaattaaatgtcaagtcaatgaccacgtgacagtcattaattggtccatgtaattaaattttcattttttatttaaaaattaatttacatatactaataagaaaatgacacgtgaataataacttaacacttaacagtcaggtatctacgaaaattttaaaaatatagcttaagtattattaccattaaaaattaaatataaatattgattagcaatcgaaatttaaacttaagtatttacgccataaattacactaaaatatatattttaggattttttttgtgatttttacaccacatactaaaatttagtcaaactttacaattatattataacaaagaaatttttacatttatactttctcattttttcttttataccttctcaagttttaaaaattacaaaaaaatactgatgcgcacttttttttttgagctttcaaccccagccccttttccattttatatatataaaaactcaatcctcctttgtcgaagcttcctcatcgtcgtcagcatccctccatcgagcatagatcatcgactccaaccattgccatcgcacacctccaatctgagccaggtatctaccctcttgttcaaccatccctctccccttttaagcttttttttactaccatttttgtttgagtaatataaaatttcaaattattcttcttttttgttcttctttagtttatattacattagtataagcttgcatctgaatatttttacacaattcactactacagaaagggatttttacgtcggtcaatgtgtctggtcaaacttattgactgatgcaaaagtcaacctacacttttttgcttcaattatccactgatgtaaataattattaattagcgtcggttatctatccga

SEQ ID NO: 317674 - DNA, 1036 bp, Cannabis indica
gaaaatacgtcccaaaacttagactaattttagcctaacattttgccagcccattatctcaggggaatggtcaatataatttctttatttagacggttatactgaaccaataaactgttgataacgaccaaatatgcctccaagtgaatcagccttcaacatgttgggacttgtacaggacttaagagacgatctaaatcgtagaagaggaggtcaggatgaacatttcatcccttctaatgtttaaccaattaatgtggataactatgtgcttggtgaagttctaaggggtccacgagtgacacaggttgatcaacaggcatgttaagttgatccaatggtgcaagcccaattagattaacttaagagcctcgtacaaagctcgactggcccaaaactcactaacatagaacttgaccgaataagaggatcaccattctcactacaagtcaatgacctcgatctactgcacaagttcaaaatgttcgtatgaaaaatgtatatgggcaaagaagatccactctctcacatcaagtaatttgagatgcgaatggatttacaagttgtaacaggttatgtacggtgtagaatttttccagctaccttggcggaggccgcccaatagtggtacttcaagttatccccaaggaagttcaatccatggaactcttttatggcagagttgcacaattatcctcctataggcagctcctagatcaattagaggacctggttgaagtaaatcaaatacaggggagcctgtaaaggaatacctcagtagatttattaccaaggctacacaagtgaaggggttgactaaaaaggaagattggtcgctatcctaggaggaattgaacccttgggagaattgtggaaagatatcaagaggcttagtgtgggttcgatgtgagaattcttagacagtgcagatgaatttataaagctcaaagaagtagttcggggagtagacatagttagccaaaaaatagttggatgagtgagagcatcatgttccttttatagtgtttcaactagg

SEQ ID NO: 317675 - DNA, 1504 bp, Cannabis indica
attctcattcagtttctctttctttcttcatcttcttcttcttttcttcttacgtattttatattatcctatattattttataacaaaatgtaaattttataagtgaaaaattgtttctaaatatgtgattggttgtagtatgatttaatatttttgagttttataaaattgaatatgtgattggttgagaatctcaacataaaaaagtaagagaataattggagagtttttggattctatgatttgaaaacataaaaaacataaaaatggtgttttcattttttagcctaaaactcaaaatagtattcaaattttgtttttgaaaacactcaaccaatcaaaaattcttaggtggaccccaccattttaattttcaaaaacataaaacaatttttaaatcctaaaccaatcacacccttagataattaatagtacaatatgcggctatactccctatacttaggttatttatgatgcaaataaatcaactaagtatatacttacgggtattattgatagtaatattttaaatgttctctattccaagctctatcgaaggttgagtcattgagatcagataatcgataagttgcattgctaatctttttagtgattaggtagggaccttcccaatcgtcgctgaatacgccgtgcgcagaattgtgtgtattggcatgattttttgcaataccagatctcctactcgtagatttctttctttaaccttcgagttaaaatagcgagttatgcgctgttgataggccacatttttgatctgggcttgatcacgcttttcttctagcaaatcaagtcaaagcaactgattttctgtacgatgttgaaaacatctcttctcagcgatccaactcccacctggaaccatggcttcgcacccataagagagtgaaaagggagtttcaccagttgttgagcgaagagttgtgttgtatgaccataaacttatggaagttcttcttgccaaatgccttttctctcttcgagcttacctttaatggtatgcttgatgattttgttgactgcttctgtctgaccgttactttgaggataagtgactgctaaaaaagccttttgaattcccagatcatcaaacaattttcgcattttcttacaatcaaattattttcctttatcagagagtaatttgtaaggaatgccaaacctgtaaataattgcccgatagacaaactcgtgtaacttcgcaactgttattgttgctagagctttggcctcagcccacttggtaaaatagtctattgcgactactgcatactttactcctccttttccctttggtaactcgccaattaaatctatgccccagaccacagatggccagggactagtgataggatttaactggcttggtggtctgttaacgtaggtggcaatccattggcatttatcatatctgctcgcaagattggccagtaatagccttgtcgcataatttttagggccagggaattactgttgggttttatg

SEQ ID NO: 317676 - DNA, 729 bp, Cannabis indica
tacaattaaatttaaagaacatctatatattattttcattattttttttgttaacttcttattgttaacatattattattgatatatacatataatatgtaatatatatgtatattatataattttttagagataattcaatataataatttgataagtatatatgttatgacgttaaaagtttgaaaagatatttatttttatttattgaaactgtattagactaatcttttaatttttattttaatgtttgataatgatggtagtgtaaactgcctaaaccgtaccacacatcactgtatttttgcagtgttggtttcgctgttttaaagttttgcaatatggttgcggtttaagaaattataaaactgtatatgcagtttggtttgaaaaaatagccttaacctgtaccacccgcagtgcgaatataaaatacatagttattagtaagagcacttaatttagatgctctaaaatggagaaaatttaaaatattttaataagcaaactaaaagtacaatacattttatgctgtaacttttttttcatatatatatatatatttatatatatggaggaggttccaattgttacatttttattgtaaccatcatggttacattttttttagccattgaatcattattaaatggttgtgaaatttggaaattaaataaaaaaataaaaaataacctgtaacctgatataacctgttaatttatttctttt

SEQ ID NO: 317677 - DNA, 1965 bp, Cannabis indica
aaagttaaaaaaccagtatatggagtaattttcataaaaaaatgaagttctattttaagctaattatataaataaaaatacctcttaaattaatattaattatatattttttaattctgtattaaaaaaatataattttatataagaataattatcttaataaaaaatgtattataaatttatttatataaaattaataaatctactctaaatttataatacgtgtataaacaattttttaaaaaatttgtataaaaatatatatacatatccaaattaaactctcaaaatcaatttatatattaagaacaatcttacatataaatattatatatttgaacggatgactatataaatatataaaacaaaagaaaatacatatatgaacatcattacacataaatatacatacacatatattggctaattaagattttatccttactaaatcatgctctcaaaactttaagatcgttaaaaattcttcttgaactattgagattattggatttgaggacttgttcaattttagtaagaaaaatctaacatagatgaaagttcagagaatataatttggtatatgtcaaaattcgaagggtatgaatatttagtagatatgaaaaatttggggagcatgatttagtacatggacaatcactgaattagtacaattgaatgaaattggacaaaaattcttaaatttaacaatctcaatagttcagtaaaaaatttaacagtcagaaaaattcaagagcatgatttagtacatgtcaaagtttagggtacaaaaatcataattaacttaatatatttgtatattgttattagaggtgacatcagtcagtttggtcaggttatagtgtatttttactaacttaatataaatgtcaggttgtaaatatctaattgtaacccgtacaatgaaaaaataaaaagaaaaagtgtaattcactcaatgatcggtttgctccgattaacctgtttaaactgatctttatttttttatttttttttattattgttagtttttggtgttcaaataattgatttgaaaaaataaatgtatagtatatgcctttcaagattaaaaaggttataatttaaattaatgttaaaacaataaatataaattgaataaacattaaagtactaaataacatatagaataaaaaaaatatacctatatgtaaattttaaatttcaacttcaatatttaaatacaatcaaaattatcaactataaattctttaaaataaatactctaaaatacaaatttaaatgtaaaatagtttaattataaaacgtaatttatatatatattattttatagattattttagtaaaaaatatataaattagtttattgaatttatttgagttatttgagcaggttagaataatattcaacccgccttatatatttattggcggtttaaatttttgtaaaattgcttagattgtatttttttgtcaatttattcgatttaatttaagcgatttatttaaatatttttaaacagccctaatttgtcaaatcaattctcttatgattataattaggcacgaaacaaatacaatgaatggagcttagtcgtggtcgtcgtctcacccgattttaaaattataaaagaaaaatattttaaaaacacagactaattattaattaataaaagtacattaaacaatttttttttttcaagggcgtctcttgccataattgtagtagttagttataataattaatatatgagtcttgtactagaaggataaaattgtcaccaaatttttatatatatatatattatatataaatcataatgtaataaatgaataattacgtatataagtttgccttatataatggtttcttagctgtttttgtggttgtttgtcaatgtcaatgtcaaccaaaacaattttttattttggtttcacaattggagtaattaataataataataaaaa

SEQ ID NO: 317678 - DNA, 1785 bp, Cannabis indica
taaaatatattccaacaccatccactcctggaattcatgtcgttgctgctcgaatgcatgattcacaggagcatgtgtttcctcttggttatggtgaagtgtattggtatacgtttggacttatcctaatgcatccttcaagttctccagatcaaagttttctcctaaatcaactcgaagttctcctacagagggcttactagtgtccgacccggtttccccaacatatgcctggctggtattcccagtcttttagacatcgggcgtgaccccagtatagggtgttgtaatcccaatagccctgaggttaacattggtagaaattgtgtgagggtttccctgtgatggcagtcacgcatttaggttgtcaacccttaagtcaatgggagcttggacattaggatctattgccattggattgtgtggctctgttgatgaggatctcgttgtcaaaaccattgtcagccaaatcaaagatgtagattgataagagcaagattgaatcgagctcccaatgaaagcactaaaatgttaacctcgcttttagccaacggcacggactctttaaagcgatgataatgattgatcaaataataaaataagacaataagaacacacaagatttatagaggttcgacccttgataatggtaatagcgtactcctctttttgttgtattacttatagagaattattaagatcacaaggtccaaccaggtgagtttcttaataatctcgagaaagcttactattattttttgcaaagtaactgctctttgagaatgcgaagaaaaggccccctaaatagtgatatggcctcactatagggcaagtacattacaactatcacgagttaataagagaaaaattagagaaacttaaatattaaatcccatgatctacttaatcgtataaaatcaatctcgcaaagataggaattctaaatggactataattatggagatatttaggaaaattatctttaagaatctttactcgctgcgtgttttatctggagaatggcactcgctcggcgtgctcgatctacttgaagtaatgtgaagtttggaatctacctggatggtgattactaaagattcagacttaactaatttggctttgactcaagctggacggaactataagtaggcatactccgtccaagtccaaatatgtacgatacgtgtcacctagccaagtgccacatcaccttgtgcaaaatttggaatgatataaccttttgtttatcaattcattattttgctattgagtttttgtttatttagaggtaagacttaatattacctctagtaaaaatatttaggatatcataaattttaatttaaaaaacaataaaaaaaaactgttaaataattatgaagtgctacatcaatatgggtgtagtattgagcactgtaaatgtgccatatatcaaagcatctctaatgaagtgctaaaagtgtggtacacatgtatattttagtcgagaaatgctaaaaggcaccagtggtgtctaataccctcctacgtgtcaatattagtattggtgcaattaagtatcagatctaatataatttaatgtaataaattttaggaaatacaattacaagatgatacgttttgctaggcaccactgatgcccaataacaatactcgattttagcctatctttataaaagtgaactctctataaagtaggggccaagatgcaaaatggccctaaatctaacaattaagttaataaatgtccctttttataaaaaattaacaaaatatccatttagt

SEQ ID NO: 317679 - DNA, 1408 bp, Cannabis indica
aaacaaatcctctcaaattacaagtcctgcctaagaaaaagaccatagagtattgaacctcaatcaagctagtctaaggtgaagtagagagattaactagtatcaaccacctttttacaaggaaaagaagaaacacatgtaaatgagacaagaaaccttaaagaagaataaaaagatgtagcttgtcttagagaacatagaagaaaaagacatttagatagaaacggattccacagcaacggaaagacacccaaagatatgtaatcagaaagaatatttgtaacttggaaaatggttttgggaagacaaggcctgtcataatgggttataagcaactgtgtttaaatgggttaactgaacatcaagggaactcgaggtaaccaaatagattaatgaaaaatgaggattatactcaaagatttccagtgcaagcacaattaaagggaagggcttaaaattgaaggagccagacccagtttggtgatgcttctcttcatctttactacattattggacctggaaaccatttcaaatttcacaaccgatgttgctagttctagctaacatcgattagtttctccagaatactttcatattaacctgctgagggatttcataagtaatttcaaatttcggcttgtagcctcatcaccggtgaaaccaatgatatcagagcttttactctcgatgttcttcaaggtaaaaaccaaaaatagtactgatttctgaatcttctctgtattctcaggagtcaaaatggatgactgcactttactcgtacttaattcatctaattataacaaaataattaaatatcatttaaaaataattaattatttaaaaatttattataagaatagaattttaatttgtgtaaataaaagtttaaattttgtaaattaaattattataaatattataattaaatgacatcattattaaaataattaaagtaaggatttaaatataaataaaaaatactattacaggtaaaaaaaaaaatgtaaccatgatggttacaataaaaatgtaaccattgaataatcacccaacattataatattaaatcattaaaatatacaaggtaatgttttatattatcattctcttactagtattaacccattttaaacagactacaagggggtatttggtatgagggtttattagcatgggaataggaaaataaaacccaacctatgtttgatattgttttttttttaatttttttactagggtgcttggtttgacgtggcttaagatggcattaatttggaggtaatgtctactccttccaatctctgggtttaatattactggaatagacaaaataatatggccaattatgtaaaacctcatttaacacttgaggtatgtaaaccttcaatagctttttaaccattagatt

SEQ ID NO: 317680 - DNA, 6207 bp, Cannabis indica
tttttaattaatttaaattagttttaggtattagtagtctttgaatttgataattgatttttccacaaacttgcctttacggttatttttgaaatttgattatttgttttgtttgttttattaattttaatcataagatcagatatttacttattttatttatacaatttgaaatggtcttattttgatattaaaatattaataaaactaaaagataatctatttagaatttcaaattgctaaccatatcagatttctttattatttttaaaatatatttatacccgaaattcgcagaaggagacacgtgtcaatctgagggaatatgaatcaacaaatatattaataattatatcaataaatataaaatgaaataactcagtaaatgcggaattaatagagtatatttctaactcactgactgcacagtcttaagcgagacaaggatgtacaaactattaattcacgtattaacgcatagcgaagcatctacctcgatgtatgtaaagaggtattaacaaggtgaattgactattatcacactgagcatataatatacattataatagctaagtgtaataacttgaaggacatgattgtccagtctggaaggcctttatggtcaaagagcagttcttaagtttgctttgtacactggtactcatgccattgctggaagacttatgaataaaccaagttgttcatgtactaggtgagacgcctcagtgagaacatttggcaacatgtcctaatccacgtcagcattgacctccttaaagacggtttaagtcacagctgtgtaattatcaaatattaactgcctttatttacgtggagcgtaattaaagcctacaatttcagggaatattgttatgggattagaatttgaatgtaattaactgccaacctatattactatatatagggacagataatacagaaaaagggacgggaaaaaccctagagaggaaagggagtatactgattgtaaaacccaaatactgtatctagaaatatctgaataagatagactcgtggactatgcagagttaactgcaaaatcacgtaaaaacctggtgttaattccgtttctattatttttcttagatctcttataatttatgtgccaaatctattacgaaaatagactcataatcgttaacaaaaatttacgttaatagtttggtgctttcattgagagcctacgtcataaaagctctaaaaaatccctctaaccaaagaagaaagaatttttattctccgtgggtgataatggggaaaacaacaagagtcttcttgaagagaccaatcgttgtttgggaaaaaagcctatgggctcacggaggccacccaattcacgaacaacacgttcaacatgatcaacacgttcaagaagaagccaacgtgatgatgatcaaaatccagaaactgggaatgaggaaaccaatactgaagctggtggttatgtacctaggagtaaggatgcctatgatcccactaggtatgtgtgccattggttgaattggaaaattgccaactctggcaaccactgaccgaggctaaccaaaaaaatgctgagttggaaagggaggtagccgcagccagggcgacacaagaaaataacacacaaaactaacctgatcctggagtgagaaggccgcgaggtagacctcgggactcaagaacaaggatgcaggagacggctcaggagaaccccagaacacttaggaggagaaacctggggaaactggggatattcctgaagatgaataaccaaatgaccaggcacctcgtcaagaagtgcctcggagacaccagggattcacaacccaggggaatgaaaataatgatttaccagagtcttctcgtagaaacgagaactgaagacaacccaggactagggagtagaaaattcctcgtggtaacgagagaaatcttgggactcaacctaggacaagtgggttgccactgagaaaccgtcaacttccttctcgcacgaatagggaggagcatacacacttatctgtagacttggacacaaatctgcttagtgaaacaatgtgtcatgtcaagatttatacttccttgatggtggtgggcgacttcatatccaaaagggtttgcatcttgtctgggtttgcttctattccccctagcattgactatgaagcaaagaaattttcctgagcctactccgaaagaacatttaagggggttgagattcatattgtacttgcggaggaccctgaatctttgtctaggtcttccacatgccccaacctttttggacttgacaagcatgtcgtccacatacacctccatgctatggccaataaggtctttcaatattttgttaacaagcctctggtatgtggccctttcatttcttagcccaaagggcatgactttgtagcagtacaggcctaagtctatcatgaagtttatatgctcctaatctggtggatgcatctttatttggttttaacctgaatacaactcaagatttcatggccaattgtggcgtctacaagatggtcatttctaggaagggaaagtagtcttttggacatgctttgttcaggttggtgaagtcgatgaacactctaaacttttttttgggtttggaaacgagcacagggttggatacccaaagtggatataatgcttcagttatgaagtcaagggcttgtagcctctcgactacatctttgagcacttaggcgcgttctttgtccaacaacctccttttttgttgtatatgttataagttcggatcaatgttgagggcatgggtcatcaggggggggggtcgattccgaccatgtctccatgtgatcatgcaaagagatccaagtttgcccttagcaattttatcagtactgattttatttctgatgctaaacccttcccaatcttcagtcttctagttggagaagtgggatcaacctccacttcctccagctcttctacaggtctaaagctgtctgcaggattcgcaaaggagaatctatgtctgtgtccccacattaggctggacttcattgccctttgttgggatcttcttcagagctcttggtagacatcttctctttctttgcttaggacagggccaagttgtaacactgataggcatattgtttgtctcccctcaaacatcttaccctatgccttgttgggaatttcaagcataggtggtagatggatgtcactgccttcaggtcgtatagggatggccgacctatcattgaggtgtaatctgatgtaccccatgggtgaaatgccctggccaaagaaaccatgcatcagttgactgtaaggtgccaaatcagtaagttagagccccatattttcatatgttgatttgaaaagaatgttggaggaggctccattgtccaccatgaatcttgccacagtcatattcccaatttttgcaataattactaggggtcattgtgcgaaaactgacttgagcaccatctccttctgtgaaaatgattgtgggctcttcaacctttggttgcttagagtccctttctttgacagctaggatgctacttttgggcttgtgatggagtgtttgagcatagcgctccctagctttacaagttttgaatgcaatatggggtccgtcgatgatgacccctaagtgacccaccattggaggtagcattagttctctattttggacaccttatgcctgagtgtggttgttctgcacataatgatgcacgtggggatttttcttccttatgaggaattcaatctccctctataaattttgacactcatggtaacctggccgaagttgttttgaaactgaaagaactttgacatgtccctcttgctcaactaccttttgataagagggggcttcatgtatggcctgagtagccatgaagatggcctcaagtttcttagtcaggagggtgaaccaggtgtacttctcctccttgtccttctagttttgtggcgtgggaaaagtgttatacttcccctttttgcctttgtttcttctagagttgttcttattgaccttcctcctagtgctcttgccactggaggtttgggcaaagttgctagagcctacctgtgtggttagcaagtcgtggggctgtaggatgccctgtgattacctattgctgacttgccctggctgggcttgttagatagcttcttctagcttgataaagctgtctgctctatcgaggaactccttcatgttgttagtcgagatccttcaaatatctttctagaaaacactcaatggaaggatgcccccccagtatggtcgtatatcgaccttcttttataaggcctttgaccttggtggcctcggtcatgaacctctagatgtaatcctttaaagcttctccttgtcgttgtttgacttcgacaaggtcttctagctgtgatggtataagccttgaggatgagaactatgtgtagaattcttgagaaaactcattccaagaattgaacttgaagtaccattactgagctgtttttgacaaagttgttgggaatatgtgacaccgcacatcaccagtgtgatcttcaagagatcgagttgcatctcaaagtacttgatgtgtgccagtgggttttctcgcccagtatacatcttccatcccagcatcgaacttgggcaagggtaaggcatttatgtatgccgagaatggtgatctccttcacctgtctagctcaaggtttgaaggttttggaccagataggcccttgatcatgtcccttatttggtctaactgtgcttgcacagaaggatccattattgcagggacttgctgactagccctccttggatgggctgcagactcgaatgtgctaaggtcttgttgaccataatctaggagagcgtatggtggaggccagccagccctgtgctcggttgctggccttggccggctactcctagatatggagattggtcttggttagcagctatccatgattggccaaccctgtactaggtagggcttggctgcccgtgatcccccggttgctagtgcaactggtgtgttgataggaggtagattgcaccagttgctggagtttggtggatctagatatataaagtgattatcacttctcaaattattattttggtgtttccacctgttcctgaccctagctggttgaagattggcctttgggttacttgctcccaaatgccttgggaagggagttgtctcctcgggtcggctagaggtgcaccattagatggttggccaaccaagggttggccaatgggggcagttattgagcctaagatccctggccgacccctagactgctggttgtcgagatctagctgttctcgccattagacctttgtggcaaggcctttccttcttcaagtaggggatggtctgtcttggatcccgaataacttggttggaaaatttataagtagaccctccctgatctgtcgactactcttccttggagtggatctttaatgagatcctagcctcttccatcagttcttttattgaatcgccttatcaggtcactggattctttgttgcagcgatctagctccacctgatgagatcgaaggatgtgctctaggtcatccatccatctcaggaatttgcgtctctgctgagtgaatacatcacaatcagtagcacgtggttctttagtttggatggcttggcacacggcctctctaagtctggctagctcgagatcttctcccaagtctacatggggctcgccaatagaaagcgtgccaattcctagtcctatctctccagtatagtaccggggacaaggttcagttgttgtgcctagggtctgtcccccatgggtccttccttcagcgggaggcgccagtggagggtcttcccttggaggcaaggactgattgttaagatccactgagaggtttgtgtcaccctggccatctgtagtggcaagattcattgtgcctgccaagatggcaagatttaccacatctgtagtattcatggaaattatagttgtggctagaacatggacataaggatctgcagtcagaggatcttgagggaaacccaatgaggcagagggtatagctggagttctccttacgttaaccatggcgtttgatcaaatataaactcactctcaatgaaagtaccaaactattgacctcagatttggctaaccgacagtgaagtcgtattcaatgctgatgcttgccacgtg

SEQ ID NO: 317681 - DNA, 1177 bp, Cannabis indica
gtatttttgaaaaaaaaaattccgtgtgacagtatttttgtaaaaattaattcaaattttaatatttttgtaagtttcccttataaaactgaggttcttttgggcttaaaaggcttcacctttatcaagcccgtagttggcaaacaagtccaatgggctgtgcaacacttttggagctcaaaccaaaataacctccaaaaacactcaactttattaagttttatgtctagtttttttgatgagacgtatatttaacattcttaatagtgtactacacaatcatttaatttcctaatgttataggacaacctcaagcttcacacttcacttttactctttcttttttagttcttatggaggttgagggatttgtgaagctcgtgaaagacataaactcgatattaccacccttggtgttattgctatttgcatgatcttttccaaacactaaatacaagtcttcttcatatatgaaaaatttataatgttgtaatggtgattacattgtaaaagtattaaaaaacgaaataaataatagaactttaggtcatgtatggtttaatataatagtgattgtagtggaacctgttctatttagttacaagtcacctattaccttttgtaactagtgacaattatgttagttactaaagaagctcaactgagcaagaataaaagaagcagaagctttgagaagaaacagaggtttgtagagaagaagaagaagtgttttgtgagaatcgattagcttaaattttttatttatactgattcaatattacaaggcaagctacgaaatagaaaataccaaactaataacaaaaaattaactacctaattaatagactttaactaactagtaggtagatggttatcattcacaaatggtaaaatagccataagaagtttggacttaaggtactaaaacctttcttttgacaatgccttagttaaaagatcagcaacttgatccacagatggcacaaatctgaccgagagttggtgagccagaatttgatcacgcacaaagtgaagatatatttcaatatgtttactccttgcatgaaatacagaatttgctgccaaaacagtgacactttgattatcgacccaaagaatagaaggttgagaacaaaaaaaaaaaaaaaaaattagtaactctgtaagcaagaaagtt

SEQ ID NO: 317682 - DNA, 695 bp, Cannabis indica
caattgagtcagatcctatggttaccatggccaggaagctgaaaatagtcaaagacaaattatcattacaagagcaatttctttgttaaggcacaaaaatggcagagaatagagaccgtaacgaatcacttaccactgcacgcaaaaccactcatacggctccaaaagtaacactactgggaaaggtgatccttataatcttggaacctatgattatcaaggactaagggaaatgaaaggtaggtgaaacttcaaagaaggctacttaggttgaatagcaaaagaaactcaaatctgttatccaacctcaaaagaaaaagagaggaaatcttgtaattgaacaaaagttatattttctcattccatatccaacaatagctacacaactatatatttacagactttcacactatttgcaaattactaataagcctatatactatttttatagtcttacactttccaacccttcaaaatcaccttgtcctcaaggtggtaaaaatgcaaaaatcaacaaaataataacagcaaaattaaaatacaactcatttgttattaatttagagtttgtacaatattagattttttgcaaaaatttacaattttacagtcatacaaacttttttacaaaatactgtccttttataaactaccgtaaaataacaaaacagaacaattaaaataacagtagaaca

SEQ ID NO: 317683 - DNA, 1475 bp, Cannabis indica
taatgggtacccgatgggaatcctttccccatcgagtaattcccatcccgtccccgctttaatttaaacgagtattggagcgggtatggagatgaatttaagaagcgggtatggagtgggagagcaatccatgtacccgccccgccttgtttacatccctacccaccaagcataacactacttgcctagagatagtatacacgtgtgtacatagtttgttgtagtattagtgtaattgcaagaatctcagctgtaattgtttttttttttttttacagctgtagactttggacaaattgtttgcctctgtgaagccaggaaacctcaactttagcgagttcttaatcatttcttctggcagtgactacccacaacaacaaaatggccacgattgtgggatttttgtaatgaagtacatggaatcaatagttgagggaaatgaaacaatggcagaggtaatttaaagttggtttctttagtttatttttcatccagttaactaagtgtttataacgaaattgaggtatcaatctatgttgtgttgatttgtttctatgcatttcgttgtcatgtgtatttactcaattgaatccctaatgtacaatgcagtttgatcctattgaagccagactggattgtgttgggaaaattttcacccacaagagtaacaaggctaaacatgcggtgatggacggagttaagaagcaatttggaataaccaaagttcttccatcagcatccacaactatataagtaaaggtttggattttacaacaacccatttattgaaaccccgtattagtattacctactaaacatggacccttacccaaaattcaaccctttcgaatcaaatcctaaaaagtccccacctcatccattttcttcaacaggatccgtaggtacaccttcaaggagtcctagactccgttcagcttcaatttccagatgtgtgaactgtgctaggctggagggtgtcatgcacgagcacgaaaaactcataaggaaggcacatgttagagccacagaggctaagcaggagtcattaaaattagcagagcacctctaccattccgcccaagcattgcaagatgccaacacttcaagagaaaaattggaaaatatcattgacgacattctcgactacactgaggtctccatactaagggtgttcattgaaccgctcaaactgctcaaaccacccgcaccacaccgcaccgcaaaaaaatgcggtttgaatttctttgcgctgcggtcgcggtttgaattttttctaaatcgcgtagtgcggtgcgatttgcggttttgaattgttaatatccggttcaaaccgcaccgcaccgcacattataaaaatacacttttatatttatttagtccaatatgtgaatgtccaacctaaaacctactaattattgtattgttgaaacttattttttttttcatatttattttcaagccttatggtatttttg

SEQ ID NO: 317684 - DNA, 2142 bp, Cannabis indica
tttttgtctaggtccttcatatgcccaaccattctggacttgacaagcatgtcgcccagacacacctccatgttgcggtcgatgagatcattaaacattttgttcacaagcctttgatatgtggcccttacattcttcagttttgaaaggcgtcactttgtagttgtacatgcctaaatctgtcatgaagcctgtatgctcctgatctggtggatgcatcttctttttcttggctttggaaaaggccaagttgtaacattgatgggtagattattggtcttctctcaacatcgtaccccctgccttgttgggaattttaggtaggggtggtagatagataaactgccttcaggttatataaggacggtcagcccatcatggcattggaagccgagggaacgttgattatgacgacctgcgctatcagagccctagtggttggattttctccaatagtgaggggtaatatgatattctcgatgggtgtgatgtcttggccaaggaggtcatacatcacatgactgtagagttagcgagttagagcctcatcttttcatatgttgatctaaaaagaatgttgaaggaggctccattcgtccaccatgtatcttgccacagtcatattcttaatttgtgcaataacgagtagggagtcgttgcgtgggagctgacttgggcaggatctccttttgagaaaaagatcatgagctttccaagctttggttgcttagagtcttattcttcacctgccaggaagtcacttttaggatcgtgacggagtgtctgagcatagcgctccttaactttgctagtctcgcctgtaatatggggtctaccaatgacgagccctagcaccggaggtttgggctgaattgctagcacctatctgtgcacctggcaagagatggaggccagcccttcggctgctgactgtccctgttgggacgtctgggcatgatttgctttgggagttttggtaggagagtgaagcttgcactcttcccctccttcttccttgggcttcatggcataagggaattgttgaatttccttctttttccattatgttggtcagagtcgtcgttgttgcacttgcctccaccattctcattgtttgagaatcaacagaggtcatctgtgctagtcggcagtgcgttggggcgctatgaggccttgtgtttgtttgtcatcatcccgccctcttgtcaaggcttttcggatagcttcttctaactttatgaaggcatcatctcactgaagaaacttttccatattgttcattgagatcctcctgatatatttccaaaagtcagtaactggtaggatgcctccgagtacagtcgtatatcgaccttctttttaggcctttgaccttggtggcctcagctatgaactattgaatgtagtccttcaaaggttcatcttgtttttgctttatttcgacaagatcctctattcgggcaggtatttgtcttgaagcagagaattgaatacaaaattctcaggagaattcttcccaagagttaagtcttctgggggccagcttgaaatacaattattgggctattttagctagagttgccgagaagatttggcatcgcacatcttcagatacttattggagatcaatttggatctcaaagtacttcaggtgtactaggggattttctttctccgtgtacatcttccaagttgtcatcttgaatttgggcaaaggaaaggcattgatgtatgccgggaatggatatccccttgacctgtccagctcaagttctgaaggttttagaccagctaggccctagatcatgtctcgtattttatccatctgtgcttgcacagaaggatctattggtgtaggggcctggttgattatccttctttgattgagttgcagcctcaaattggctagagcttggttggctgtatcttgggagagagtatactcaaggccaaccatccccgagtctggtacttatacatggtcggctagccctaagctgggtagggcctggttgcccacacttctctgcctagctagcagaatttgtgcgttgacatggggtagatcacacaaattgctagagcttgatggatccaattgtcttaagtgattaatttcacttctcaaattgttattttagg

SEQ ID NO: 317685 - DNA, 2989 bp, Cannabis indica
acattctcagaggcaacaaaaaattagtagatagatgagtgtgaaaatgcattataggagctgaagaaacaacctcaaccacttgtgttgtccaagccccaagataatgaaaagctagggtgtacctagaagtcacataacatgttgtgattgttgtcctcaaaagagaagaagacgtcgtacagtaccctgtatactacatttgcaaaaggctaatcaacgttgaatgtcaataccaaattatggagaagttgacttatattttgctcttgcttcgaaaaaatttatgcccttactttcaagcacaccccataaaggtgtacacttatcaaccattacgataggttatatgaaaacctaaagcttcagactgactactcaaatggtcattgcattgagcttggccagttcgagatcacatatcaactaagaacagtcataaattgtcaagcccttacacacttcatagttgagagcacaaactcatctcttgaaatctctcaagatttaggagaaaagcaagagccaaagaagaagtgtctgagattctaaaaaattccaagagctccacccaatgagcaattaaatttggctttaaagcctcaaacaatgaggctaaatacaaagccttaatagctggcctcaaactgacatatgaagtatgggccgtccacctagacatattcagtgattctctactaattgtgaataaagtccttggtgaatacatagctcgaggtgaaaaaatggtggcctacttactaagtcagctcaaaggctacacaatcaggcagatccctagagagcagatgcacttgccatttagcaagtagcaccattgccgacaaggcaaattttgtgccaatacatttcctagaagaacccaacatttccatcccagaagaactcaacatgttggatgacactccaacattgatgacacctattgtggcttacatccaaactagaaccttgctagaagacaagaatgaagcgaaaaagatagaaagaaaggctgctaagtatctaatcctagacagagtaatgtacaaaaagagcttttccatgccactcttaaggtgtgtcaccaaggctgaagacaagcgactactgatagaagtgcatgaaggcttttgtagcaatcatgtcgggggaaaagcgtctctaagagtatactctgacagggatacttctagcaaacaatgatcgaggactcgatggcctacgtcaaaagatgtgagaaatgcccgagattctcaaaaattccaagagctccacccaatgtgttcacgatgatgcagtctccatggccctttgcattatgggagatagaccttaatggtcaactcccaaagggaaaaggaggtgtacaatgtgctatagtagcagtagactacttcaccaagtgggcagaagctgaacccctagcaataatcacctccaaaaaagtccttgactttgttgtcaagaacatcataagtcgattcaaacttccccacaagattttgtcagacaatgggaagtagtttgacagtgacatgttcactaatttctgcaacaggcatggtatcatcaaaagcttctttgttgtggcccatcctcaagcaaatggtaggtagaagctgtcaacaaaacgctcaaggacaccctaaagaagcgccttgaggaaggaaaaggaaactggccagaatttgtctcataggtcctatggtcccacacgactaccaagaagatagccaccgagcaaagtccattcgctctagcttatggctatgaggcaatgttgcttgtagagctggtgccattatctaacaagagaaaaacctatgaccaacaaacaaacaacatcctacgaacaaaatcccttgaagaagtaaaagaaaaaagagatcaagccaacctaaaactgtaggcctaccagcaaaaggtagtaaggcacttcagcaagcaagtcaaggacaggaaattcttcataggagacctggtgctctaaagagcgttcttgaacactaaagattcagtagcaggagtgttggaacctaactgggaaggcccttatcaagttacagagataactagtaagggagcctacaagttgggaaaatacaacaagaacatggagctcgttttcctaccaagatactggaatggagagaaccttcgcaaatactattagtagctagcttacagatactactccaatgtagccattctacctactcaacattagagtacaaaagggctagtacccatggcctttaaagcatggtatcccaccgttcttcaacgaaggcctctactatgcaaggcaagccgggatagccacttgatatctagaagcaaaattgtgtactgtaagcttgtgattcagtttaattaatttgcaaagtaacaaagaccaattaatgaatgaaaaacaatatttatgttcaatttattgcgtctaaaccactggccaacaagattaacttctcgaagttattcttttctcagttccacatgcgtacaacgggcaacaccccaagaaaattcctaggcaaggtctgtgaaacttggtgaattgcaagtgaccaagagaccgcaagtttgtgtgttcacttggcactactagaaagtcgggttttagtgacacacattgagtaactctaaaagtgtatagtgacacttcaacgcgtgtcactaatgagggtgactggaaagacaatttttagtgacacttcacacgtgtcattgaaaccttctgcattcattttctacgtgtcactaaaggcgtatagagtcaggttttgtcaaactaaaacaataacagccacacacatgaagtgtcactatatccttttttttttctttttattaatatttttagagatatagtgacacacaaaaagtgccactatattaaatatttttctaaataaataatatttaatttgatttaatacaaatctgtattaagaatttaaataggtataattatcaatttaaatta

SEQ ID NO: 317686 - DNA, 1306 bp, Cannabis indica
agggcataaacccaacactttcaagattcagattcaagctttcaagaactagactcaacctccaagaatcgagtctccaatggctacaaccatatttgagttggataaattcaatggctcgaatgattttagcttgtggagattaagatgaaattttttctggttcatccaaggatcccattagatgttgaagctatgattctcatacaggacaagaagaagaaaactgagattgaggcaaaggcacacagtgccattcttctaagccttggtgatgaaatgttgggagaagtatctaataaggaaaattcacttgatctctagaataagttgtcatctatctacatgaagaagtctttagcaaataaattgtacctcaagaaaaggcactacacacttcgggtggatgaatccagggaactcgaaaaatatcttaatgattttaactgaatcattcttgatctcaacagtcttggtgtcaagattgaggatgaagaccaagcaatcacattgcttagctctctgccaaagatgtttgagcatttagtggacacaattctgtatggtaaggatactcttaccatgaagaccaagcaatcacattgctcagctctctgccaaaggttgctctcaagaaaggagagatgacagaggtgagagcaatggagaaggattattaattgtaaaggaaaagtaccccaagaagtgttggtatttatagtccatatcagagttagaaaagcagaagtggatttgataaatctagactaatgaaaagaaggcaatacctcttgtagtctatcatggaatttttgctatcttttagtataattatgatcatccaatcgaagaactaatgttaaagaattcacattataatctttcaagctaacctcaacacttagaaataaagtgggctattatattctatagaatgaataaatttatgtattacagtgtattctcaactcatgagacattgtaattgagatagagtttatcataatctcacaccaccttgatggtgttgggcgtgagagagagagagagaggcgtgtaatgaccgcatttcataatatggactagaaaaggcaattagcactaattattggtatttttataattattagtggatttaattatttgtgagtcccattgttagaaatgggcattagagttataatttctcgattccggggattttattaaactctaggagtactatttgaattatatgtgattatgcaatttttgtaattttttctcaacaacaacggaaaatgcgatggatggctagtttgatcac

SEQ ID NO: 317687 - DNA, 2834 bp, Cannabis indica
tagtcacaacaaaaaattacttgggattaaaacatagtattagatacaaaatgtcaataaaatagttttagtcacaataagtattgtaactaaaaacacatctagtcacaacaaattataatttttgtgactaatactggtcaacttcataacataagggcctcccaaaaaggttgtaggtgcttgcttctgaaacttctcatataaagactccatgcagttgctagcaacaagttgttctgctagaaacgctagaataagaggagatgacacttgttgaggaggcataacaggaggaccctcctaccttagcctatggatctcttcatcttggttattaattcgagcttgcatttctaccgaaattttctcccaatcttaaggagcttgtggtggattttcgtaaccacctttgtgaaatctaccacgacctctgccgcgtccatggagatgttgagggttttgacttccctgactgcctccgatctcaaccatattgccctaactcctcgtgttttgtcgggcgtccatattataggattagcctgcaaacccataagtctgttttgtcagacaacaatcttatacaatcaaaataccacatacatggaattttaggcaatgcattacttagctaacatatttttaacatgcttcatgtcatgtttttctaataaaagaaattactataaaagtaaaggtttactgaactgtgagtcgagcgtgtctctggaaatgattatacatatcttgacggtcttcggtaaacaatctggcagctctgataccaaattgtaatgccctacttgtttaagtatgctacagtaattttctaattaatgtgcacgtctttgctaatcaaatgtttcctcaaaaaacgtgacaaattaaaactgaaattaaactttaactttaataattacataattttacataacttcaaggatcccgttaaaattttacaaccaaacacagaatatactttttactaaagtgttggccaacgaatgcaaaatagaagcccacgtcgcctcgagactgaacattctaggcctaataaccatcctaatatgtacaattatcttcaagatttggactaactgttattcaacgtttgtctttcctttacctacacatgtgaacaaatctgtgagttgatagactcaataagaaaagcataaaacatataaccatattaccgacttgtatctaggcgcccatacaccgatctataagtcttaacagatgaatcaagaacattcttaaaaaaatgacctctataccacatgcactatgtactcgtcccatacaagtgttggtagggttaagccatacctcgagcacaactaagcattctaccacatcactaagtatatgccccttactagtattggtaatgttgtgcaaatcccttaacattatatgttgtatcaatgcaatccgcattgcaactgtactagtgttggtagtatacgaatcacataatacaacatgcatataatatacatacacagatacatatatatatatatatcttatactacctcgtttgctgattgaagtgtgtctgtcaacctgaataaaaatttaacttgctgaacagaggctctatgtcacaatcatgcaaaatggataaacaacttgttgaaacctttttggggacctaaacccaaaataaaaagtttccctatcaataaatagcgtggtaataccatacatatcgagaaaatagaaaaattgaggctcttaaaatttcccaaactggtacactagattcccaaaatggtaaactgttttttgggatcttgcctatttttagaaaaattgtgaaccgtttttctacaaaaattcctaaaaacttcaaatcgcactttattctaccccaaatttcacaccaagctccagaataactaaatacacctcaacgaacataatccaagtgataaaattgagtataacttagaatttcaaaatctaccattgttgagttatttttgagttcttgaattcaaacttgctcaacaactcaaccacccaaccaaactagcacaaagaagcttaagataacttccattagcttaaaaaaatatcccacaataagcccaagttcaaacagaacctaattcacctagttgcatcctcaaaccaacattttcttctcaaagacctaaaattagatgttttagggcttaccataattgatctttcaaattgtaaattatttccctgtgattctctatctggaatagatgataataacataaagccccaaagttaactagatttaccaccaaataatcacaataaaacttagggcaaattaccaaaatgtcttctccttcactcttaagcaaccataagatttagaggtgaaaaagttaaataccataaccctgtttaacccgatatatccaaatatcaaataggtgtaccctattaaaagaaagattctaaaccaactcatgtgactctaatggataatccatcgcatttctatcattaccgagtaaaaattatcgaaaatatataaatttttacatataacatatataatacacttagagtttactaaaatctctgaaattgagaaattataacttcagggtcatctcaaggtgttgagaggcctagggagaaatttaaaacggggcatttttcttttaagatattatttactatttaaataaatattatttaattttcttctattatttacaatttaaattttaacacaatataatttaactttttttatctcaatataacaaataatttttctcaccacataaactaacttaaagtaatatttgattataatagcatctctattgaag

SEQ ID NO: 317688 - DNA, 1031 bp, Cannabis indica
atgtgaaatagttggaatcattctgcatatcagtcgtcaaaaagattaaagatgatttatgctggcctggtgatataatcacagaaagaaatgtgggtgtctgggccggtgaattaccggagttcttggtaaaggctattgaaaatgattctaatagcaaagacgggtcaactacttcttttatagagaacattgatgcaaacatcaagacatcggcacaagacatagccagttatcaggtaaataatttacatggttacataaaatttactgtactcttttgcatattcttccacaaaattgtcagtatattttaaagatatatagatacactaacattgaatgtgttattgtattttctgttaaaatacttaggtggtattgtcattagatgggaagctaattgggttccaaccaatgagtcgcgtagctgttaatcagtgggctgcaaatcccttagcaaaggaattatacggtggaaaaaagctttcgccaggtatattctatcgtacttgtcacatttaattatttatatataagtagatagcgtataggtacctaaaattttgagttgtaagcagcatacattttataaattttttaagcggtataagtacaaaatgttaatatactttattagtgtttttaataagacatgtataaactcaaattctaaatcattgggttttaccagaaacatgtaatttgtattgataaaaattacattgggtacttataccgctaaaagaaatcattaaatttatattagttacaaatataaaattttagatgcgtatgtcacaattattcatttatatataatatatatatttatattatattaatttagaagacaacaccataatcgaggtaaaatgtttttgtcacatttttgttttgggtatgtggagagattatataatataatatatatattttattttaagatggtgtatattataattatagtatgcatcttatttgttttaaaaaaattacgggacattgggtaatacttttgttttttaatt

SEQ ID NO: 317689 - DNA, 1564 bp, Cannabis indica
ttaacgagtgaatcaaaaaaacttaatgaacacaaataggagtttatgtatacttaggtttcaaactagtctactaatgatcatcgctgtgatatgaataactttttcatggtaaacgacatgttaatgaaagatgttatttcatattggttcagtcatgtataattaaatgatacactaaacctttactgcatgtctatccacatatgtgatctgaacgatcaaaatcacacacactagagtatactgaatagtaaaccgtacttgataattttataataaagattcattactttaatacactaccaacttattttattcatattatataatcttaattctgttttacgaccttacaagaatataccatctacatatgaataagaaattttcagatatttatcaattatatttttataattaatgtattcatttatcttataattacattttatatattttataatatattatttattaaatacttatttttaagacataactcccaacaaaatctccatgtaatcactaagattatggttgctctttaatttagttattgaagtttttcaggaaaaaaaaaacttaaaatgcaagaaaataattctagaatacttagtaatactaccaatctgaaatgaaaggatccaaaattaaatagttacaaaacaattaaaacataaatttagaactaaaaggaaaaatgtgtttggattttaggatatctttttataaataagggaaatttgcggtaaaagtcctcataaagttgagtttgatccagataagtctccaacctctaaaaatagcggtaataatcctcaaggtcatgttttttatttgtccgttcgtcctaattttaacttgagtcgtttacttttttaaaaattgttcacgtgtcgaaatattattaatccaaattattattttaatttaagaaaataaaaataaataaataaatttaaaaataatttcttttttctttttcttttctttttttttttcctttttctttcttttcttcatcatcttcttcgtcttcttcttcttctcatgccagaaacctaccaccaacccccaaccccaaacccaagcaccaccaccaccaaacgccccttcgaccaccgtccacggtctcattcgacccagagcccttcttcttcatcaccttcttcgtcttttcttcttcttcttcacacgaaatcccacccaccatcactgccatgcacatctaaaagagagaaaaggagaaagacagacaggcaagggctcgagggtggaaggtcgagtttgggtttcaacttttttgggttcatttcgagcttggaggaccgataatggccagtgtcgagcttgggcatggctgttcgacgaaaagagagaaagacaagagagatagagagagatggagggtgagctcgattttctgggttcatttagatgatgaatgaatgttggtaaaagttagggtttttttaattttaggtttttattttatttttaaaaaattattttgggttggtttttgattggcgattgacaacatcggggctggagtggggtt

SEQ ID NO: 317690 - DNA, 652 bp, Cannabis indica
ttttttttatgtcaatggtcttgaaattgatttaatagtttatgctcttaatggacaaaacccatgttgcacatcaattctaagattacttttttaagtgtagaaaatttaaaaaaaaaaccatgttatttttttttttcatagcctagccaggccaatgtgacacttatctaattggacaaaatttactgaaactgaagaaattcggtttgggccggcctccagattctggaacatgctgacctaaatataaatattaaatagagaaaattaagtaaattttttacactttaccttcaaatattttgttatatttttacagtataaagacacaaaagaaaaatcataacaaaaaataataacaaaacaatataaaaataataaaataacaagagtataatataaaaatataataaaatgtcatattataagtaaataaaattttaaaaactgtaaaattaattaaaattccgtacaatcgtatttttatattttttttcttaaaataatccctaatatataagttaggtgtaagagaaaatattaaatagtaaaatataaagacaaatccataaattatgcatgctctatactaggtatgataattataaacttttattcaatttttgcgccttaaattatatgttagaat

SEQ ID NO: 317691 - DNA, 1147 bp, Cannabis indica
tacggtccactaaaatttgtataataagtgtattgatcatattcctcttatatcaatttgatacgtaaactttcataaaaacgataatttttcatagcaacgacaactatataaacaaacaacacatttaccacacatttctcacaaagctagctagccacaatcttcttggaaacttaagcttttctgtccttttgttaattttttttcttttttctgttctgatcatcttttaactaattatacaatatatcaacctaattttaataataattaaattatatgtattaaaattcgtttggtataccatattatattgtatatatagtattatattgagttgtattttgtgcaatatttttatataaaactagtgctattaatttgtataggcatatatataattatataatattttagtataaattaaaatttaatataatacttattgatgcagtgttttgtgaacaaatctaaaaagatcgtaaatgagtaagatgaacacaagaataaacgtcaatcaaagtaaaaactactttatcgaaaagaaatttaacgaaaatgaacacaaggtttttataggctagttcacttgtaattttttgatcttaatgcttaagaacaattctccagagttatgttctccaagggctcgtttggtatgtcgtattatattgtattgtattgtgttagattgtattgtattagtattatttaatgtaatattatgcttgacatcgatttatattaagagattgtgtaatgttataatatgttttcaataaactcaatcccaacaccacctacaggccaggttcggggtttggggtctagggtcctaggtccaagtcttaggtccgggtctgggttcgggtccgaggtccaaggtctgggtcgggtcctagctgcgggtccttggtttgggtctagttcgagtacccgtctggggttcggtccaagtacaggtccggggtccgaatctgggtctaggtcgggtctgggtctagatccgagtcgagtcttgggtctcgggttcagggtccagattccagtgcaaggtctaggtccggggtacaagttcggttcgggtttgggattcgagttagcgttcgagtctgggtctaggtcaaagtcccaacttcggggt

SEQ ID NO: 317692 - DNA, 954 bp, Cannabis indica
tacttgtgagtagatctaagatcttggtaaattaattccaacacaactctcatcaaagaagtgttatgtccaaccatcctgattaatggaattgctagggtggtttttccttctctcgcaccaggcccttttggcacaactttgccttttagagcagaagggcatccaagcccaaaggcatcggtggccttctgcgtctgcgagggctagttggctagattcacgctttctaggatgtaagggagttgttttgtttggaggcccactcacttttgccttccccttgtcttttgcaggagttaaagttttggtgttagtaaggtttgctctgttttcttcgttgactacttccactgaggcatcctcctcataatcttcctctaaatctctaaattttgcatgtaatcgagccactatcctctctatctttcgagagaccacttcttgatgggctaacttctactggttctcgtgtagtttgttggatactcaaacaagatctgggtcttgttcataatagtatccatcattgtagtaacaatcttgacatatgcttcatcattctcttctttattctcgccggtagggtttttgcctttgacttgtttacgacgttgagttgggtcatccccttcgtcgtcagctttcgatgaatccccttctctcacattgctcggctgggcgtgctttagaaagagagggtttacatcttccatgaccacatcggggtttccgtgaggagtcttctttatcattgttttgggtgtagccaccatggttgtagtaacagcgtggctcaagtctttcctcagctctcaataaaaatactaaaatattatcgagatttttagaaacgaattaaataagatcttaagaactaataataacagtaaataaagtagataataatctttatgtggttcaagcgttaattatccatagtccacgagtcag

SEQ ID NO: 317693 - DNA, 530 bp, Cannabis indica
gctcaccccctattttctctcattccaagaattcagtttaatgctagtggatgagaatggtaccgttgaggaagaaagttttattagtttagtcttattctacataaaacaaattttgtatttaagctgatctggatgacttaaattaactttgtactagttagaaatgagtaatgatagatgttagatattattttagtattttattgacttattatatctatctatctaatccggtgactacataactgtggaggatattattgttctttatactaatgaatagtcctaattttgttactaatattttcatatcgatataggaattaattcataaataagtattttgtaatataaattgaatgatcatttataagtgttatcttcttataaggattaaaatttgacttttgaccacttaaattatggatattatatatttgtctcgacataaaactcgggtcgtgacacacatggtctgggaaatccaagcgcatttcttcatctgagtttacttttttttttttttt

SEQ ID NO: 317694 - DNA, 2158 bp, Cannabis indica
caccatgaatcttcaaatcctaaaacataaactcaaacacaacactaaatgagggatgtgtatcagattaaaaatatcattagaatccttacaaatcatctcaaaaataccacacaagcatcttactttaaatttctagctcaatcaagcataaggtgtaaagattacaccaatatcatcaaacaggcataccaagaacatcataccctattttcatgtttgaaaaataaatttcagcaagaattccaaataaaaaactaatataaagggctacctcaattccttccaatctctagcaccaaaggccaccaacaccaagcttgaatctaagcaattcacaatcaaaattcaaggattagaaatgagtttagagagagggagagggtcggctaatagggctgaggaaacaatgcagaaaataagactttgttttacttaaaatttccttttgttgcaaataacaaattagtagaaaattccaacaatacccttagggccatacacacacataagtacaaattcaaggaaaaatagtcattcccatcacaaatatactcaaataaattcagattatccacacataaataaaattccaataattcatcccaaaattgtatttcagccccgaacccggtttggcccgaaatacccggttgtgactataccgcgctgacttgtcagaacatacctgaaaaagacaaaataggtatactatataataatatagtccacaagcacataattaaattaaatttacagttttacccttctcgggtcaaaattactaaaatacccatggctcaccaacggggtcttaacatgtcataaatcataataatttgcatataatagattatataataatataattccacaataatacacatttaactagttagggtttgctaatccattttctaactcttagggtattacacagaccatctaggtccgggaaaggttctcagccataagaaagaaggcgcccaacatggcatatccggatgccctcatggggtattcccaaaagaactgtctacaagataagtggagatacctccaatatgggatctcactaaataagggattcaccttaggccatatcctctaacatttattttatgaatcttacagcgtataacaactgtcaacattaaatggaccccacgattatggctgatcgtgatcttgtaaatcaggtctttcctaacttatccaaagtccatattaaatgaatatttaccccatcagtggatctagcttcataaaaaaatcctaacagtctaaaccctagcctataaatatataaaagattatatctccatgcaaagtgttagaaaattattattcaaacactaatactaaaattaggatttttaagctcgaccaagaacattatccttgtgtaatacatcaaagtttttcagctaataatattgactcatggactaaggctcctgaacgccccaaccacataaaatcttggtcttcttctttattttattaatttcttaagttctaataattttaaaatgaaatggtaatcaaaaatctcagtactttcattaggagtttgaagatttttttaccaaagttgtcacttacaatgatggtggatacttgagaaaccattgcaaaatctattgttcgtgagggtaaagaagatattgctatggatgatgttaacgagcctcctccagtacacactcatgcagatacaataggagacagagaaactgttgggattttatgccctaaataaaatccaattttattgtaattttatttactttcaataaagattagaaatcatatcttgaccttgtcatatgctttgttcacatattttatacatgattatatgtttaatatataagttctattaaattctgaatatatatttattcacagttacgtgatatcattacagtaaaaagtaattatgattatatacatcaaattatttagtcccacgatttatcagtgcactggatttatactgaggtgataattagcgatgggtttgcttacacttagataagtgaaatgtattttccatggcattagtaaattaaactagcatctgatgtattggctgtacattagactggattgatattctgtaacaccctaactagcataggcgtattacgtgatt

SEQ ID NO: 317695 - DNA, 1808 bp, Cannabis indica
aaatttttataataaatattaaactttataatttacatagtcatttataaataccgggatcccgtttctaaacttctatacaaaatatgccaaattatataatcaggtcgcacagcgactacaaaataatatccccagatgtcctgagaccgaacacttccggtcgcgctatcacgacatgtacaacttcatctcagccaggctcattcctgttcacctttcgcctttcctttacctacacatgcaagcagaactgtgagtcgacagactcagtaagaaaagcatataacttgtcataaaataccgacttgtcataaaataccgacttgtatctaggcgcccatacacctatatacaaggcttgacagatgagtaagaacgttccatactagggtacagccactatacctcatacactgcgtacctcactgtatgagtgtcggtagggtttgtttcgtaccccgagtaccactgagtgatataccatagacaccttgtactttctcgtacctgtgctggtatcactgtaatgtactctcaaacaatattcactatactaatggactctgtaccataaccgtacaagtgttggtagtgcaacaaacatacaagcatgcatatacacttaacatatatatacactcagatattcatattacatattatacacagttcttaccttccttcttaattcaagtgtgctggccaacctgaatgaaaagccttgtgctaaatggatgccctaattacataatgaaaactgggtaaataacataatcaaaaccctaatctgggaaacccgaacccacaactctaggttctgttatactctctagggattacactaactcatgaaacaagaaaacaccaagctatgacactgaaatagacgagaattgagaaaatagaacattcggggaaccctgcaaaaacttgctaaccggtttataccagttcacccaaaaatcacatattttgctcaaaactctaccaagtgcaaccaaaccttccagagtacctaattagggtatacacaatatattccaaccagaaaatcacaaaaaaactcagtgaatcaaattatgccattatggacctaaactttgagttcaaagctcaaacttgctcaattctatgtccatacaccaagactagtatctagagcttaaaatcaactctaataaagcttccaatttgaaccataatctattcaaaccctaacaaccctaatttttgaaaatcacaagttaacatcaaactttaaaggtcaagaactactaaacaaagggtactatggcttaccatggcttcaagaacacttgaatccttgctgaattccagaaaaaatggatgaatcttgatgattttcccctggtttttgggttggccgaacaaagagagagaggggaaaaatgttgaactttgtaatttggttttctttgatttttttctcaaaatggaataagctttaacaaaataaaccatggctgaaaataaactaaataggtgtcactcccataggcagccacccaatcaaccattaatcaatttactaaaatgccccttaacttacaactaaagcatttttaagactagggataatatggttgaattctataaccccgcctaacctcagtattttatttttttccaaaatatatcccactaagaaataaggttctaaacttacccatgtgatcaaactagccatccattgcattttctattgtcgccgagaaaaattacaaaaattacataattcacatataagtcaaataatactcctagagtttaataaaatctccgga

SEQ ID NO: 317696 - DNA, 679 bp, Cannabis indica
aggagaattgttaacaatgttacatataatttgcctaaatatgctttaatgaagattatatctagttagaggatactccctctcctatatttttttggattatgaataaaaatctacgttttttttaaaaaaaaaataaataataaataattatgttattatttctcctctaaaattatgtagagaattaaataactcccacaatgtttttcacttgagagaatagaaatataaaattaaaaataaataaagaaaaaattaataaaaagggaggtattttgaaatacctcatattctctctctctttctctccctataactctcgaacccatgacctcaaggcaagtattatttcaacctaccatcaaggccacaagtgagagttgtctaattcttacatgttttactattttaatattctattactattattttgttttctttcaaatgtactaatattttgtttttatttgttccataaaattaaaatatggtagaatatccatttagaaaaagtaataataataaataacccatacatacataaaaagaagaagaagaagtaatgagtagtaaatatttttatagtttgataatattatttattataaaaacacaactccttttaagtaggaaaaaattagagttttttgtttttaaatttatagttattggaggt

SEQ ID NO: 317697 - DNA, 913 bp, Cannabis indica
ctgaaatatcttagacaaatgagggactatatgctaacctataagggtggagaactcaatcctttaggctacaccaattcaaatttttaggctgatgtcgatgacagattgtcagcttctagaatgatatgtactcttagagatggagaagtaacttggagaagcgtaaataagttttcaatatcagactccactatgaaagctgaatacatcgcagcttcaaaagcttcaaaagaattagtttggctcaagaagttttacaccgatcttagagtcatacccaacatggacaaacctctagtattgttttgcgacaacactaggctaattctaaagaaccaagaagccacaagagaagaaaatatataaaaaggaagttccacacgattttttaatcaaggggagacgtgaaggtcgagaaggtagcaatcaaagactttgaacaagactgttgtttgaaaaacatattaaattatgagtttatgagaactataagcattatgttttaattagtgcaaatgggagtttgttaagattttatgtcctaattaaatttgtaaacctttattattatcaataaaaaataaaaattattctgacatggtaaaatcacattgctcatgtgtcgtattcatgattatttctttaatgataaattctaataaatctcggacatgtagctaatcataattattgtgacttaaatcacagtaaaaaataattatgattacatgatcaaatttattagtgtcctaagatttatcaatgtactagatttatattgactaagttaatctatgataagttctaggttaagtgttaagttctttctaggacttattagaatattttatttatgaaaattattttctaattaaggaaataattttctatttaaggaaataaataaata

SEQ ID NO: 317698 - DNA, 500 bp, Cannabis indica
ttttaaaaataaaaaactgattataaaaataggggaatcatcttatatgctatatttaacttttcttttctaaattttcgttgcgatttaaggttgctccgttagttgctataagaatttatgcgtgaaaatttgtaaaaatacaaaaaaaaaaaaaaaactagttttaaagtgtaaaaataaaaaccccctaaaaaataatactaaacacactctaagagttttttttttattttgctttaatggatatgtgatggcttctccataagcgatgagtattcttttaccctgaatgcactggttattagatgggaatggaatagatggaggcataaatatgtagcgggaatgaggataaaaattacattccaatacattaatcgttcaatttctatttctagtcatattgtattaattaggaaaaaaaaagaaaaagataataaaaatatgaaaattttatttgcacctcaaaaattttaaaggcactccattttaataat

SEQ ID NO: 317699 - DNA, 1465 bp, Cannabis indica
aaaaatctcggtataaacgttttggtactttcattgagagctaaaagaagcagtgataccttccaaaaattacactcattaatcatggtactcactcgaaacaagtttggccttcactttactaatcctaatgccaaggcaggagatacaaaagatcaaaatgaggcgaccagccatcacaaggatcaacttggcaaagacacagatctggacgctcgtgtagttgaagatgatgaattaggaaagaatagttctgatgatgttgaagatgatcctcaagactcattaaaagatgatcctcgagatacactgaaggatgattgccaagataagtttgttgacggtgctgctggagaaaaagataatctcgataagtcagatcccgtggtcattatgcctagaaagcttcagctaactgaaaatgagttgtcttgacaagaccaattcaacgtcataatgctcgacaaaatgacaagaatagaagtcgtgatgatagccttaaccaatgggaacccaactgcacaaatgcctccagcaaatgatgctgccgaaaagactgatcctaaagatcttggaacctctaatcctcgtaaggataaagggaaagggaaaataggtgaaactttgaagaaggcttctcagactaaacaacaaaagaaatctaaaactgtcagccaacctccatagaaaaagaaagggaaccatgcttcagggtaaggtaacaggctaatattggaggcaccgctgtacaaaaagataaacctgatgctagaacaaagaaacttacttcccggaaggacaagagtcgtcatattgatgccagtagtcaaagtgatgatggcaatgaagtgcatctaatttcagacagcgacaatgaaagtctctccacaaacaacctttgaaggagattaaatgcaaagaaagagaaagttagagcaaaaaagccagacctcgtagagatgatctgaggaatcacatcaacaatcgaatccatggacggggagtcttcaagtgacaaaactcaacgcttggaatgcaaagtcaaagagttaatgaagctcacggagaagatctccagaaagcaaaatggatccgtgtctgattcaaaagaagaagacacggaaccatgtgtgaaaaggtttatagatgcaccgctgtcggagcgctttagctagagcttattgcctaaagtaaaagatgttatataaatttaacattagggtatatttatttttttgtactatggtgtatatcaatgttggatatagttcgtatagaaagaaaaatataatatattttactcaattaaaaagaaagatagagttgttggaaaaattaaactgaaaaaaaaattaataaagtataatgagagataaaaaaataatagcacgcaaaagtaaggacacgtaagtaattttaatacctaaggatgtgatatttggctatttacttaatattttcaaaa

SEQ ID NO: 317700 - DNA, 2600 bp, Cannabis indica
ctggccaactcaaggtcttctcacgttcacacggggctcacctatagtaggctcgtcaattcttggtctcgtctctcctgtatagtaccggggatgaaacccgattgttgttcttggagggtgcccccaaggactcttccttcagttggaggtgcctatggagggtcctcccttggaggcatgggcctgcgacttggatccactgggatgcctgtatcagtctgaccactatagagtcctgccaggcaatcttggctggcaatagacccaacaggggaggcctggctatccaaggtgtgcagggtctggcaggtcaaggcctgcaagacctggtaggtcaagggctgtagaatctggcaggacatgggctgcaggacctggtaggtcactacagctctgtgtagaggaggccagactcttggtgctaatttttgtgacaagattcaccacatctgtagtgtttgttgggattccaattgtgactgaaaactgagtgtctagacctacaatttgtgggtcttgagggagaccaaagatgcagatggcgtgacaggaattcttcttgtgttaaccatgacatttgatcagatacgatatccacactctcaattaaagcaccaaactgttggcctcaaaaaatgatcactaacagttgggtcatatagatctgatgcttgccacatgttacataaacagaatgaaaaaagcaataaacacagagatttgttatagaggttcgaccccattgtgatagtaggtgatgacctactctccttttggttgtatttatactgagggaaatactatctagatcactataggtgggatctactataacacccttagaattacaaagtatgaatcaaaaggcagatctcacgtgttggacaacctagggtattggataaccgtgggtgttggacaaccttgggtgctggccagctaaggtgctagccagcctatagttggtgtgtgagagagatttagagaagagagagagagccctaatggtcatgtacaagagagaaagagagagagaagagagaatatggcttcagacttagaactatttggaggctaggtgacctagaggcaacttagagaacttaggtttcaaggctagggttaaggcctttatataggaagccttaaaccctaggtttacaacttaaatctcttaaaaataggatagttagatagatatttacataagaccaaaatgtccttagattccagatacttctcaacctgtttgttaggctttaggggtcaaatttgtagcacatgccttggtccacgtgtagagttgtacatagagtcttgccaagtcaatcttggtcgtccataggccttcaaggaagtttggacggtcatggtcctgctaggacctagcaggacaaggcctggaaggttcggcaagtcactatagctccaccaagaggaggacaacctttgagtgtggaggccagccttttgcaagtttaggacagctttgtacatcgtttccttaaagatgtcaggttcccttggtcgaatggagtttccttgggtccgaaagtcacttcttagtcggccagcttatgcacagatcctggccggcctataggcttaccctagccggcctataggctccctttggccggccaaggatgttggtacaactcctcgtgggctcgctttactcccttcggtcgctgcctgacggttttactatatcttaacggacgctctattctactattggcggggttgtactccacttgtactctatttttggtatgccacgtcatgtagacaaaatttaggataacaaatctaaagtaagattctagaactctttttttgcaattattggaagttttggctaagtttaagcatgcaatgttagtattttggttctgccagaaccttaggtttaaggggttattttctgagttatttcttagttgaataatgtttatttgggttggaatttctgtttagttttattgttgagcaagtttgtgttcaagagctcaacattggctcaacaatggtggattgtgaaattttgtgctatatctggttttattgcttgggatatgtttattgaaccttctttaggtgttttggagcttagtaagaagtttaggttattttgagttgattaagagactatttttgcagcagaaaagggaagacgatttctgtggaaataatctaccgttattactggcagattacccagaaaaatagtctgccgttcttctgggtagtttttcaaagtctcatttttctgtgtttcctcaatatttagggtattttcatgctgtttatcgatataaaaacttttagttttcagtttagattcccgagaaggttgtagcaagttatttactcaatttacatgattgtaacatagtgtctccgttcaacacatgaattttcattctggttgactggcacacttgaattaggaaatgaggtaagattagcataagatatgtatatgtatatgtgtttgtatgtaaattttatggtgtgtgttagggcttcgcatcggtcggtttggtcagtttttttacaaataaaaatctgaaattcagttttcagtttggatt

SEQ ID NO: 317701 - DNA, 1285 bp, Cannabis indica
gcataaaacccaacaaattctactgtattagagaatcatcgtatgtagaatttttctatgacaacttattttacagcttctgcaactaatagagaccaaccatgaatatgttgttgaatgttgaagtactcctccaagttattattattattagcctctaggtccactatggaaagatgcatgggtttatgaggcaagttaattttggatagagatatctattttttatagtttctgccttgtaagctattgctttaccattgtgatcgtagctgtaatagtattcaatcaactatatgatcgatttatcttgcagtgcattcattgtttctaatagagaatcagatatttgaacattctttaattcttgtgtgattatttttctcttgaaggatgcctttatcatcttctaacttatccaactttggagcatttctcttgtgcaggatgtattgggcaaagaagatccttgaagatgcccttgagctatctatctatttgaatggcaaggtagttcaactattattctacaatgttgtcatttttgtaacaagaaagttcaatgagcaggatgaaagttttgaaacaatcaaataaagaactacattcaagttaacatctattaatgtcaggtcttttgttgaattttaggttcaaataatttatatcctggagttattattccatttacacgtagacctcttctcttgattattgattttgacaatagccatgcattcaagggaggtttgtcgaaacttggacattgctttttccacgctgtattttctccacaacaaaaagaactttgtaaatcagattttccacaattttcactatactttttttttaaaacaaatatacattaatattatggtttacagttctcatgcgacttatgtctacttgagtaacttctgtgatatactcacatgagcaaggaaaagataaaatctgatatagctaactacattttccaaatgttttgtcatataagttgttggtacacatcttttatgtgtctataataatcatatgtagatttctgtgtggaacatttggttcgtctgaatgtgaattctctgtaaagttacttacattggaaaagtatgtatttcaggttatacatggtgcagaaagaggggagtcagttgcactacatacagtttaattttataaaacaaatcgttcaaataattgtcacactttagttaataaaatctaaaaaaaacaaataaaactaacaatacgtggctcggcacgtaacattcacctagtatatata

SEQ ID NO: 317702 - DNA, 2669 bp, Cannabis indica
ttttaaaaggtaatttttttgggcccctgggataggtgggccctaggcacaggcctagcccgcctatccccagggccgggcctgtaaataacctactgcgaaagtagacatcaaagaagaggtggccatgatcttcctttgttacttcacaaaccagaaacatgatgttgtcaagttgcatatgaatcctttgtaaatggtcatgagtaagaagttttgcattaacaacctgccataagatgaaacgatactttggcacacttacactattccaaagtgttaatacatcacattttcaagtttaatgaagcttttatacaatttaccagcactaaactttctaagacaactcgcatcctctatctctccttgagaaaaaaatgatctaataaggcacaatttacgccaataccaactagtatccactttaagttgataccctcaaaaattttgaccttttaagtaaatattatttatccacctgacccaaagagattcttatttttgacaaattcactactacaaattacactattcacgtcagtcaatgctgctgttcatagcgttgaccgacatgaatagtacccaagttataggacccgtctatttaaaaaagacactaataatatataattagcatcgtttggtaaaatgaggctaaaactaaaactgatataataaagcaatttttttaaaaaaaacttgctttcatttagcgtcggttattaactgtcgattgttgttttttcgagggtttaaaactgacgcaaaatgaatttgtgagaaatataaacagacgctaatttaataaatcccctaaaacacaaacaaatcgccactactgttcatacacatccaaaacccactcttcgaatgatctggtgaaactaccctcgtcctttccgatcgtcccatcaaatccgaccagtgctctccaaaaccagcctcgatcctttctgtcgtcctcagcattcccttctcccaatccaccaattcggcttcaatctcaacccacagattcaactccccaggaccaagccaccattgttgacgacaatacagctcaagcactccattctcgatcagctgctgacgatcattccagccccttttttctcagcactggtgatcaccccggtctcatgctcgtgccacagtcctcaacgacacaaattatcaaccatggaaaagaggaattacaatggccttgactgccaagaacaagatcgcgttcattaacggatctctccctcggccagaacctggtaattctactcttaattcttagttaaggtgcaacaacatggtaatgtaccttggttatttaattctgtttcctctgagattgcacaaagtataatgtactttgatttagctactgaaatgtggaatgatcttgctgagcgttttaatgagggcaatggccctagaattttccaattgcagacccaactcactcgacttcagtagggtgattcttcggtttccgcatatttcaccaaaataaaatccctatgggatgagttgaaagaatttcaacccataagaacttgcacttgtggtgcaatgaaaattttcttggattattacaaccaaaatcaagtacttcaattcttgactaggttgaatgaatcctatgcctcggttcgggcccaaattttgctcaatgaaccaatacctaacctgtcccgagtgtttgctatgattgttcaagaagaacgtcaaagatgccttggatcctctaaaaaaattccacttgctgctgctgcttcgacttcaaacaatccaccaagagccaagaaaccccgaccatcttgctctaattgtggcaaaccaggccatttagttgataaatgctattttctacgtcgatttcccctggctatggtgataagaagaaataagacaaggaaaaagccaaggcaaacactgcctccaccaacaattcgaaagctgatactgatggtcacaatatgcatgctgatctctcatctcagtgccagcatttaatatcactgcttagccaacaactaggtcacaccagcaatgctgaaactcctgcaatgatccctgcagcttcgaatcttgcaagtaaaaatcccatttcacttgcaacatcttggataattgatagtggtgctacacaccacttgtgttccaacattacttgtttttcttcctttactaatgatctttctcctaagtttgtcacattaccaaatggataagacatacctgtccaaaaggttgggactgtcaagattaatcccaacattactctgcataatgtgttgtatatacctcagttcagactgaatcttttttccatttcagattttatgcttaatacttctaataacatcctgtttcatcacaattcttgtgaaattcaggatcatactctgaatgtggtgattgggacagctaaaagatgtgaaaaattgtacttgcttcaacaagacaaaccatctgctacagttgctgctatactccctttttctttcaataaaaccaatgtaatccaatggcacaatcgccttggacacccttcgatgtgtattttaagttttttcaataaagaacacaacatttcacatcaaagttctattaaacattgtcatatatgccatttggccaagcaaaagtgtttaccttttatttccaatcat

SEQ ID NO: 317703 - DNA, 2226 bp, Cannabis indica
aaggacttaaaataaaactaaaagtttccctatcgatggataacatgataataccctaaatatcgtaaaaacgtaaaaatctaggataccctaaattgccccaaccggtagaccggttccaaccaaaaaatgggttgtatggggtctgcctggtgcggaacaagtagactagttctacaggaccatactaaaacgtttgaccggttcagtacaagaacccctaaaaacttcacaaacacctcaattcaatcccaaatcataccaaatcttccaaagtacctaaaaagaggataaggaacataatccaagcaacaaaactaaacaataacctcaaaatcataaaccacaatgagagagaaaagtttgacctctaaagctcaaactttattcaatcaccacaacaagaaccccattctccttagaattactaaaatcatcaaacacaaacattaaaaaactccaataaacctaatcagatcatacaacaatcctaacccagaaattaagctacaaacctaacttaaaacttaagaaaacaaagagaaaagagtgtaggagcttaccttgagttgaatccttaaaattcctagagaaatctcgcttaagcacccgaaaattagagttaaaaaccctagtttctactgggtttccttaaaggtcaagagagagagggacttagagagagagtaatcttttcaaattttctaattttgtaaaagaaataatttttggtttatctaatataattcaatataggaaatcaaattcaataatttaatattaatcctctaaatcactaaaagacaaaagactactttgtccttacttcaccaagaagtaactttgccacctaaacgcattttggtcaaatctaaaaccacaaatattcccaacattctcaacgtctatctaaattgcctcactattactaaaatactaaaccataagaaaaagtgactttatcgatcaaacgtcgtgttctactgttattgggcataaaatatgaaaaatatgaaatttcacatataacataaatagcacacctagaattcaaatatatctccataattacataaattataattaaatgtctactttttaattaaaccctaattattagctaattctcatactaaaattaagtgatcattacatatattctttaatatattatccactaagtacttacttttatagtataaactctaaaaactaaactaaatttaattgacctagtgtagtgttatgtttgtcagtgtgtttggtggtggcttttaaataaaattcttcattttatttaaaaaagaagaaattaataataataataatgtataattaattttaaatatatatataattaagaatgatttgattcccatttagaattgtaatgaatccttttattattatgaatctcctcatctatatagacaaaatcaaaagtttattatttgtttgttagttcttatgtatcaagacatgttttttttatcaagacatgttaattgtaaaaatcgcttaattttagtatgagaattagcagataattacgacttaattctgaaattagattttgaattatgatttataaatttatggagatatatttaaattctaggtgtgatattcatgttgtatatgaaatttcatgtttttcatattttttgcccatcaacattggaacgcgacgtttagccgatagagtcacattttcttatggtttagtattttagtaatagtgggtcaatataaatagatatcggaaatgtcaagattattcgaggtattaggtttgaccaaaatacccctagatggtaaggatgctttttggcttaagtaagggcaaaatagtctttttgccatatgtttcttttgtactttagtgacttataattgaattattaatttgaatcaagttagttgaatgttggataaacattagattttatcctcttttttcaaaaatagaaaaattagaaagaaaacgctttttctctctccattactctctctttctcttgatcccttgaggaaccagcagccaacctagatttttcaggtcctctgtaatgaccgctctagtaatgtggattagtaaaggcaattagcactaatttttattattttattattatttgtgaattaatttatttatggaccccaatatttagaaataaatattattttattaaactctaggggtattatttagcttatatgtgaaat

SEQ ID NO: 317704 - DNA, 2092 bp, Cannabis indica
aggaggtattgaacctctaagagaattgtggaaagacataaaaagactaattgtacgatcaatggccgaattcttggtctaagcaagcagatttataaaacttaaagaggtagtttggcgtgtggaaacagttggatagaagaaaaatcaacagcacaccactgcagccaatacatccgtccaaccagatcaaaattcacaaaatcacagtagctcaagccaaggtggtaaatagtcaaataatggcaacagacaaggttatgggaagaataacagtttcagcaaaaaatgtaaacaacatccttaggagaatgcctcaatattcactgcttttaccatcctaacagaggatatagacaccattttcacaactacccagtccgtggtgccatataaaaaacctcctcccacgaagaaagacatgagcaaaagggataccaccaagttctgtcgctttcatgtgtactacagtcacatcactaatgaatgcaataatttgaagtgagaaatacaatttttcaataggaaagacaagccacacttgcaagaatatgtaaaactgactaggaacaaagggctagagaaagctaacgtggaaaatcagttgatacctccaccagcggacgattatcttcaagttgtcattggaggcccccaccttgttggagagtcggagaaagctagagaaaaatatgctcatgcattacaatatgaacagaaagatgaagttctagctatagaagaaagaaagcctaagcagctacgcatcagagaaccagtcacatctttcagcgaagaagattcggaccacgttatttatcctcacaacgaccatttggttgttgatgttaagattgcaaataaaatggtggctcagaccatggatgatagtagagctttcgtaaatattttgttcaaagcaacatatgaaaagatggggcttcatctcaatgatctggttccttacactcagtttgtatatggattcttcggccaaggcattgctccactcagatagatctacctaccacttatagtgggacaagctctaacaagaacaatagtgatggctcaattcttagtgatcaacgtgccttctagttttaatgtcatgttaggtcgaccgactttatatgacctgaaggctgctacttcagtattccacttatgtttaaaatttccaataagaaatggagtgggctgtctaaaagaaaaccaaagagttgtacgagaatgctacaacctcactctatttaaggccaaaaagaaagacaactccgaccagagttcagaaaagggtaaaagcattgcccaataggaatccgcccaaggtggggatgaagatatagaccctcgccttgggaacctaatacaaatgttggactgttggaagagctataagaagttgaaataaatcccaccatgtcgaccaagaagctcaaaatttgaaaaggtttgttgcttgaaatatattagctttaattaaatttctaagaccaaacctcaacatttttcctggttgcacgaagacatggtcacggtcgatccagatgtaatgtctcatgctataaatattgatctatactttcatcccgtccagagaaaaggagattgatggatcaagggtgtgcacaagaattaaaagaatacatagaaaggctccacataaatagatttataattgaagccttctacccagcatgggtagctaaccccgtacgagtaccctagccgaacaaaaaattgtgagtatgcattgatttcaccgaccttacacaaggtgtgccttaaagactattttctacttccaagaatcaatcaacttgtggatgcaatggccaaccatgaaatcttaagctttatggatgcctatttaggatatagtcagataagaatgcacctacctgataaagagcatactagattttgaacatatgttggtctatactgctacataagtatgacatttagccttaagaatgttagggctacctacaaaaggttagtcaacaagatgttcaaggggcagatcaaacgtaatatggaagtatatgtggatgacatgctcatcaaatccaagaaggttgggggg

SEQ ID NO: 317705 - DNA, 1410 bp, Cannabis indica
aattatatgattatttattgaatctttctcaattaaattatagaacacctaatataaaactaaatatacgtgccttgcacgtaactttcttctagtatatataaatatctttataattgttatagaatcctacatattttaaactaataactatattatagaaaattactaacaatttgtagacatattattattattattattattattattataaaaaaatttacatttagtcacaataaaatttgtaattaaatgtaaaaaagttctgactaattataaatcagtatttttatattgtgactaaaaattttttagttaaatgtattagttaaaaagaaaatataatttattgtgactaaatgtatttttagtcataatatttattatgactaaaactaaattagtgacaatttatatctaaatattatattatagtcacaaataatattttattgtgattaaaaatcatatttaattataaaaaatttatgttgtgactaaaaaattatggtaaaaataatttattttttttggtagtatatataattttagatttaacacttctatatgggcttgttgaataaacaagagacaacaactctagcaaaagcaaatttgaaaagacaagataactacccaagaagacaaaattattaattagtaagaatagtataaataatacacatatctttcataactaaatattttgtatgtgagtgtatattgtcccaagtttatctagaagctcataataacaataataataataataatagattagtttcgtccctattattgccttaaatcatggggtatcattcacaatgctttaccctataatccttaatttgttttaagtgtatataaaaaaaaattactactttctatataatgcgcctatacccctagaaaaaggtcaaaatcaaatttgttttatctcaaaattgcattaacattgtaattatcacttggtaagaaagcatgaaaactttttttttaaaaaaaaaaaagaaaaagaaaacctaatacatgcctagctacttgccaattgccattgactattttcttttgaatctatcccaaaaatgtgaatcaaatgtccatatatattgacttcaaattcaagttttcctttagatcaataaataaataaaaatcaagttttgcttaaaggcatgcactagggaaaagggggtgtgattttgttcgagatatatagcatagaagaattatacatggttctttaacaatctctatgcatatgcatctatttttcaagatccaaaaccttgatacatgtaaaacagattaattaaacaatattaataatagtgggataattctatcaagtaccaatctttgtaaattttttatatttttacgtttaaatatttatttttatatttt

SEQ ID NO: 317706 - DNA, 964 bp, Cannabis indica
gcacaaaacccaacaataacatagctgcaatatgtactcaaagacctacacatacaacaacctaaaccagcctttatttactgtgacaattagtctgcaattcacattacaaacaaccccaccttccacgaacacaccaagcacattgaactagactgccattttgttcgagacaaaataaactaatccaccattcgacttatgcctgttccaagcacattacaacttgcagacgcgttcactaagccattacctgcttccactctctcggctcacactagcaagatggctgtacatatctgtgtaatatctcggaaaataaataatatttatatagacatattttattaaatatgtaattattttggtaacgaagtaagattatgatcttacttagggtaactactgagaatttattgaacgatatatatagtgtaatttattaattacggagattatattgggatatatgggtatcgaggataccatttctgaaataaaatattttttcgggcccgacaattgtggaaatttaacgatgtggttagtaatgtcacaaagttaatggatggattattttgagggtattccaaactagtttagaattttagaatgtcggtttgatggattagtaaaatttccataagtataactttactttgaggggtagattagtcctttataattttatttttgttcctttgactttggggctgacctttataaaaaaaaaggaacaaagaaaagaaacatatatatgtgagatgacttacaaagtaagaaaagaaccaaaagcttcttctcctttccttcctcttcgtgcaaacctaaaaccagctagctagaaggttttcttcagccattttattcttcttttcaagctggttcttgccccaagtcagcctagaagagtttggaggatccgagatcgtcgagcatcattccactaaggtcggcccacata

SEQ ID NO: 317707 - DNA, 1445 bp, Cannabis indica
acatgtcaaagttcaaggggcaaaaatcctaattagccttaaattaattctagaaaagatagttcaacgctctcaaaaagattgggcaaagaagctagatgatgcactgtgggcttataggacaacatttaaaacacctattggtatgtcaccatattggttggtatatgggaaggtctgtcatctttcagtggagttagaacacaaggaatttggggtaacgatgaccttaaatgtggatttgacagaagcaggagaaaagcggttattgcaactcaatgaaatggacgaatttcgaaatgaggcctatgaaaacaccaaggtctacaaagaaaggaccaagaagtggcatgacagaaacttgattagaaaagagtttcaacccggacaacatgttctactctttaattcatggttgaagctttttcctgaaaaattgaaatcacgatgatctagatcgttcacaatggttcaagtattcccatatggagaggtggaactcaaaggggagacactagagaccttcaaggtcaatggtcaaagacgtactaaagcgttgcttaggaggccaaatttatcaagccaagtatgttatcatcttggcacctctttgattagagaaagggagtctagctaaatgacgtaaacgacagtgcctttgggaggcatctcaaacaaacttttacttttttactaaaaattttcttttttagaaacaattacaactattattttcgttagtttttagtttttagtaaattgtaattttacttttagaatttatttcagaaaaaatatgtagaaccgtggaaatcgtgaaaactagtcaatttaaatttttttaatagtgcctaggcatgcaagtggaaaaaaatgggcagtaagcaagaggaggaattgaacatgcacgggtctaggcatggaatttccatgtcgcgacacctgtgcatcaggagaaaattgttttttggaagaaatattctcagctagaataaaagacacgggtcgtggcataggaagtccatgttgcgacacctatgtcaagtagtaacaaaaagagcccaaaaaaattatacacaggtcgtagcatgagaaagtccatgccgcgacttctgggccttacaagaaaaaagaaaaggaagaaaaagaggcaggccgccacataggaatcacatgccgcgacataccccatttaaaaacaggcagagcactcaatcgtgccattcatcagatttttttttttctaaaaaacctttaattcttcttcttcatatgagcgaacccctctctcaaccaaaaatttcaccattcacaactatttcaacccaaatctcttcatccaatctgtaacaccctaactaacttagcccctggcaggtgggggaaactgagctccctgaccttgattcgaccccactgaattgccctgactcctggtggtccgc

SEQ ID NO: 317708 - DNA, 1722 bp, Cannabis indica
gctatcacaaccccattagcagctgcattaaccagctaagaatatcagtactctatatatatagacacacgttccattacatttcctaccaaagccaaaatcttgcaacgcctctcaccaaattaatcaccaaaagaaaaaaagaaatccccaaaatcaattaaatttgagattaggtttccaattcaaaaatatcgattaaactaagcatcaattgaagacgagacaacaaatgcgaggcagcaatacctttgattccgagagaggtttgaccagagccaaccgctgtcaaggcgtgttcgatctgtactagctttcctgaaggactgttcaaaaatcaaacatcagagactgaaacgaaaaaaacagatattgagagagaaagagagatttatgtacctgaaggtagtgagagaaaatgagtactgactgtctcccatggcgagctgatgaaagagaagatcggagagaaatttggggtttgggggaagaagagtaatggaaaagaaaaagcgaaagagagaaaaaggggtctcttctactcagtacttttcttgttcaagaagaagaagggaatttaaatgaaagccaaaaatatcatttttgccactctattttcttgaaattacgattggatattttttttaatgactaattaagattttcgtttcctgaactttttttaacatgtatcaaattatgatggcatctgaacttttttcggttgttaaaaaatattttcaaagttttaagattgtcggattcaaggatttcgtctaagtttattagcaaaagtctgatgaaagtttgggggacacgatttggttcatgttaaagtttgagggcatgattgatacgtattaaaatccgagaggacggtttggtataaagataatcgtcacgttagtaaaattgaatgaaattggttagaagtcttgaatccaataatttcaatagtttgtgaggaatttttaagaacttaggaaatttagggatataatttagtacatgttaaagtgagggcaaaaatcttaattagtcttttttttatcaagaaagaaggtttttttaaggcaataaatatatcattgaactataagaatattgtccaacaacctaattaaaattccaaaagacaaaaacgaaaattatctaaacaaacaaattgttcatccattcgaaaagcatgtacaattaatctatgagtagtcacattgactatctgaaaaatacgtatcaaaaaaactcctaaaaatttatataacacacttgccacatcatctaataatgatctaaaatcatttaaatataattctcttcttagaagcagatacagctgttaaacaatcaattttaagtttcaacgacatgagcaataaagcctaaaaaaatataatctaacaccatcataagagtcacacactatgtgaatgtctctttgaaagctttttactcgcaaaattataaattcaaatttaatgatagttttaatcatattattagctttattttaagctagattttcaactcaaaaatacataattttttattaagccaaatgttacaaaccacacatgcaagagcaacataacacaaatttctaacaagattcttagattgatcccaaattagccacttgattcacgcctggcaaccactgtgccaaagattactgccaaacaagatcgaccctaagttgaaatgggttataggtaaaaaaaa

SEQ ID NO: 317709 - DNA, 787 bp, Cannabis indica
taactaatcagattgtaatgggttttatttagggcacaaaacccaacaatgcggtcattacaggtattttcataccagtcccttttggcgtaacagggcctttttaggtcgaagggtgtccgagcccggaggcatcggtgaccttttgtgcctaagaagacatgttggctagattcgtgattttttgaggaagtacaggaccagcaaggttctgagggtcacctacctttgccttccccttatcttttacaggagtacatgttcagcattagtagggttttacctgttgtttcctccgacacattccaccaaggggtcatcgtcagaatctcccttgtctagatctccaaacttggctcgaagcgggccatcattttctccattctttgagaaaacttttcttaatgggctagtttttcttggtcccgagcagctccttagacactcgatctactttaggttcttgctcgtagtggtaacaatctttatagtacccatctttgatgtattctccatcatcatcctcctcctctttctcagcatctctctcatcatcaatgttgtcatgttggttgtttaggtcgtcctctcgattgtcaaggttggatatccccacctcttgcatcgcttggctgggcgtgctctagtgagagggggcttacttcttccatgatagtctcaaggccaccttgaggagtcttcttaggaaccacctatttgttgggttttatgccttaaattgttgcgaaaattattaattactacgcaagtgcacgcaatcaagtag

SEQ ID NO: 317710 - DNA, 2552 bp, Cannabis indica
agtgcaaggatgctcccgaacaacagaaacttatgctaacatcattgcccagaattggtcttcgaatactttagctctagatgcccaattaatccaaaacaatactgcttgctctactcaattatcttcttggcatcgtgctaaatttggagatctccccaaaagataaagattgcccaagataaagtggcggcccttaacaacttaaagatactagtcgtaatcatttcgacatgttgaaatctagtgaatctattttggatgagctttggctaaggaggaggattattggcaacaacgttccagagtttcttggcttaaatctggtgattcaaacacccgtttttttcaccaaaaagccaacaataggcgttcttataacacaaccaaatcactggtggatgatcaaggttatgagcattctgctcagaaagatattggcaaaatcattgaaagctacttcaagaatattttcacaacggatggtgttgattcgaaagctctcaatcatgttatctccacagttccttgtactattacagcagatgtcaatcaactcctcaatctaccgtacacagttgacgatgttttcttagctcttaaatctatgagtgatgatagcagtcctagaatttatggtatgtcggttatgttttatactaactactggcatattgttggagatttagtgtcaaaggttgttctcaatgttctcaatgatggggctgatccatctatttttattacattgataccaaaagtcaagaaaccaaggagtttgtcttaattaagaccaatcagcctctgcaatataaactggtttctaaagctattgtggttcgtttaaagccttctctattaatggtgatttcagaatcgcaaagtgctttcttacaatccaagctcattacagacaatgttttagtggcatttgaactattacattcactaaaacatcttaaacaagggaaagaaggttatgcggctatgaagcttgatatgagtaaggcctttgatagggtggagtggcattttctccgttcaatgatgattgttatgggttttgcctatccgattattgatcttattcaacgatgtctcaacagtgtttcatattattttttggttaatggatcaattcatggtaatgtcattcctagccgtggtattcgtcaaggagatccgctcttgccgtatttattcatcatttatgccgaagggctttcaaggctttttcaatatgaggaaaatcgtggtcatttacaaggacttagagttgctcgtggtgctccattagtgtcccatttatttttttgacgatagccttattttgagtcatgctattacaaggtctattgaagctgttaagcgttctattcactactactgccgtgcttcagggcaaagataaaattttgacaaatcagtactttccttctctccaaacacactacctcccattcaaagcaatgctcaacaaacaatgcaaatgccaattaagccttgccatgaacgatacctgggcttaccatcttattcaggaagagacaaaaaagttctatttggggaatcaaagataaattattgaatcttctatcagtttggcaggagcaattattttcaattggtggtaaggaagtgcttataaaagcagtagctcaatccataccaacttatgctatgagctgctttcaactttcaaaatctttgatccgccaaatagaggttatgatgaataaattctggtggcgttcaaattcatcatcttcaggcataaattggaaaacttggaatgctctgtgccattcgaaagtagaagggggaatgggattcaaaagttttgtgcactttaaccaagccttattagccaaacaagcttggctaatttttttaatccctcatcactgctttcccgcattcttaaagcacggtacttcaaaatttcttcctttttagatgttgaattaggaccttatccatctctaactttgagaaacatcgtttgggggaaggaattgctctctaaaggtttgtgttggaaagttggaaatggaacacaaatccaatgtgcttcagatgcttggctgcctggtatctgaatttaggccgttggtttataatggtacagatagaacaatgaaggtctcatagttaatcacaccttctcgacaatggtgattactctgggggtggagtattgattttggagaagtgtaaaaatcgatctgaatctctaactctaccagtgagactgaatgctaaagttgcaggaaagatacttattcagtctatggaaagttctatatagtttttggcattgtatcaacaatttattaactactagtgttacttcctgactaacacagaagtaatttccaaaaagtaaagaatctagtatccctagaggagtagacatatagagagaggaatttcacaatattaaggatttgtgattaaggaaatgtaatggtggaggaaaggttgtattgaatacaacctatcagatctattacggagagaatactacatgctacacttgatctggatatcaa

SEQ ID NO: 317711 - DNA, 2320 bp, Cannabis indica
taatttctaaattaaactaagcggtctttacatactcatacaatcaaataatcaataatggggagattattctagcacttcgtacaatggaatcaatcaatatgttcaaccaacttcttactatcctcctatagaaccacaagatcaagatcattctcttactatgctcaacacttttgtggcttccagtattcagatggaacagaataatgcacagtttcaacaacctactcatgttgcatcatatagtgaaaagccaactattgctgagctgattaaaatgataacagcttataacttgcggattgaataaaatactgtgcagtttcagcaaaactttcagaaaattattcagagcgcccaaaaatctttacgaaatatagagaatcttgtggagtaaatagaaacatctatgagtgaatatgaaattcaatgttcaaacgctatgccttcacaagtggagagtaacccaatggagaatgtcactggcatcactatccaaagtggtacacaacttgaattaccaccacaccaagaagttaatgatttgattccaagtggtggagttaaaaattcatcccttgaaggatcatctccaccaaaggtttaatctcatactttagttggtccatcatcactgaaaaatccatacaaaccaattgtaccaacttatgtcactcctccaccttttccaagtagattgaaaaaatccaagaaagacgagcccgtcaaggaaatccctgaaactcttcccaaaattgaggtaaaaatttcatgtcttgaggtaaacaaagaagagcctcattgtgctaacatttttaaggagttgtgtccaaacgagaaaaagttcaatggtggtgagaaaataagtgtgggaaagaatgtttccgttgttctccaagaaagttgttgcctaagacaagtacaattcaatgcataattagtaaaatcaagtttgatcattgcatgatagatttaggagaaattattaataatatgtcttattttaattttgcttctttaaatcttggttcgttaagagaaactcaagttttgattcaattaactaattaaactaatgcttatcctttagggatattttttttttggtagggaactgatacaggctaaaacaacaaagataacaaagttacacaagagtggaggattttatttcatctataaaagttcattgtctatcctaagagtatgtagagataccctaggagaacttataaaactttaacatcagaaaagaaaacctctaaactaagagttatagcttccgatccaccaatggaacacctgttctcgtctccattgctgaaggtgactacaatacatctgatgagtttatattagaccatactaacctcacaaaattaaaactaagcataatgattttacaaaaccaaaattagtcatactcgccttaaaaaaaaaaaaaaactaagtcatactagccttacaaaaccaaaaattaaccatactaatggacttgaagatgtttttgtgcatgctagtggacttgtcactctaagtgagtcttacataattgagatggaagatgagagtgatcccaatcctacatcaactctatttgggagacctttcttactcactacgagtaagaagttggatacgaaagcatggatacttagaatggatttcattgataggtacataaggaatgagtctttgtaagaaggccaaacgtgaagaccacatgagcacaagatgcagtcgagctaacgacgttaaataaagcaaacttacgagagtttttctaacccttttttttattttgtattgattttatttgattgagccttgaggacaatgcttatattaagtgtggggaagagattaattgtcgtgtccatataggttttttttcttagttgtttagttattttttttttttatcattttttagtttacattaattttttatctttaattttagtgagcatggtttgaataaaattcggttgacaataattgctcgtgtttgatgtgtgtttttactttgatgtcttatgcataatcttgtggaaaataattttgttgatgatgaaattcttgattgtgtgatagttaagattctaggaaaatgataaatttctatgatttgtgtactctggattacttactactcaagcttcatttttttaacttttgcacaacaattgaattatcatatttgctaatatttaaaaagataaacgcatttttgacttttgatttaaagtctcaaccaatctagaatttatttgattattatttgagacaaaattgataaattacatatgattttgag

SEQ ID NO: 317712 - DNA, 577 bp, Cannabis indica
cccaagttttaataaaaccaataaaagttaatgtaagtccaaataaaaattctaacaggtgctacactaatttgggattgtggaatgggattggcaatcatacgaagttggtgggatttccatttttaccatattttattattttttttagttaaagaaaattaaaaaatacaaataaaactttaataaagggtatttttgtaacttaaataatcgattctaattttaaaataatgtaaatatagcaatgttaatacttccgattgtgattcatacaagtcgagtaaacaacttattttgttctagattatcaatctaattgaaagtgaatttgattcttagtcatttcaattacttgtaagtaaacacaccataaaaatagtgtaatatatatttatatattttatgtctctcagattaatattaaaaaattaattaaatttaaattatatttacattacgttcagaaagccatagtgaaattaatttacatgtaattagaagtaattacacaatttatatgtttgtttaaccatgtattaatagcaatgacctaaaatttgttggaaattatttt

SEQ ID NO: 317713 - DNA, 1794 bp, Cannabis indica
catctagctcaaagagatcctaatgtgatacatgtcggtcaacaggctgaaccagttcatccatttgtgcaagcacaattggatcaacttaaaaacaaggtgcatgcctgaccagcccaaacctcattgatctcgagctggactgagcatgcggatcaccctccctagagattgaagtccttgaactacccctgaaattcaagatggcaacctagaagatgtatacggggaaagaggatccaaaattaactctacccccaaaattaagatttttgcttggaaggttatccaaaatgctttacctgttgctattgcccttaatagaagaaaggcaattgactcggtgacttgctcactgtgtaaccatgcttaggaatccataggacatgctttgttcacttgccaatatgtaaaggcttcaaaattcataattgaatttcaaaaacctcaccatatgcaagatggagattatgtgattcatctatcatcgctatactgtaaaagtaaatttgaaactctcacctatattatgtggacggaaagtaattgtgtttttcatggtgggtcaagatgagatgggtcctatgtagcttcttatgaaatctcatactatgatagctacacccttactcaaaactgtgctacaaagattactgccatgactgctcctactgaaacaactcaactttccaagccgacggaggagtctcatggaagccacctgatctaaatggcttcaaattgaatgtggatgctgcggtcaatatgaacaccaaaaccttgggcatcagagcagttattcaggatcacaataggtctgatattgctgccttatctagaccagtccaaagttattttcactcagatgagatggaagcaaaaactctttttcatagcatcacttaggcaagtcaactacaaattcctatcacaatcattgaaactattactttatgagtctctactgcattatctgtaacataaatgagggcaaagtaatttacactgcaatctttcttttaccgcgagatttttagcaaggtttttaatgaggcaatttttatagacattcaagggagagtgttataaaatattataaatggatgtccaaattactaaataaattaccaccattaatgcttcattatatttccctttatttcactcatttagttttccattattctaattatatttttgtataaatagagattcaccctattagaataaactagtgaaaaaaatctcattcactctctcattctcttgtttttttttttttgtcttttctgttcttttatttctttctctattctatattattttataacaaatttatttattaattatatatcaattaaaataataataacacttaaatataatacagactaagtaatataattctattataaaagtttttagaaaatgtaaaaatatcagtattagtaaaaataaactattaatttattttaaaagatataagttaaaaatttaagtatttattagtatatatttaaattctaatgttttaatagtatatttatttctcattgtggtattgttataaaattatgtaaaattaagagtaatttgcagcataacctctataagtgcttagtttattgcaactaaccttcaattttaaaattttagtggtaaaacctaatctcgtttctgttagcagtttaatatttctatccattttgggtgttaagtatcatgttagaatgtctacgtgtacatctacgtggacatggtgtacacatggtacaattttattagtccacgtaa

SEQ ID NO: 317714 - DNA, 901 bp, Cannabis indica
aattattttttatttttacttttgaaaacaaaattttaagaactcaaagctgaaaatacagccaaataggctcttagctttcaaacaaaaaaatataacctttaggtttaggaaaaatgagtagtatacttctaaaaggggtgtttaattagtgtatttttatatcgttcggtatttatgagagtttttcactctaattttttatattttatgattgtgtagttatatggtaaattttagaaaatatataaatagtttaccgtatcaaaattaatgttcaaaatagttacatatcatacatatatatgaaattaaaagcaatcacgtgtaataaaatatttaaattttaattttcagtattataaactagtcggaatttttgaaatttacagataatcctaaataattaacatacacaattataaaaaaaaaaaaaaaattgaatgtgacgttttcttggaagtaatataagaaatgaattaattaatttcaatcaattcttttatttagttacattttaaagtattgaaatgtcattcagttggaatgatttttttatcattttagtaaaatgactatttcattttaattattttttatttttttttttatattttaaattttattctattcctattcattttcttattctcgttcttattcttatattttcattcttcccctataaataccacctaaataacttaccctatttttgtatcacgttataccaataattacattattattagaacattaattgagtggctagtgactgtgatgtgccgtgcatatatgtatactttaaggcgtgcattcattgatatatttttaacacaaaatctatagctatctaaaatagagagctttgactcaaaatatgtgggtgcatatatatata

SEQ ID NO: 317715 - DNA, 1123 bp, Cannabis indica
aataaaaaaatacttgtaactaaaatatagtatttagatgcaagtttttactaatttaattttaatcactagtattatgactaaaaacatatttagccacaacaaattataattattgtgactaacacatttagctacggaaataaattgataattaacaaatgttgaatttgattgtaagaacttagttgataattataatgatctttccactctatctaatgtaattaaagacataaattactctttatgctcctaagtaagttaatattttagcatgtagaatggataggaaggttttagggttggatagagagatggtatgaaatggttttaggccaagtttctaagttgtaataatttagtttgtactacttatttaatggaaattacaactttgtcgaaaataaaaaaaaatatatatatacatatatatatttttcttaaggcttaattcaactcaaggcccaccttgaactagtatattaattattgagataattacataagacactattttttgtaaaagaattacatttttacgtttaatttttttttatatatatttttatagtttttcattgaaacaacaacaaaaaataatattacattaaagtaacatgaaagtaatatcaaaacaacaacaaaaattagcatacagataacaaaaaatcaacaataaatcaacaagagtacaatataaaaagaccgtattttctgtaaataaaataaaaaatattatgaaaatatttaaatttcgtgaaaatcgcgcgtattttgtaatttttttttattatttttgtgtatttgtaaaataatctcttaattatttttgttgtttgtgaagtataagtagtgttatcataaatttgaatacttagccattaattcaatgctactatagtcttgctattattttgacttataggtgatttaggttttcttttcttcttctttgaatttcgtatttttcttctattttcgggcatttttcttgacactatttttgacttaactagaagctttatcttctattctttataatattacttattctatataaaatgtgcctatataacagaatttttggtttatgagaaattattggatgacttttttattt

SEQ ID NO: 317716 - DNA, 566 bp, Cannabis indica
tattttattttaataaaaataattttattctaagatattttattataataataaaaatgtattttcaaaattttgatatttgtagttaatttttttggaaaggattattggtattactaatcataagtgtcgtgattaattcacctgaactacaatgtccaattgaaaattaggaccagagaatgagattggtttgataaggaacacggaccctaatggaaccattattgtcgaagccttcactttacaagctgctgcccacgctgcttcaaacgcctgtcgttttagtgatatatatctattctatataaagtatgtctatataacagaattcttggtttttgagaaattcatgggtagctttttatttatattaaaaataagatggtttattattaaaaataaaatggtttatgagaaatttatgggtcactttttatttatatataataaaataaattctattaaatccaacaaaaaaaatagaaaaatagggttctagattttctttaattaccgtatttctaaccccatttgattatttatgcctcttttatgaaccctat

SEQ ID NO: 317717 - DNA, 705 bp, Cannabis indica
gaagatatatacttgtgaaaaatttaagtaataactaaacgagaagaaggctaaagacatggtttccatagaacaaagttgtaaaatattggtctatataattgaaggtgaaaaggggtatatatatgtataacatgaataaaaatgattaatattattacatatattcatagttatcttgtaatgcatgatccttagatctggtagggtcaaagttaggcttttttccaatcagctttggttgaacctcttacaatcattttgctgcttttccaaacaacaatctatataaatttattgaaagaaaccaatgagagaattggtggagggtccaatgattttggttatataataatattatgatgatgatgatgcagtgatcatctcaaagtgtgtaaaatgaaattattggactagggctacaatatatattatataattatattactttagtggagagccacacatgatcatttttttgaccccaataagtgaaaaattagaaaaatagaaaagaaaaactgcatgcactgaagtccatgaaatacttattagtagggaaatttgattttctatgcttagaaaatcaaaaaatttgatttataaaccaataattaaaaccctaaaaaaactataccttttttttcaaaaccccaaaaaaaacccccaaactaaaactatctctctttctctctctatctagcc

SEQ ID NO: 317718 - DNA, 591 bp, Cannabis indica
gatagacaaagtgcctactgaagtgaatccagcagacatgggtacaaaggttgtgtccctcaataagtttaagctttgcttaagcttattagggattgacacaggttggtataacccctagtgagttcgagctaagaccctcagatacactcagacaacaacaaatatatcagtgcacggtacatatagggatttaggtggaaattgttcaaataaatccccacatgccctgtgcactgtccaagatcaatattaaaacagaatttacaaagcaagaataaaatgcctaggtggccttcgacttttatcaacctacagcaagactaaaagttagttaaaacttttaactaactctcaactctctttttcagctacaatatatataaataccatctcacaaatcaaaataaaggcagaataacaacacacagaactcaaattagatcaaggtggaggagacttactgtggggtaagtcttagagccctaagagttagggctcggatatccagcaaccaaaaattagaaaaagaaaacataaagaaggaagaagaaagagttagtgtaacgccctaatgctaaggcacgctac

SEQ ID NO: 317719 - DNA, 852 bp, Cannabis indica
caatctcaagcggactacacactttttcacaaaaggatccaatgatacttttgttgctcttctcgtatacgtagacgacatcatcatagccggccccaacattcacatacttcatgccttgcaagactcactacagtccagatttcgcctcaaaactttgggaccacttaagtatttcctcggctttgaaatagctcgagccaaaacaggcctttttttatctcaacgcaagtataccctccaacttctccatgatactgggtacaccagcagcaaaccggctaaagctccaatggatccaaggcaacgatttgatgatgttgaaggagaccttcttgacaacccttcccactatcgacaactcattggccgtcttctatacctcactctctcacggcccgatattacattcgcagtcaacaccctcagccactttatgtcttgccctcggaccacacatttacaagctcttcatcacttactttgatacttaaaaggatctccaggccaaggcattttctactccactacatcttctctacacctccgtggcttctctgattcagactgggcaacttgtcctacaactcgtcgatccatcaccggcttctgcatcttcataggtgactgccttatctcttggaagacaaagaaacaagccactgtgtccaaaagttctgctgaggccgaatatcgtgctctagcctccaccacaagtgaaatgacttggcttcaatatctcctcaccgatcttcatattgcacaacccacaccggcttttatctattgtgacaaccaatcagcaatccacatagctaacaacccaacttttcacgaacgaactaaacacat

SEQ ID NO: 317720 - DNA, 2327 bp, Cannabis indica
ttagtttttacgtatttttctttatatttttaagctaatattgaaatttaggtgtgtaattggatatccaattaaaaaaccgatccaatccaattagtaattggattggattggattttgaggtctaattggattggatcggatgatgattttccaaatccaattactaattagattggatcggatgaggaaaaaaaggttggattggatcggatgcccacccttaatcgacatgctttataataagttatagacatgttgggagacaaccagtgacaactctccaaagaaaattcttggtctttgagataattttcaaatgccaaagttgatgccataatattcaatttataatcatttaagggtgatttctagtttcatagcaaaaaataaaggatcatttcttttttttttaataaacaaatatattacaaagagtttttggcaactaaactctctaagtttgaattttggtagtaaaatcttctaaactattaaactgttagcaaatttaaggtgtcggttaactgtcactattaatattattatttaaaattaaataaaattataaaaataaaaattcaaaaatattatatttttataattgttaaataaaaatttacgtgtattaatataaacgtatcacgtgtataaaagtgtacacacaagcaattcaagttggcatttgtaaaaaatggataacatcttaaatttattaatagttttgtagtttagaggattttaccatcaaatttgagcttggagagttaagtacaagtggaattataattgagagagtttagccgcaaaaaaactctatcacaaatgtcattcattttaatatttaatttttattcttaaatcaataaaaattatcacaaatatcactcattttaatatttgaattttctttattattttttgtttgttttaacttttagattttttaagtaatttttaaattattttatatctaatagaaattattttttatgtgtcattttaatcacatttaaagagtttgtaaaaaaaaaagtaaagagtattgccataaaatattttaatacttgattacaaattttgtcgccactgtacctaaaataaaaagaataatttatggtataattatttaagtctaattctcggttacaaataaataataagtttaattttgacggtaatagtatcgaagttgtatttttgaaacttctgtaggtatattcaattgaatttttaaataaaaaataaaaatttaataatatggagcaatcaagaactataacgtgaccattaacttcacacttaacggtgaagttcaagaaatataatttaattattactatcgtctaaatttaaatttaaatatttatacgtaaacaggagttaaacttaattatttgtgcctcaaattattctaaaataaaataaataattttaatttattctaaaataaaaaaattaattttaaaaattaataaatattagttataaaaaattataatccatcaaggatgcaaatgtaataaatatgccgttttgtaacatttttatttttaaatttttaatcacaaacataaaagtaagattttgtttttaaaaaagcaaaaatgtgtttaataactacttttattttttcaattttaaaaacaaaaataaaaatatgttctctaaatttcattttatttacatttgttaattttatttaagtcgggtctaggattgggttcgggtttgaggccgagatcaaggtcgggttcgacgttgggtcaagtccgggttctaaagtctaggttgggaaaaaattttgacagcgactttttttcattattttcaaaattttaaaattttatttaaaaataaaaaaaaaaattaattgaacatacatttagaaaatattttattttttttaatttaaaaaataatataaaaaaagtaataatgtagctattgaaattaggtgtaaaatcgaaaacagactattttataattacttcttttcattccgatctctttgaattgaatcaaaatcaaattgcaaagaaccgaagccggagaagatgatcgtctgcgtcgccgtcgtaggccaccaggtgcagctctcttctgattggcctttgttttcactaatttctattctcctaagtatgattttaactcatcaagttgaaaatttgaattcgtgtagaacaatccactctacatacagagcttcaccgatgccgatgacgctctgaagcttcatcatatcgtccattgttccctcgtatgtcgttgatgagcgaggtgggtactctttttcattctttctttatttttagacattgtga

SEQ ID NO: 317721 - DNA, 510 bp, Cannabis indica
ccaaggtcaaaactgaccttttaccctagtcaaaccccggttgactcaactgagttattacctttttattcccaggctacacgtcgtttatcataaccctaattaactctaaagaaaagtctagaatcattcatttgcacacacaacacacacacacgaaagcctggcagagcaggcttcgtgtttcttctctgaagaacacgaaggctgctccaataacccagaaaataacaaatttaccccttcccagatcaaatcaaaccacaaaatcatacacaaacaataaacacgatagtgaaaaaatagaaaagaaaatggaaagagtgcaccaaattttatagaggttccccatatgttgctggttacatcctcttcgagctcgccttagaaatggatcgtttccaccataggatcttcaagatcaaagatttacaagtattaattccaaatcacaagtacgattggtaatcattttctgtttacagtgtttatttctctctctctctctct

SEQ ID NO: 317722 - DNA, 1062 bp, Cannabis indica
aatatttcattaaaatagaaaaataaagtaaaaaagactatcgtttcttaatcttcaataatgatctctttccatctctatttacaaacaaatcaaaccaatatacatatatgtgagtatatatgtactcatcttagatgaaaaaaaacaaaacaatcattacaatatgtgctattctaaattttgtccacctgacatgacatgtccacatagtcaagactgaggatacgtggaatacgtacaacttgccaataacaagacaaagtcaccttacactgcatgtcaactgccaagggttctaaagtaattgagcaaaactgtcaagcaataagcaaaaggagttaaacaatctgtcaaggccctgaccaaccatgtttgactgaccaaatgatgcatatctggccggccaaaggaagattataggttaaccaggtcttgagaataagctgaccgaccaataaggtggctatccgatcaaagaggcttgattagaccaaagaagtctgacctttgtaaggaaagctatacaaagaagcttgaaaggctaacatgcacatactaaggccgacagacacctaccaaagttgataggcacataccaaagctgacagacacgtaccaaggccgacatacttataccaaggctgataggcacatagaaggctagcatacacataccaaggcttataggcacatagaaaggcttgcaagcacatataaagctgacagacacatccctaggctgcaagaacaatacctggacgaccataggaggtcatcggccagccaggccctacatgttcgatgcatactcgattattagtagtttcagaggttagggatgatatttcgatagtgttcgatagttgcttgatatagattagtactattacatgtttgattgttacacgatgtacatttgatacaaagtaagttgtgtggtttgttcgagtgcttcatgatacatgttcgatggtacttgatacatgttcaatgatgtgtgtttgacttatacattttgtacatatttttttgtggtatttattttactttgttttaaat

SEQ ID NO: 317723 - DNA, 3769 bp, Cannabis indica
gtaccctatggcgtcagttactataaaataactgatgccatagggtatcctttactatcggttgttttcaaccctacagtatcgcccagatcagcgtcagtaggaaattttgtaaaaactgacgctaaaaggccttgaaatttgtctctaaagagtgtttttgtagtagtgtaacccttacactttgtttttgtttagttgcaagaggaaggatagaataaagtctatgcattgagtggatcaattcttaaagcacttacaagagtttcacttcttaccttctaaaatactttatcaaaatctcactttatttattttacctcatgcttgtagaatatatcatgcatcagtttctctataattttttaaggcaaattgttaagatttcactaaataaaactcaatttttatatagttattatcaatagattaaaatcatattttgaccttgtcatatactttgttcacttgtctcttttcataattatatgtttaatatataaattctgaacatataattatttataattatagtgatgtcatcatagtagaaaattattgtgattatatgtttcaaacttatttattacagagatttatcagtgtactgaattttcattgatacgataatctacgatatggtttacttacacttaggcatgtggaatgtctttttaaggacgttagtaaagtaaacttgtatcagatgtataatattcacatccactaaaataaagaaggatttttccagtataaatttgcgctgataaaattagagtgtatgtgccgaggcaattcctgctaaaattacgtggtcggtaaaataattttttctagtgcaattggtaaatgcatcgacagagtaactttacactgacactttccttcgcctagtattaaatgtaggctaaatttttattgaaaagttttgtcagcactataatgcacatgtgaaagttggcaggcttttttatttggtgggcaaaggtgtttgcaaatttgtgctgacgtaacttgtattcgagtaatgtaatttggcaggtaacggttatgccgatgcaaattatgttacgctggtaaaagttataccggtaaaactcttactcgccaaattacgttacgcgggtacaagttataattaattttaaataataacttatatttttaataagcataattaaatgaaaagtggtattcataattataattaaatagtatcgggatcaagctactattaaaatatctttgagttctaaagttaggaactaaacaaaagtaataaagtaaaatattaaaagatgtttgggaaaaaaagtcaagctctaaagttaattataaaatatatatagttttacagacgggtaatgtcatcatcgtcgttattctaaatcgggggatgacgtaatgacgatccatcaccaggagaagcggagaatggtggaattggattcatagcaggcgagttgaaactaggaacaacccccgagagtactccaactgatcttagaatcactttaggtagagttattgtgtttcatattgttgcttcatatattgagtttcttaatttgccgcttgcattgtcgttgtaaggcctcatacttgttgctcctcttttctcccaatatatgtggcagcggttaagtgcaacatgtggctgacatgggcacgtcacccaaagatgagttgtaatttaacaaaaccaccttaagaaataataagtatgattcaaagggatagctcccagacatgagcaaaaaggcccatcttcttcttccggagttaaagcacggatgggcttctccgggccagtaaggctggagttgaatagtcacttcacatttaatgttagacgtcataaaccttatttagggtgattacacaataatcaaggaagcaagtgacgactccattacgaagaatcacatcaatcaagaagggatgaaggctaatctcacctaatacctaagcagcctactacgtaggtaatgcatgctctattttgtactttctgggaacttctgcatgcccatagttggcacttaaagacaagtcaccccttttattcttcccaccaatcactataaataccccctcacaagaattagtgaggggatttgaaaaaagacacagaaacattctctgtaagaaatactctctcattattaacagagactcgtgaactacgactcattaatgcccgaaccacataaaaattacctgcattaattattcctaagctctcactattacattattcattcagttgctgaaattctttgtcaatatttcggtactttcattgagtgttgtgggaagcattgtccaaaagaagacaacagaaaatctaaggtacgatggtagaaactcgaaaccacacacaccagccttgtccctgtcaagatcctcagaacccagaggacgaagaagcagcctcacgaggaatgctaagaaaacccagaaggtattatgctttgatgatggtagctacaccgagttactggccctaaggcagaaagcagctgatcatgaggccaaactggatgcacaaaaggagcaaaacataaggatgcaagagataatggtcgccatggaaaaggctatggaaacaactggaatccacgtgcctcccaaggctgtgcctccaggactagaggaaacacaggaagagtcctcaccaagtacccaaaggccaaagaatagagagccaagtcccatacgacatccctctgaagggaaccctaagagaaatcctacctcatcccccgaaaagagcagaaaagcccaatatcagtgaaaggtccgctctgatttcccaaaagggaaagctccacaaaagaccgaaagagcgtgtcagtacatcaagagcccggggaaagagggagaaaaagacagaagcatccccttgccgacttaagacaaaagcttaatgataagcatggtgacttaagaaagcacttggaaaagaagaaactggaaataccggtgtcggaaggcaccctaaacgggggatcttggtcgagttggcaatcctccgcaaagacatcgctagggtttcgcgaagacagtagggagatgactcggaatctgactgtgaggaccgagagccttgcgctaggaacatcctggaggcggagctctttaaaatttcaagatgcccgaaatatcaatgtacacaggggacacggaccccaacgaccatctatcttgattcaacagagtaatgactgtcatgagagtctgtaatgatgcaaagtgtttgtgttttccactgatgttgggtggatctgtcgagaaatggttcaaaaagaaagaacccagatctctagattgttggaataagctacatgtcagtttttggaggcagtttttggcagcgaggaagattaacctcgaagtaagcgccttgaccaacataaaacagctaccaacaaagaccttgacgaatttcataaaaaggttcaaagaagaggcttcgaaaccaaaaaggttgacgaaggacaacagttagctttacttcaagctgggatccgaactggaacctctttttggaatgaactgcaacaggaaggtgccactagcctctacgacttttagacgatggtctagaagtacatcaactgtaacgcccgtacttttataaaaatattaattttatttacaagcgttaaacgcggaaaatcgtaatgtcgcatttttatttaatacttgaaaatgttcacaactggccagttttcgtaaaaaaaacataataattaataactaaaat

SEQ ID NO: 317724 - DNA, 689 bp, Cannabis indica
tataaatttttaagaagacaagaagtttgatgatatcaaaatttagtaattttgtcttaactagagccgacaattattattccatgtgttttattataagaatcatttaatacatatgcactctaattgagaaaaataatagtggtctattgtgtaattatttgtaatttaatttactttttatcccaaaataatttgtaactttcataacacttttcaaccaatttaccaatggtgaagactgaagacatattctcccattctttatacaaccatgactaaataatttatccaaaaaaaaaacaaaaaggaatttattcttactcatgatgtgggctggttcaaattgttaattttactttctttaaaaatggagtaaatatcattttagactttgtattttacaaaaattattaattagactttctgttttgttaaatgataaataaaccatatattttctatgtacaaataggactcaaaattaatttttattaaaataaaacttaataataatctaatctagagatgttataacaaaactggttatattttttatatatgttcgtgttaaatattttttaaagtaagttatattaaaaaataaaattttaaaaattaaactacttttataattttaaaaaatataagatttattttatcatttaacaaaacagataatccaatta

SEQ ID NO: 317725 - DNA, 791 bp, Cannabis indica
aattaatatttgggaaagaattaagttttcctttttaaatattaataagggatactagaagtctacaatatatagccgaaataaatgttatatttatgatttttatcaataaatatgtgatattatgtttccttattataaatacaataccgtaagaaaaataaattaataaatcacaccaaaaatggtgataaaaaaaagtgctttgcttgcttatgataatacaatatcaaaataatcaaatcacctcaccagaatagccaagtctcccaaaaaaaaaaaaaaaaaatagcttttaattctattcaattttgatgaagtacttgttatcaaaaaaaaaatttagatgaagtacaaactaatagcaataaaactattcaaatgccgacgtggcgccgtgtgtgaccgagtgttccattcggagacagagctgaagtttaggcagttgtagcatacgctctccacgttttcccacgcgccttctcgtttcaaaccaaccacccccactgccttgttcctacatcataaataataatattcccactctttcaaaaaataataataataataataataatattccaaacactagagcacaacctatcttccattgattcaccaaacaaaaaactaaatatatattgcatttgagtttaacatgagataggaatatttatttggtctaattaagatttttattccccgaactttttatatgtatcaattatgttctctgaatttgtattgtcgttaaaataatcttctgtaactattgagtatgtttagatttt

SEQ ID NO: 317726 - DNA, 903 bp, Cannabis indica
aaatgcataaaaactaaactatagttaagttttcttaaatttttttttcaaaaatttttatttactcaagtgttataggatctatgagattaataaataacaagtaaaattgaaaaataagttaattggatttctttactgttttattatatatatgaaaatataataattttttaatatatattataagtagttggattgaataagtactttttaattggattttgaaagtgctattcaataataaattaagctaattagaatttaaatattcacatccaatccattctaattgttattagattcaacattttgtaattagattaaactacattgatttgaccctagatataggcaagttaggtctgtacctagggcccactcattttaggagtcaaaataaaaaaaataatttttttaaaaaatatacatatgtttttaacaatttttaaaagtaccatttatctttatagtaagggtccaattttttttgcctatagtctatttcaacttagggccggccctggatgtaactataaaaaatgaggaaattatattgtaaacccactttactttacatgttttaattcttacattcatttctatattttttaaaatatacccacttttatagataatgtcctcattatagccttagattaatgcaaattatgtgttagatttaagtagagggcgattgtgtattggtcaactcactcataaaagtgagtatattttaatgaaatatattttaagcatatttttaattaattaatggataaaaaaaaagagatatttctcaacttatctcactataaattggtagggtaagttgaaaaatactacttttattaatcaattaatcaaatttacctttagttttatatttaattgaaacatacc

SEQ ID NO: 317727 - DNA, 560 bp, Cannabis indica
acgtgagattattaaataactaaagaaactaagtggtaaaattaaaattatgttatgagcacaaggcccataacaaggtctgcatagtgcatatggccttttctgttggtaaaacataaatgaagaggtttcaactattttgaggtgacaaagcaaaaatataattaattgttgagagtgggatttgaacccacgccctttcggaccagaaccttaatctggcgccttagaccaactcggccatctcaactctttgttgatatgtttcaaaattatatttttgatcaacaaattcttggcttcattttttctcttttcaatttagaaaaaaataattatgatttccctcaaacacaattgcgataatttgagaattaatgtgatgggactcgaatcttagccaagaaaatagttaagttcctaaaattattgcatttaaattatatctttttaaagtatttttaaactttattttaattcttttacttattgttgaataacttttatagtgttataaatattaataattatgtggatgtctaaatcttttatttattacc

SEQ ID NO: 317728 - DNA, 1510 bp, Cannabis indica
gtttcagtttgatcattacacaggcagcatagttcactaacttgtaatccatgcttaagcaatctctcttttgttttcaatctatttaacatggctaaccataagataacactatgtttggggatattcaatctattccatacctcattacaccatttctgtttagttccaggaggagaaaagagtacataacctgctgcaattgtgtattgcctctgctggaatgctgctgtatcacacttcagcttcagctgttctttgatggctaccagctttttccaatactagctggcatggatagaggctgtgtagttccaccaatcttgatccttaaggtatacactatgtatccacctttgccataggctgtcccgcttgttagatatggcccaaatgtatttacaaatagctgctttattccattcttctatctttatgattcccaaaccacctgctttttttggttgacatatgttttccaaactttattgatatattattaaaattgcacaaacttctattttacaggtggtgatatgttagaaagttcaatccagatataagttatcataaaaattatatttcatccaacgaatgaaatactctactatcgatcaagtgttggctactagaatttttttacaatgggggtggagccgctactgatggcgatgatatagctatggatccatagttctagttgctctagtttttgttctctccccttaattttattacacaatggagagactcgttgttttaagtttgggggagaagacaatttgtatgttttcaatttttagtttttttatttttttctctgggtagtttttattttttctttaatactattggtgactatactaaagtttgacctatgaaatttgatgatgaacttatgctaaactctttgatatcatttagtatgtgcaaaaaatttgtggattgtgtttttaacctgttatgcttgcttttgatattcttatatgagttatgtatcgttctacttgttcaaaatatatattatgattttgtatgtatatgtagacttggtttgatttggttgatattcagataatactataacttgtattattaatttgttgaagcgaaatcctaaattttggttgtgtagagatatgattaaggccaattttgttgaatcatttgagtcaaaaagctaatcttgattcattaacctttgttgtcctattttgagcttaattttttctaattttattctttgttaaaaaatctatattatgagctatagacttaaacacttatccttaccttaatttacaccataaacatagaaagtttttgtaattaataaacaatatgatctaatagggatgataaatttttatgagaattatttttgaaaagtaaatatgccctcatagagttataattcaaggaaatatgtgtttatagagttataatttatgttcatagagttatgttgaaaaaaagttcttttattataaaaaaaacttcaaaaaaaaaa

SEQ ID NO: 317729 - DNA, 1208 bp, Cannabis indica
aaagttgaaaattttagtatggaagtaaaaattcttttttttttggtaagtaagaattttattgcaaactaccaactttttacaaaaaacaacaaagaacaactaaacacaactaatgtgttgtacttaaactatcaaacctttcaatatcctctataacattctctttaatttctgaattgataaaatctaaaacaaatctctcttttaattctatttacaagaaaattcgtagtataaattcgagcattccacaaagtattatttcttgcatcctaaatattgtaaaccaaggcatttatcaatgtaatacacctctcttcttattaacttagacctcctacaccttttaatccatttcagactatagaccaactcacttttctgaagctttataccaacccaatcacacagctcataacagatcattttactataaacacaattgaagaagaggtgttgatgagttatcatatcccattcacaaaaaagacaactatccgagtcaatgacaccaaatttacaaagctattgtctagtttggagtcttccccaacaggccacccatgtaatgtgtctatgttttggagtactttgcctattccaaatgatattaatccacctcatttcaaaattctcttctggtcagattttggaggaaatgttggggatattgaaggtcatattcttgaactctatagttcctattttgctttcgataatctccttgattataactattttcctgtagtaccaactagaactttgcagagcgttataaccccaccaatcttgctctttaatgtagactgagtgaacccaaggaacccaaagattatcttttttatggcaatatcccacacatacttgctaatagctcccatattccaaacatcaatgtttctaaggccaagaccctctttatttttttattgacaaactttatgccaagcaacttgccccggacaggaggagtatgtttgtccgaaattctgagactaggggtggactattttgtagtcacaaggataatataaagtgtttgtttctataaatgccatattccttgaagatgactatataaagaacttcaagccacaaagtaaagtagtactagaggaaatgttttcagaaataactctttctaatgttccatctgttgggtttttgtgccctaaataaaatccattataatttgattagttatc

SEQ ID NO: 317730 - DNA, 1962 bp, Cannabis indica
cttgagatcgaacctaaccatgccatgattgagatccatagacctaagatcaaccatttataataattcctgcatacaaataaggaagtaccggttgtcagatcataactgtacattatatctagatttaaggggaaacttcctacaacaaatgttatgcaattaattaatattaattgccgacaatcaatgtacacattgttgatcaaataaatccaatttgattcacctagtcagcaggtcgtcttctctatgggctggctttcatgagaaagcccgagaatattatttactgtaaaatccctaataaagggaatgggaaaacctaatgtgattctcaaactattaaaaaataccccattaatcttatggattaagggttgaacgctcttgtaaactttgctcaggcgaacttgagaacatacattttgtgtattctctaaggcatttacaatctaagagtttactgaataatactgactcatggactaaggctagttaatgcctctacaacattaaaaactatttgtctcattttatactttctcttgtgattatttattcttcagttcttatttgttttattctgtttccgaaaatctcggtaaacaccatgcaattaggagtgacaacaatgttgaagggatgacaaattttctcacttaaagaaattatgccaaaatgtaatctataaccaaaaatcctagaaataaaaatgacttgtggagtgtttacccaaaaactaaccttggtgatgtggaaatcattgtttgacatgtggaaagaaagaaaacatcccaaagttgagtagcctagagtcatggccctagccctgcacccaagttgactctaagaacaccagaatgggagtttggatcttgccaagttatttccaactcaccatctttaagaattataaaccaagaagacaagcaaaaatcaagtctaaggtctagaaactgaaaagagaggaaatagcatcctaaaagtcgacccaggcttctagggttttcacctagcaccaaggttaacaatctaactagggtttcagtttttgggtctgtcttagtgcaaatggctcaaacttttaactttgacatgaataagacctatcatgaatatatttgaggcactagaatcagaatcagaatactttccatgttcagcacctatggcactaggaacttagggccctagtgcacccaatgcccaagttggcatattatcgacctgtggtgcttcaaatcacaatattgaggaagtatcccaagaattttatttgtctccatccaaaacaaagaatagagagcttttgggcaagaaatagatctacctggtggccaaaacaaggacctagcgccaaggttgacactttgtcaacctagagcatttccaatagcatttcaaaagaagtcttctaggaatattctctatttttcttcaatgattaaggtttggatgcttttgggaaacaaagagattcatctgggactgaactaggacctagtacccaggttgacattttctcaacctaggctatttccaattagtttttcaaagaagtcttccaagcatattctctattttcataaataactgagatgcaagtgtttctaagagtcaaatggaacaatttggtggcaaaaagctggacccagggcccaagttgacacttatgctgggcttagtgcccaggttgacattttgtcaacatgggctatttatagtcattttgcccaaaaagtgttctaggcatattttttgtaagtagaaataatgatgatacaagtggtctcaggaagaaaacaagatcctatggtggtagaaacagagacccaatgcctaggttgacatgggcacttttagccaaagacagtgagtcaaataataagcgattgaataatataattaaaagagaacaaaaataataaagtaaaacgaacaccatattttaaagaggtt

SEQ ID NO: 317731 - DNA, 967 bp, Cannabis indica
attaatcacgatttccataaacctcgttgattagcaacgaactgcacagtacgtttaaaaatcacgtaacacgcctggtctagttagggtgttacattcagtcaatagatttgaaataattagtgcacatcattaggattattggcttgaaataataacatgagaaatttaaattactagacagattccacacttcaatcttatacatttgatatgttagtccatctataaattactagacagattcgtttaatgtgtgttggcgtctatcaacatttagaggaagaaaagaaaaattgaatatgttaattatatgcattagcactatggtgtgcctcaaattaaatcaaacaaaatcacctaccacaactaaatcaatgatctctctgccaaaatttccaagggaaatatacacaacaaacaaaccttgcagccatctcataaaatgagctacaaacaagttaagatatggccctttcaaaatcgagcctttcttttcctagcagtgtattttgtgtctgcaggtacaatattccctcttcttctcaactgttccttcttcttcagtatccattccctgtccttcccttttttcattattctttgctttttcaacggcctgtgcctgtcagaaacacatacctgcaaacgaaaacactaaatcagctccatccatgacctaacatggctaaagaacaggccttaaatcaggtgaccaaatgcattaaatttttgcatagagataagtagagcaaatggtgttcagtaaaagtttacagtttgattttcttcatctccgctgctatcgtcgtcttcagagcaactctctccatccttgcctggtcggccacaagaaagaacaatgtatactttctttttcttggcactgtttttgaaataatttttagtcaaatttagcagataatgagcagaggaaaaaactatggtctcgtttggtaacactttt

SEQ ID NO: 317732 - DNA, 1071 bp, Cannabis indica
aatcacgtaatacgcctatgctagttagggtgttacagctgcgaaccttaatagtaactaggcaccttaatttggaggacccccccaaaaataaaaatcccaatttgggagttcaaattaacaataatataccagcagttgtgagagagtttgaccatctcggagataaaacatcaaacccaactaatgataaaggaaaagtcatagcaggtgatcccaaaagaagggccattcctgcaaggcctacacaagcaaatcccaaaagaaggcccattcctgcaaggcctacacaagacaatcccaacctttggaaaggaagggctgaccaaaccctagggctaggtcacctgaacaatccacaaaggaggatcccacatggcaataaaacctgtgcttaggcacggtggcttaacgcccagggaaggaggactcacccaaacacttatgttaaatagtgagaatatattgaggatttagcttttgaagaaagctgtaatgacctcatattagaatatagattagtaaaggcaattatcattaattattgataattttataattatttatgattttattatgttgtgggtctctgtaatatcccgaaaaataaattgatattttaattggacatattttattaaatatgtggttgtatgggtattagagtaggattataatcctacttaaactaattatgagttgattagggaactatgaattaatgaataataaagcgtaatttattaattacggagattgtattggaatatgtgggtatcgtagataccataatttgaataaaatattcttgggcctggaactgtggaacttgacagggaggtcagaaaagtcacgataataaaagattaattgaattgaattgaaattacaatgaattagtttaaaaattttaagttgtcagtttggcggattatttgtaatgaccaaaatacccctagggtggatttttaggctttaaggttttgaggggcaatttagtcttttcttagaattgttattcttgtctttagtgtgacttttgggctgagaaagaaaaataaataaatataa

SEQ ID NO: 317733 - DNA, 856 bp, Cannabis indica
ttgacaatgtaaattatttaaaatttgtgtgatgtcctaaattgttaggatgtcatcatataaaagaagttagattaggattttcttaaagctgtttagaaaatattcgattcgatccaattcgtgcgattcaatctaatttaatccgcaaagtgttgatatccgcgcttgttcgaattagattagatggaaaaatataaaatttgcacttgtgcgaattgaaagttgatttacttgatccaatcctttccatatttataaagtatttattttatatagctataagaaaataaataaattaattaaaagtatatatttgatgttaccattgaagatgctctaagagcaacatctccaatgggggttgtctataaaattgtttttgtcacatatgcaatgggatcatcattttcaatgcaattttatcaacactattatttatatttggcaaacaactatgtaacattactttatctttatcttcttttctttttcaaaaagaatactttatggtattattttatagtatttaataaaatttaatcacttaaatagtgatatgtggaaccatagtgggcaacttttaaagttgtcaactattaaagtaatttttgtatgaaaagttatcaaattttgagtggatgagagaaaaaaaaaataatattttaagatgatgtgtgcatttttgacaactataagtattgcccttattagagatactctaaggatatcttaaggtgtcaaccaacataaaaagtcacacatagggatgcacacgtggagaattagcggggagtgctcctcccgtctccatccacgttaaggattttaatccccatctccgcttatttcccat

SEQ ID NO: 317734 - DNA, 786 bp, Cannabis indica
gagagtttccctagcacttctctagaattattattgacaaaattggagaaaattgcagttttacaaacattgagtatttatgccgctaaaaatattattggatttatgtcacttaaaaattcaaaaaattgggtactatgctacgatttactcaaaaatcttattgtgattttctcttactgatcaaataagtcatcccttgttgtgttatctttatatccaaaattaatgtcaccgtactccacttgatgtaacaaataattaaaacaattcataattatttttaatttgtgatcattattaatttttaatgcaattattatttgaataatataatactttttgatggtaacattattaatttttaatgtaatttttatctctcggtaaaagtattccaaaaataaaagagaaaatataaatagatttagagagtgattgtatttttctttattacattaatttagtttctcatttttttattcaatacttttgtataaataggagttcatccatcctaattcttattaaaataaataactgggaaattctcattcagtttcccttttcctcttcatcttctttttttttttcttacatattttatattatttataatacgttatcaacacgagtctttatccaagttctcaggtaaatattttgttaaagttcttgaattgtttcaaagtcaaatacactaaatatgtatttatatatatactcatctgactgaaacaatttcaagaactttttttttgcttttttatttatatacctatatat

SEQ ID NO: 317735 - DNA, 1041 bp, Cannabis indica
cacatttttatcacaattttttcaaaaatcagcttttagctttttcaaaaactgtgccaatcggtttaatactatttcattattgtgttttctaatttttttttttaatttttacattatttacaatattgtaaagtgatcattctattaattatgacactttcttactataatttataattttaatttctataaacccaaattaatatataaatgtaatacttaattatacttttaatttgtttaaataacttttattatattaatattgtttttctttagtgcatccatccaatgcacaagtgcacattaattttatcttctttaattaaagtcaatctgcacaagtacaaatataactaaattggatgtgactgtatataggattatatttgatggactatatcttgaacaccccttagtttatgttctcatatcaagtgtaaaaagaattgaatgaatttaactcggtaaacaaatggcgtcaattacgccttcactgatgccaagcagagagtattctgttatgttatactggtcatggtcaagcatcaataagttgactgcagtgactcccaacgcctaacttttacaagtccttgccgccgccctacattaatgtcattcctataattacaattatacattatatttaacccaattaaaaaataaaactgaaaaaaatatcgaatgaagattttggttaagttacagactgtgttgttttttttaagacgttttctaactctactcaaagtgtatacggtagtctaacaattacggcattttaaggataaaacaacttttgtacgaagcgtttggcaccaaacgatattgctctattacaacctaacaaaaactgctctaagaaaaatcataaggaagaaaagaaaatttttctgggtttgaaaatacgtgttattccattattctgatacaacttatacaaagaaatcgatcaaaaataaaacggtaatgtgattgtgggagatgttggtacatggcagaaaaaaaacgaatcattgactgatggcttttact

SEQ ID NO: 317736 - DNA, 1012 bp, Cannabis indica
tctttcttcatagaatattcagtaggcttctcattaggaatctcttctttggcttctactgtgtcttcaatttcaggatctgttgacttgtcttctacacccccatcaagtactttaccactcctcagtgggatggcattacattgttcttttggattgacaactgtacaactagggaaattactctttttcttcataacactcacaacattggcccattgtcccacttgcacctttatgttcttcatggaagtagtaatattggacaaataagtctctatgttatccaactttgcttcattcttgttaaatctcttgttggtctctatcgtgaaagtacccagaatgtcttgtaaggacttcttctcttcttgttgttgtgcattaaacttaggaggcagttgcatgacattttcagtgttaccataagaaaatttctcatggtttctcaacctcgaatggtagtagttaggaattagagcatgtcggcagttgttattataaggtctgttggccatatactgtgcttaatctataccgacctcaggccattgtcaatcagttcaaagaaagaagcacatcattcaaaaggcccttgaagcaaaagatgggaagattttcgtatcgaaactctaactagtgttcatcacgtatcttagggagattgggcaatttttctttcatgagcggttggctgatattgatcaaagctctagtacgaatgaaagagccccatccttcatgaagagagtattcataaacgtcaatgtattctccaacccattcatccacctttttagcaagagcttgagatttactaaggaagggaagtcgatgagtctgaacccagaactgaactctagataaatccgcctttgagacattatgcagaacaattggtgagtgcaaaacaacaagattgttgttgaagtgccaagtttcaccaacgagaatcctatgtttatctcctgcacaaccaagatttaataaaaataaattagagtgcatttca

SEQ ID NO: 317737 - DNA, 837 bp, Cannabis indica
ttttttccctatattttatgagaaattgaagatatttttgctatatcttcaatttgattttgcaaatgatagaaattataagaatggaatcataaattaatatttttacttatcaacataaatccaaacccaaatatcaggttcataggcctctccagttaatcacctacgtgtctattatcaaacaagcctaaattaactttatcaaatatcaataaataaactgaaacaatataatctgctatgatttttccaaaaaaagctatgtacacctctcttttaagttatgattggtaaaaatagtttccttatagtataagtgcaatacatgaggattgatagaaatagcctatatgtatatataactaatatatatatatatatatatgaatgtctatatgtatttggtttctaccccaatgtgattttgttaaagagattctagagaatacctttctcaacttaaaggattggtattggtccatttttacaaaagcttatgacatgtttgattgcactctgattttttaagagttgaaccaataataaatttataacgaaattgataatggtagaatattgatttctcgtaaaataactaaagagatgagtttatttatttattatacacaacactttgttttaaagtagggttgtacataaatttgtataaattgcctaattcgaacaactcgttcaaactaaaccgaataacccgacgaagaatacaagccgaaaaatttgatgaaaatataacctgcctaatctttaaattgagcggattaaaaataatactgttgaccgaggttttcggcaactaataaaatattataaagt

SEQ ID NO: 317738 - DNA, 2831 bp, Cannabis indica
gttatatatataattttgaaaagttattaaaaaccgcgcgaagcgcggtactattctctagtttattatatataaagaataatagttgcacgtgcaattaatatcactttattttcagcactgtatactattttaaatttttttaaaaattttacaagtaatcctatacagctgtaatatatgtgatcataaaaaaactttactaaaatttttttcttacataccgaaacaaataaaaaaatttaccgaaacaactctttaaaataatgtaatataaactccgcctaaggtaatactagcatcatagcatggcgtgatttagtaataaattccacatatcaagacgatatgtcatgatgttctagatctagagtggtcgtgcctttaacatttttctcattataattcattcattaattgagtagaatttctccttgtttttttctaactctttgaagaatgagttattttaactcaactattaagagtactcttcatgatagtgatggtatgattatgatacccaattcatttttttttttttgaaaaatacccaattcattttgattgaaaagaacacgaaaacgatgccttttattttcttggcatagtaaagcttctttatgaatataatactcactgttactaagaatccaagtgaataaatgaaatgtctttcttggtaagactaagacatgaaagcgatggtttaaaatattttaagaaccacatgtttgaactttcggattatgtatgacttttgcacaaaatttatgatattgtaggacagttctaattactaattaatgataataattactaattaataattataatttatttttcccgtatactcactctcaagtgttgttattttacattaatagtatctagcactatttaaaaatgacattttgccattagttagtaataatttacaaatgagaaatgttaaagggaagtattagtgcttaataccctcctatgtgtcaatatcgttattgatccaattaagtatcgagtttcatatagtttaacataataatttttatagagtatcactaactaatcgcaatgcgatatgtggagaaggtgttattaggcaccactaatgcttaataacaatactctttacaaatatatcgcattaaaattatataaaatctatacttcattataataataacttgtaaatgatgggccttttagtattctagctacatcactctcgtttttggattctagctacaccaccaataccattagttgctcactctaatgtcataacaattgacaactcataacaagtgacaactcactataaaaatatgattagcctaacattatttgagataacacggttataaatttaataatattataattattaaattaaaattattgaatctcttggccatgatcaaactcaagtaacaagaacagagaaacaagaagaacagagtatagaaggaaagagaaagaaagattgaaaggaaaggaaagagagagattgtttaaccaaagatcaatcttattgaataggtaaaatgattgtacatgattatatagtgacagattgaagcttagaaagagagaattagttacagtaggaataacaaactctaactgaatcttgataacaactaacgacaataacggtcactaacagtacagaccatatacccttaacacggcccctcaaggttacaattcaaggcttctgcagcagtagataggtcttgaattgtgagcttggaacaaaagaggggaaagcgttcactggagattgctttggtaagaccatcagcaagttggtcaatagctgggacatgcttgacatgaaccagtttctgcagcactttctcacgaacgaaatataaatcaagttcaatatgttttgttcgtgcgtgaagaacaggattggctgtgagtagtatagtgctgagattatcacaccacacaacaggtggtttagagagttgaatttgaagctctgtgaagagagagtgtatccaggttatttcagccacagtattcgcgagacttcgaaattcagcttcagtgctggaacgggaaatagtatgctgcttcttacattgccaagccacaaggttgttgccgagaaaaatggtgaaaccagaggtagatctacgatcatctggatcggttgcccagtcagcatcacaaaatgcaacaatgtcgaggtctggtggtcgttttaaagttaaaccgtgagtgagagtgccactgagatatcgcagaatgcgtttcacagcaagccagtgagtgaggagtggtttgtgcataaactggcagaccttattgacactgaatgagaggtcaggtcttgtgatgagtagatactgaagagctccaactattgagcgatataattgaggatccgacattggttcactaccatgagcagaaagacgaagaccactcgtcattggtgttggagatggcttggcatcatgcatttgagcttttgcaagtaagtcacgagcatatttggcttgagatagatgcagaccagttggtgttttatgaactgcaatgcccagaaagtagtgaagatcaccaagatcttttaacgagaatttgtcattgagtgcagcaatcagatttgacactacttgagggtcactcccagtgacaagaatgtcgtccacatatataagaacaagagtggtgaaggtggaggtatgttggatgaatagagagtgatccgatttggaaggaaagaaccccaactgaagcaggcactggtgtaacttgtcaaaccaggctctaggagcctgtttgaggccgtatagagctttgtgtagttt

SEQ ID NO: 317739 - DNA, 915 bp, Cannabis indica
aaaaatatatacatatatataatcttcttaactgagttaatcgagttaattcagattgattacacgagttgatattattttcaacccgtttaatataaaaattagattacacgagttgatttaacgtatgttgacggtgcttataattatctattatttttaagttatacacgcactacttacgtaaatttagttggcagattttctgtctctatgggctatattgttggacatcagctatctcattaattaataataccatactttttcttaaaagttaaataaaacaaaattatacacgcactacgataaggattatataaatgattaactaaaaaatatctatttaaatattatcttttccagaaggaaaaaaatttaaatttaaatataattagaaattaatattaaaaagatatatattactaagttaagttaatgtggatttacaaaaaaaaaaaaaaagttaaagttaatgttacgaatacgatttccaaatagaattatttcttattttgatttaaattaaattaataaaattaaaaatatttacatgttttaaatttaaatttaatttttttttatatataaaatatctacctaatatttatttttaaatatatataataatattataaatttaattaataattattttaaatttaatagatggccttttattagaacagatatatattcatatcaatcatatcatcaataatttagctttgagcctttgtcacctacattcatccaaataacaggtctctgttctattctccaatccaatggagaaatctgggtatggaagagacggtatttacaggtctctgagaccacctctacacctccccaacaacaacaacctctcaatggtttcattccttttcagaaactcatcttcatacccacaaa

SEQ ID NO: 317740 - DNA, 995 bp, Cannabis indica
ttaatctatattattttttatgaaaataaataataatttaattatatattaatatttttaataatatattagatataaacgattttttggtgtcgcatgcattaatcctaacccaacctaaataaaaatcgtatcattcaagttcaactcaatttcaactcacttctattttttatgatccgaagccacaataattcgtattaagttcatgtcgtgttgttttgtcatgaattaaattgccactcctaatattcaacaacataaaaggtgtgcttgcacattagttacactagttttgtttttttttttcataaagaaagaaatgtgattgtaccaccattatgattgaaatgagaaaagacaacattatctttgcttagaaaattatatcggtatagttgaaaatattaatatttataaattcattgaaatatcagatatattttcaatatcgacaaaaatttagaaaattactattattgatatttgctcactataataaatttgatttttaattacaatgaaatgataaagtaaaataattatgactaattataaattattatttttatattgtgactaaaagatatttttagtcacaatacttattatgactaaaactaaattagtggcaacttatatcttaatactatgttttaatcacaaataactttttgttaggactaaaatcacatttaactacaaaaaatttatattgtgaataaaaaattatcactaaaagtagttattttttatagtcacttgaaaatataaaatttgatcataaactaataaaataataattataattcatataaacataattatatttgatatacactccataagaaaatattaataccaaattaaacttttaaggttcaaaattattagttacagatattaattctctgcaccacttcaatttaaaatgttgcttattttttttttatatacatatataataaataaaaaaatatttatgaatattttaa

SEQ ID NO: 317741 - DNA, 3626 bp, Cannabis indica
cgcaccgcaaacacccctagtaggagtgataggttgctgaggagcaatattggtagtgtttgaaacaacagtttcaacaccagtaacaacagtgacatctggagcaacagtgatagagataggtgctgtgtttgtaagatttggtaagttggtagtatactgaacatgagcattaaacatgacagggtttggagtggaattgctgggagaattagaggagttgttagacatagatggtgaggtgaaatgtgtgatgtttttgtgatgcaaagactcagcatatggaaagcttaactcatgaagtacaacattgctcgacatgtatattcttttatctttagacatgcatttgaagcccttgtgagacatgctatagcctagaaagacacatggtgttgacctgtactacaatttatttttattgtaggtcttaggttaggatagcatagacatctaatgacttgaagtgcgctataatctggtgtagtgtggaacagtttctctaatggagaaaggtttttgattgtagcagtaggcattcgattaatgagatagacactggttctaaatgcttcatcccaaaaagacaaagggagaaaggcttgggcaagcaaagtaagacctgtttcaactatatgcctatgcttcctttcaaccaccctatttttctcatgcgtgtgaggacaagctagtctatgaacaacaccacactgttctaacaaatttgtaaaggctctgaattcccaccccaataagattgtaatgttttgattttaaatccaagttgcagttacatttgagtcttaaattttgtaaatgttggtaaagcctcatctcttgttcttagcatgtatatctaagtgtacctagaataggcatccacaaaactaatgtaatatctatagtcattagtagaattcattggagtagggccccaaagatcagaatgtagaagttggagtggctcatgataagtagtagtggaaaataaaaaaggtaacttgtgatgttttccaagaaaataagctgaacataaatttgcattagtttacttagaaattggtatattataagaggtgagagccaattttacaattttggcagtagggtggccaagcctactatgccataaggaaaaattggaattagaatgatgcaattgatgattaagatagtgagagacagatgatttgttcagctgtggtgagacattggatgggagatgagtgaaatttgtgggagtgaacttgtaaagctttttttcaagcttcctagccaacaagatcttcttggtaccctgttccataaccaaacaatgagaggggtgaaactcaaaaaagacattgttatttaaggcaaattgagagacatttagcatatttttgtgatcaagggaacatgaagaagattatttatggacaatgtatgctaggtgaaaggagagattaagaaggatttacctatgttgtcaatgttgagatcagtgccatttcccatgaaaacttattcaggaccagtataggtgctggtggaggcaatattggatgcatcaggtgttaggtgatgagttgctcctgtgtctggataccaactgtcatctgcaacaatttttgaagtggcaacataggcttgcattttaacaaaattggcagcaagtgacatttgattgaaagattcagggcttgtgaatgtgtttgtcaaacctgtaaaaacactgttttgtagtgtgtcccatcttgtgacatagttgacattgaggcttggaatttgagggagtttgctgtccacgacaagtatgaaaatttccacgattttcttcgttattgttgccacgccctgggttgagcatccctcgattcatttgttgcatcatggttcatatgcttgaaattgagagcctcgattgaaaccaaatggcatttaagctccaaagtatggggttctatttggaaaaacaaattgggatggtctgatgtgagcaagattcgcctcacttttgttgatgtccaaagctttagcattcttgtctatgcgagcggattgagccattagtagagcctccatttctggtacggtgtatgcatctttcctggtagtaacagaagtcacaaacacatcgtattcagcaaggagaccattgaaaagggcctcgatgtgatcttgatgagattgtttgtgaccaattgtggcaagaagatcaaccaaacctttgatctttaacatataatcgcttaaggaacctgtcattttggtgtttccgagctgagtcttatacagactgatgttcgcagcattaagagctgtgtagttttcattcaaggtggtccaaatccgagttgtggtgacgcatcctaccatgagatttgttgttttctcagacatggacgataaaagccaagacacaagaagattgtcatgctgttcccaatcttcaaattctggattgactttgtcttgagcttcatcatcagcagtgagatactgtgtgggagcttgagttgagtccaggaatttatgaagtttgcttcctttaatcgaggcaagaacttgatgtttccacgaaaagaagttgtgttcatcgagttttattgatagtgagtgtgtaaacgatacatgataggatcttggaagaaaagcttgcatttgattctgaccttgagcctggttgaatcttgaggctccaccatagttggccgtttggtgctccatggctgtgaacgactacaactctgataccatgttgagttgaagaagaatagagggaaagagagagaacgagagataagagaattcagttattattgattgaaagagcaagctctgctttatatacaatgtacaatgaaataatagaaactccaactaaccaagaagagttagttacaaacatttggtccctaaccaccttttgtatcagtaccctggacaaaatctcaaacatggaattaagcacaaatatagataaattcacaatcaagaaagaagaaataataattatcattaagttaagaaataataatgtcaataaacattcatcatctccccaatatgactttagttcataatctccataatcaaatttaaaacaaaaattaacatagaaatcaagagagataagaaagaattagtgtgtgatcttactctgggtagccacaagtgcttcctctgcctccttcttcagttttagggtacaattcctgagtatctttcttctaaaacacgagccccttcaatagaaattaagattgctatctctgaatgacgaaatttaaaaaatgcccaaaattctcatgtttagcccatagtcgtgacttcataaagcttagttgcgaccataggcaaaaccataaaaatgagctttttgtctatgcctcgtagtcgcaagcatagtcgcgacaatgagaaagtgtcgcgaccatgaaaaagggtggtcacgactactaaagcatacttgacaactttagcagatttttctctaatttgccccgtcttttcaacaattgatataatttgaactataatgcctcagagatttgaaacaagggaaatcaagcgtaaaactattccaaaagataacattaacaaaaaaaaaaaactgtaaaattgacctgaaacttaggctaaaa

SEQ ID NO: 317742 - DNA, 1152 bp, Cannabis indica
ttttttttattacatataataaataaaaaaatatttatgaatattttaaaaatatcaaagattgaaaatatccataaatatttcagggtttcgttcatgttttctattcacacgagatatggcttcctcaaggatgcccattatacaataagctcatttagggcgaagacgtacaagtctcgaatatgagatctaggaaggttgacacattactctcccaaaaagtagtttggcgggtccttcacacagatttttcatcccaggagtgaaatcacgtgtaagtgcatgtcaggaacttttgggaaggtaagggggatcaagttaggttccacactcccagactcggaggctcaacatatgagtatgacaatcaaggctccttatctcagtccttataacaaatactacaacggacctccgtgaatacgcgaagcattgtccaggatcgctaactatctctgatgcatccaatgtggcgcacctctgacacaatctcacaaaatctaggcagttgtcccctgttacgacctgagccctaggctgtggcagatatgtaatattcacaacttgggtggtcaaatgtcacactttgacccttgttgaaaaataatacttacaagcgatccttttgtttatattacaaaaataaataaaatacatatttaaaataatagaataactactattacaaatgaaaaataattataataaaataggaccactcatcaatatacatatatatgtagaataataatattcccacagttatgtagtcaccaaatgattggattcaataattaaaaaaaacactaaaataatgttaagcatccatcatattcctcatccctagttgttaatagctatttaaatgatacaggctaggggtgtttgtggtgcggtggtgcggtttttgactattttttaaactaacccgcacatgcactttttctaattttccaaactgcacccgcaccgcgaaactaaaaaaccgcaaaatcgcaccgtaaaaaatggtgtgatgcagtgcgattactgcggtttggacaatcaccaaataattaaactatcacaaatacaacaaagtttgagcaacacttgtcaaaaataccataaggcttgaaataaatacaaaaaaaaaattaagttttaaca

SEQ ID NO: 317743 - DNA, 1119 bp, Cannabis indica
ctaaaggaaacttctggaaatccaacggtcattttagctttacctactcttctctataaatagcctctaaactcctctaactcataaactcatcaaacaacacaatacaactattttcagagcactcagtccccaaaagaatcactttctctctctaaactctcagtttttctctctataaatggctcgcgtaagctttgctttgattgcagcaatggcagcaatgctagtagtctccaccttcgcccaatcaccggctccttctccctcagtacaaacaccaaggaagatttctcctgctccggctcaatcgccgaccacaacggccgctcctgctccatcggtgaccgccacaactccggcgactgctcctactccatccaccgatgttacatctccaccatctccttcaccggtagccgctgatgtcccagcctcatctccatcatcgatctccgattctccttcaggctctccttcggcgatctctgattctcctactgatgctccttcaccagctcaaaacggcgccgcttcggcttcgttcactgtcgttggatctatggtggttgtcgttttggcctcagttttggtgatgtagagagttgaatagaggattttctttccttttcacgggattcgttgatgtttatagatttacattgattgatatagatctacaattgattttttaattatattattctttcttatgtaactatttatttgattcaggatttatattattatgattttcgttatcatctttattagtgcatcagtatgaattgataatttttttagctagcaccatatatatatatagaaataaaactacagaacgatagtataatacgtaagacttttacatttaaaagaaaaaatcgtaattttttctgagcattaaaaatgaaagatatttctgcaatttttttttgaactaagatatttgtaattattatttctaatataccctacttcatctcttttttctttattggtagaaatagcctaatttcagctttttctttctatttttaaatacaattttagattttctgttttacaaaaattactaattggatcttgtgttttgttaaataaaaaaatggaccctgt

SEQ ID NO: 317744 - DNA, 1159 bp, Cannabis indica
tttttaacttggtatcagagcggatttgacgcttgtctatggctactcctggcgattcttcatccaccacagtcggcaatgaagctgctcaaaatgctcctcatgtttcagtccaaaatgtcccagttgcagcaacctctatccctacctttcaaagccttaccccactgtccataaaactcgaccgtggcaactattccttctggaaatctcaactccttcctgctctacgtgctcacgatctggaaggatatgctcttggctcaaaagtctgtccaccacagtttgtggacaatactgtcggaggtccaataccaggagaacctcgacaactcaatcttggttatgcaaactggagacgagtagatcaagcaatcatgagttggatgttaaactccatctctgagaccatgttcggtcatgtcgttagatgcacaacatctttcgaagtctggaatacccttgaaaaactcttcaccactcagtccaaagctagaatcctccaactacggtttcagctacgatctctaaagaaaggaaatctttctattcatgattatgttttaaaaatgactggtttagctgaaaatctttcctctgcaggtcaacttatctctgataatgatttgatactctacatccttggaggacttggacatgactatgatcctgtagtcataaatctcacatccaggcctgactacccatcactgcaggaggttcagtttctccttcaaagtcaagaaatgcgactggaacaactcaatgctcctatcctaaacgatgttaatcccccaagcgcaaactttgctgctcaaaatcgcaggcctcctaattttggtggttcaactggtcccaataccaatcaaggtcgtggctattcccctcgtggtcgtggccgtggtcgaggcggtagaggcaacaatcgtcctgtctgccaactttgtaaccgtgttggtcatgttgtctccaaatgctaccacaggttcgacattcactttcaggctcctacaccaggttccaaccagtctaacccaaaccagcaagcatcaggacaaggtcaacatgccttttactcctcttccattgatgctcaacaagaaaatgcatggtacatagacagtggagcaaccaatcacatcaccccagatggtcaaaa

SEQ ID NO: 317745 - DNA, 926 bp, Cannabis indica
agaattcacatcccgagccacatgggacaaaactgacccccgaaagtttagacaataaagctatgatatcctcaagtagcacacccagctcattaaagaagtcccttcctttatttacagctgtgaccagagacaacgaatcagaaaaaacctctttaattgagattccgcatgaaagagcccaattaagtctaactaaaagtgtcaaggtctcagcttgtaaaatagaaatacgacctgaaaacacaataaaaccagaaactccacaatgacaagatatgagtagatactatagacataaactataacgaaaaacaaaacccaaattaatgatgaaactaagacaataaagaaaagacaaaggaaaaactagccaaagcgataaccctatggctagtgaaagaaaccataaacactcaatacaaaacattttcctcaaaatgagcaatccacataaggcttgacacatcaaagccagatacaaatgtgctcaaaaaattgtattatcaatgctaactaatctttctaaaaacacttatctacattatataaaacaccaccaaatagtactcaaacatgaagctagaaatattttaaaaacttgtacacatcaaaaagtttgctttaaagttatcccactgttttaaactttaagatgttagcataaaactgacctcacccttttagcaattaaaatataatagcccttaagttaactgaaacatgtaaatcaagacctaatacggttcaaacataaaaccatttcatgtacaacgtgtcgaattctgttcaaaactttaagctagaaaatttaaaggcttatacaaattgaattttccttaaagttaaagaactgttgcatactgcaaacctcaccttttatcttttaaaaaggtaatagcccctaagcctactgaacttgtatt

SEQ ID NO: 317746 - DNA, 870 bp, Cannabis indica
aataaattatttttttaaataaaaaaaaattatatcaactttagtttagacatagatatgcgagagattttctttaattcataatttgtttatgttattaattaattttgttttgttattctttaataaattaaattatttaatataaaacaatataaacaaataaaatatttaaaataaagggtaattgaaaattttaaaattttaaacacatctaccaattactcattcaagatatatatatatatatatattttgtaaaataaagtgttccatagataaagaaaattagacctcgcggtcattacaaatgatagaaacatgtatggaggaagactccataatacctgtaaagttctgggcgaactcccatctagccacataatgagcaacaaaattaaaaacacgagacataaaagaaaagttacaagaaagaaaatacttagagagttgaataacacaaagatacataattatcaatattccaaatatagtgcattcccttcagcgctttgataaccacttctgaatcactctccacaaagacatagtcatgtttcctgagcctcgccgtgtccaacgcaagatgacacgtggccgcctcaccgatcagagggtcactgaagttaagacaagacgtagcaacccacacaaccgctcctgagtgatccctggccagggccgcaatgcacatagagtctccaccaactttaacatcacagttgattttgatccaatcctccggcggaggcgtccaagtaggcgtaaccacaagaagcaccggggggaacaggtaggaggcataaactgtataacaatggaagatagagttaattacattcacaatagtatcctgagtcgagttatgta

SEQ ID NO: 317747 - DNA, 625 bp, Cannabis indica
tctgattattttatattttaacccaattcatttctttcattgattattctgattctaattacagtttattagccagcgtagactaccaagaataaactttctttcgtgggttttaccgttcacatagatcattttttcttgcagttgaaaataataataaatttgtttaaacatatttcttattctcattcaatatatttaaataaataaagtaaagccccttttagccgaggtgccatgggagagtggtgctggtgcatgcgtttgacttgatttataatgtataaaagagtggatgcaggtaagatatttagaatcaataatttggacttttaccaacttttgaaccgaatggtcacaaatagtacactaaaaaaatatcctagtgtttgatcatataagagtgcagctcacaaaattgtaggcacaagagtccgccactacctgttgaagggaaatgactaaccatatatatatatatatgaatatatatatatgggtacggtcttaatgggtattacccatgtatgggtattttattcttgatcattggatcaaatatctaatggttgatatttataatcattaattaaatattaaaaaattaatatttcctattttgtta

SEQ ID NO: 317748 - DNA, 835 bp, Cannabis indica
aaagagttttatttagggcataaaacccaacaattttaggacagctcgagttggtgaagtttgggatcataacctcaattcagcacctatgtctcaagttcccaactcagtcggtagggtaagaaccgtctgcaaaaaccaagctgaagccaaaaaatgttataatgtagccttaaagcagtagatcctggcagtcgggaaccagccggtcgaagaagacaaattagatctgcatgtaggtgcagaaaaagtactagagctaatgcaggaaacagaagaaattcaaatatgtgacacggagccggtgaagcttatttatataggaagaaatttgaggaaatttgcagcactctttaagagttcccagatgtattttcctagtgtcacaaagatatggcaattatcgatccaaaagaaatcttccacgtattgaatatgaatctggacatgcccgtaatgcagcaaaaaagatgtcttttggatcctataaactcgaagtggtacgcgaatccagtcttagtcccaaagccaaccaggagctagaaaatttgcatagatttcactgatttgaataaagtgtgttcaaagattgttttcctttgccaagaatagaccaaatggatgcctactctagatataaccagattaaaatgcacattgcgtaccaagagtacacgagcttccgtaccgacaatagagtatactactatttggtcatgccattcgagctgaagaatgccagagctacatactagaggttagtaaaccagatgttacggaatcttttaggtcgcaacatgaaagtctacgtagacgacatgttggtaaaatccaa

SEQ ID NO: 317749 - DNA, 934 bp, Cannabis indica
ttttttttttttttgtatctatacttttccttgcaaattgaaatggatatcctttctagagctttcaggaagtatgttccttgttcccctttcggtaccccaagtgggtttttggtccacccagatttgttttgtggtggtacttggtgtgtttgctgcgatatttgccctcatcatttcacctttgccctcattaattgcagcattaatgattctgacgattattatcctccaaatctctcatcaggtgagactttatcaagcatttattgcactttgccctttcgtttccttctttggctacgatctcctcgactctcccctccatttattctctttgagtccaagtatcaaatcaaaagccaaatcaaagacacattttccttcattaaaatggcggcgattcgaactgtggaagatgatgatgcttgggagaatggaacaatcatgaaacctatagatcttagagctagagctatgatcagaggcaagccaagaggtattcttcacagtctagtttattttctctataaagctagatttagattttatttttctgtacttaattctctctgttctctcttcgttaccatagtcgtgcattgttctagttcagtaatggattcctttaattttcatcctccccaacctctaattcttacccctgatgaaaacacagcttataccttaaatgatatacttgaagaatatcctaacagtatcaatctcctcctgaagctttgcactgtcaaacactttagccgttcctctctgatcaacactctatctcaaatttgaacttcccagtgtcgttttcctataaccgtctctgaacatttggatggcctcttccttgttacctttggttgtgagggtgataagtgttaggttatttttagtattaactttagattaagtttagtatatttttaat

SEQ ID NO: 317750 - DNA, 2161 bp, Cannabis indica
aaaatgaaataaaagaaaaaaaaaaatcaatacaataattatctttctaaaaagtgactgatatttatattcacaaagataattttataattttactaatatttttttctccattcttccaatttcacacccaataccaaatgatataaagtagagtaactaccatcttcatccttcctacttcccatcctctctaatctctccattccttctattcttcttttttcctaccaaacatagcgccatcagttgcaacagctttagagtccaaccattatgctaatcaagggattatctataatttacatcaatatttacccaaatatccaaaagaaggtgttctgatacattttgtaaccaaaaattaagtcaatcaaaatatcgagatatatatatcatatcaaaattgagaaatattaaaaatgcaatcgatgaaatgttgagttaatgtctttgaagtaaaataaaaaatagggaaaaaataaatcattctgttttttaaatatgaaatgttcataaaattaaaggctgtatctcagtcctccatccaaattgaaagaaaaataaaaaaaatatcataaaaagaagatgcaaaagaagaatgaaaattctacaatacatctttctaaaagaagtgtaccgatgaatccttatttaatttgacattcggaaaaaatgtgtagcttaatttttttaaaaacataatttaacacgccgaaaacaagattcaaacagtctcttgcatacgtgactcttttattttataagcgtgtgaaataaactgtttaaatactgttttttatattgtaaattattttgaatttcttaaaattttgtaagatgtcttaaataactataacacacgattataatattaaactaaaaattttccttaatgccgaaacaaattttagaagcacagttagatataagccaattgtcaaagttaaatttggttagaagccaattaagagaaagttcttttatttttgctggacttttgagacttagcccaaaattctcacctcaattcataatgccaaacatatcactaagatttataagtcagcaggcagttgaggtctcaactttcagctcacgtactattaaataggatgttttatactttagcacacttgtgtaaattgaaatgagaatgtcactgtatagcgaccacgttcattttaagataattatgtagtatgtaactctatagatttagttaaaattttagaatcttagaggttgcttggttgtgtttcaaatttcataattgtgttttcaaaagtgagaatagaaaacaattttttatcattttaaaaatttaatggtatttgacacaagttttttaaaactattttttattttttcttactaaaaacaaattcaacattttaacaccatactatgacataaacccatcctactcgggactcgacgtgaacttgaaccccagcttgaacccgaatccagacttggacgggcccagacaccgtgccccgaaccccaaacccaaacttagactcgggctcgagcctagacaccgaacctcggaccccaaaccccgaacccagacccctaccctggactcggacccgaaccccaaacccagacccggcctcggaccccgacctggactcggaccctaaccccaaacctaaccacgaacctggacccaagctcgaactcaaatccaaaagtcggggctaggtccggcgtccgagtccgggtctgatgttcgggtccagatcggggtttggggtccaaggaccaagtctgggtatgggtccgagtcaaggttagagttggggtcggggtcgagggtctggggtttgggtccgttatccgcgttcgagtctagtgtgtggggtcgggtctgggtttgactccgaggtccgggttcggatctagttctgagtctagggtctgaatatgtgagcaaaaatgtaatatataatattttagaaaaaaatgtttttaaaaattgaaaacaatttttaaatattttctgttttctaagttttttaaatgaaatttttacatgaaaaatcacttttgcacaatttattaccaaaatactcacacacgcctatatcaacttatttacttacaatgttggttttattacacaaataccacttagtcatcattccatccatca

SEQ ID NO: 317751 - DNA, 2539 bp, Cannabis indica
gaattcatattaggttgttaataaaacatacatggtagtaaatctagatcctggtaaaataatttccaacacggacccccttcaaattttgatatgcataaaagtttccagttcttctaatgtattttagacccatttttggtttaatccccactgaaggttttccatcatcgcgtctagttggttgcagtgatattttgaaaaccataaacaactcattgcatatgtatgaatcgattgtgtcgccgctttaaagaacttctttacctccaatggagaaaagtttttcattctaagcattaagcagtttccaaatatgctctttgatattgctgaaaagttcttttttgtccctgctagaataagaaggaagtttaagatattgttcgtggcactcacttattggcatacccaaagcctcgtaaaaaaattctggacagtcaacatcgtatttggaaggaaggacatgattgatttttgagtgttaagaaattgacccgaagctttgtggtagatatcaagaaccctctgaatagtaagtgctgaattattggttgcatgacaaaagagaaggttgtcatccgcaaaaagaaggtgtgacattgatggtgcatggcgagtgaggcacaatccttcaagatttccaattgcttcctcgtgttgcagcaccctagagaggccttttgaataaattagaaataaatatgacgataacgaatcaccttgacgtagtcctctctttggtgtaacatccccaactacctcaccattaagggagaaagagaaactggtagatgataagcacttcaaaatcaagtcagtccatcgagcattaaaacccccttttttttacaactacaatgtatatccactccactctatcaaaaactttactcatatctagttttagaaacctatttttccttgtgtcttgtgtttgagatgatgaaccaattcaaaagcaatgaggatgttgtccataatgagtctttttgtgaggaaggcactttgagttttcgagatagaaaaaggaagtacttctttgaatcgaatgactagcactttggagattactttgtaaatgacattacacaaactaattggtctaaaatcacccatcccacttttttttaacttttagaataagagtgattatagacttgttaagcctttccatgtcgtggccattattaaggactcccaaaaccacctgtgtaattgaagaaccaacaatctcccaataatattgatagaacatagccgacataccatcacattttgggcctttgtctggactaattgactgtagagcaaaataaacttcaacacttgtaaatcgttgtgtgatagttgaatttatttcagcagttatcgttgttgcgattgtagaaatagtatgagacagagctggaatatttataggagaggcaataaacagatcttcaaataagttaaaatgattggagccataccatccttcaagctttcaacaacaccaacaacattaatcaaggatttgatcgtgctatttgctttgcgagacgaagcatggcatgataaaactttgtattttggtcaccacattgagtcaatcaactcttgatcttcgtttccaatacttcttcctgttcgaaaagatcatcgagaacactctcataatctttgaattctgtcatggtagcatgtgatcgcgtaggttcattatttagtgcagccacctttttctgtatttgtgcaatgttttgcttcatatttttaagcttttgggtatgccaacattgtacagattctgtacaaacttgaagattcaacataaagtggtccacaacctgatctgaacccgggcctatccagttttgcttaattaaagcagtagtttgtgcatcatttaactagattttttcgaatttgaagcgtgtttttttttttgtggctttgtagctgaatggattggtataacttgagcactaatggcacgatgattcgaatgatagtaatccaaatgttgtgtgatcataggctaaaacggagaattccatttgtcatttatagaataccaatcgagcatctctttgattgtgtccatatgatgtttgcttttaatctaagtgtatggatcttcttcaaaaggcaactctaaaagtgagcaatagtcaagggcgcttcagagattatccatttacaattcattccttagaactccacctattttattttgattggaaaggacattaaaatcgccaatgaccattcatggaattaatggagccacatcacgtattccttttaaaacaatccaagtttctggtcttttgtgaattttaagtgccccataaaagccaataaagtgccaagtagagtcattaccgaaagccatataataatcacaaaaatttgcattgaaatttaaaatagttacatttacatcatccttccataagagcagtatgttagaatttataaaatatttagaaatacaaattatcacagatttaatcatatttctaaatagtactttaatataaaaaaccctaaatca

SEQ ID NO: 317752 - DNA, 683 bp, Cannabis indica
aaaagggataaagggccatttactactatttccttttttttaaacccttgttctctggaattatatatgatgacatataaaaaattttttgaagtcattatatctaaactaaaagcttgttgtttgccccatttttatgaaagcctattttttttcccatatactggatgaggcctgtttcataatatgggttgtgctaggcctaacctatatttcaaaggttaggcccagactgagcccgtgcagggcttaaataggtctatcgactagagaattttctaacgaactcggagtcttagtaacaataatcaattaccaagaaaaaattagaaatagtaagcaaattaaaataacaccaagagttatagaggttcggcccctttggtaaagtaatgacctactcccattttacttgtattgatattgagataatattctgcatatcactaaggaagaaagtaaattttggctacaactctaaggattcttaaagagaatattgtgtagagaattgctcttagagtcgagataataattttaggtccctttcctttgcgaatatgttcacaatttataggaaatagggaagtatatttaaaatatttgaaatataacaatccctcttttctatgagagttacaatctttttgaaactcctatatttttgggttgaagagtcgaat

SEQ ID NO: 317753 - DNA, 1920 bp, Cannabis indica
cttgatttttttataacaatttagaggttattcttgaatagagtattcttagatagaggttctactctatattgcatttcaaaaaatcttggttatatattgcgataacagaataattaattgattattaagatgtatatagataatttttggaggtaactaaaatatatctcaaattatataatataaaataattttttttattaaaatgcaactaattagtttgtaattaagattttttaaggtattttgtaattaatttttattttaagtattgttatattcatatttctagcagcaatatggtgttgacacgtgtaacatagctggaatacaaaccagctcaaattaagcatcaataaatgcattcagatgaatcgcctcaggaaatacatttgacagaaatactcaaactcaccatcatgtaagtaatagagagatatgagtaataactatgtgccgactgatcggaccagcgagatgaataaatccatctcgggataagcataatacattataaaattatttggaacgggtagataatgagttttgtagctcattgactcacatgtccgtgaataaagacaacttcaatatgattcatttcgctcttgtcaggatgtaataagcatctcgcgtatacctcactcaacattaatggaagagcgagagatgtactacaacatacacataaatgctggcttacgataaagtgtctagaaaagtattaatgaattgtgagaagtatgaagcatagtcagcataaccgtctataaataaagacaaaaagtaattatgcggttatttataattttctcgtgtgcataaatatgaaatgtggggattatctacattttatgaacggttacaagtgataagatctcaaggaaataaatgttatcctagactcctatataaatagggacagaacccaagaaacaaaggatcgatcatttttttttggaaaaagagataatattttctctattattcattttgtaaaacacttaattgtattatagtatacaatttatcaacccagaataagatggactcgtggactatgaagatttaacttcaaaccacgtaaaaaccttcttgtcacttattgtcattattactattattaatattgttattttattaattatggagatcatttattacagaaaagacttatttattagttaacgaaaatctgtgttaacagtttagtgtactcattgagagccttgtaataaaaaaactcaaaaaaacaccctccttgaaaacaaatttgaatcatccactcatggtagatgatactcctaagttcatcagaaggtctccaaagttattggagatgagaaattattggcttaaaagaaactagatgaaaaagcagaaatggaagagatggcttattacacgatcttcatgtatatgtccaacagtgtgaggagaaagtttgtcgcagaaaagatggctaaaggatttggaacagcttgaagaattctacatgaagccatcaattactagcaagattaatttgctagaaaatttatatagttttagaatgatttcttctctttctttagatgatattattgacagttttaatgagattattgtaggattggctaatataaatcataaggttgatgaagaaagccagagcatcattttgttgagatctctcccaatcacatatcaaaaagtcaaagctaccatcaaatatgacagagatgtaattgtgttggaggatgttcttaccgcactcaaatcgaaggattttgaattacaattgtaaaaaaaatccaagaagtaagaagtatatttggcaagagggagatcacccaaaaaagtaagttcgaagagtaaacaccatcatactcaatcaagatcaaagtctagaaagaaggaaacttgaaagtgttactt

SEQ ID NO: 317754 - DNA, 1336 bp, Cannabis indica
cttaagagagccatttcagatcctaattactatagtgatctaagtggtattatttctggtatcaatgcaattaaaagaggagtaagtcgttactcgctaactaagagggtcgaacctctataaaatctaatgtttatttatttttctattttaattgtgtaatacatgataaatattagtattaaattcgactatgatgtcgtttgactaaatgtgaggtcaacatctttatttttacaatttataatatttttagttcttaattatttaatttctaaatatcttagtaaacttttagaaaaatgttattattggaaatgctctaataaaatggtcacacctgctttagacaaaaacgtgtctattgatttatttgttagatagtgataattacaatttttgtttatatttttttttaatttatagagatgactagtgaagcaccacgtgcttcacacgtacgcatataaattatatatattgtgttaaattatatttatatttagtgcggcgtttagtaataaaataaaaagaaaagaaaaaaattttcattctatttttttatttagttgcatcttaagaaattaaaatgttctgttctcattcttattcttaccaaatactatcataatatttagtgattttacgagaagactttttataaaacttaagacctaaataaataatctttttgtatatattttgaaaagtataatgtatgtattatatttttttatggagaataaacataactcttccttaatttttttgatttgttttgtaagattttttatttaatacaatatattattttgtcaaatatttaaatattattatttttaaaagcaaatgtttaaatattattagtaaacttataatgtagtatatatatatatgtttgtctactataactataataatttgctattaaaataaatttaattcttaactaattaaattttattgatttttaatatttcaaccattatactaaataataacaccttttaaatttattacaaaattatggtgaaaaaatattaagataaactaatatatatatcatagattttaatatatttacaagttatattaatttaaaggagtatgtaattcaatgaaaataaaaatctctaaatattattaatgggatgtaatcaatatatatcatcaatatatatatatatatataaaggaaggttttaaggagattgaggtggcatcacacatgaagtattttctatattttctattttctcctatttttttcttatctatatatctatatatctaaataaaggaaagtataagagcattgatgtggcatcttttcctt

SEQ ID NO: 317755 - DNA, 878 bp, Cannabis indica
tgctccctagactttgatatctaccaaatcatgcccctcgaactttcacatgtactaaatcatactccctgaatttttatctatattaaactttttttattaaaattggacaaaagtcattaaattcaacaatctcaatagttcagggggcatttttaacgaccttaaaaatttaaaaatcatgatttagtacatatcaaagttcgggaggaaaaaatcctaattagcttttatattctatttttctcacactataaaaattgatggaaaataatggacatgtactcaggcgtaaataaaataaaagattgtggtctcaaataaaaattcaattaatttatttaaatatatattttattttatttatttaataaatataaaaagctcattctattctatccactgagagtgaacaaggaagagcacaaactactatcttctcccatggcttctgcaacaactatggcggtctccttccgacttccacattcaccattttctcccaccccgtctcgactcacttccacctctgttcgactcgcccctttcaacaaagccaactccttaaagctcagctcctcgcaaaccatttctggcttcaattcggttcttccccacaaactctccgcagtcactcctagccctaattccccgcgctctctcacaattgtcgctgccaaaggctacaaaatgaaaacccacaaggtgaatttctttcttctccagtaattatgatcgtaatttttttgggggggttggttagcgaattgggttctgtttggttcgtgagaaaacgtgggaaaatgaagatgttgaatgaaatttgaaaatttgaaatctttgtatgtttttttggattaggcttcggctaagcggtt

SEQ ID NO: 317756 - DNA, 684 bp, Cannabis indica
aaataacaaaaatggcaaaaataagaatttaaacaaacaaaaattaaacaacattgatgtataaaggttcgaactttccctcacaattgtgaggagcctattcctctatctctgaactccctgaaacttggttcaattcatccattccaatcttgatagtagcttaattactgacaatactaatataagcatcccaatctctactctgtacacttacaaaattcttctctaattctttctgatctgttctctcaaactctctttctctaattttcagaatacaagtgtacataaaaggaaaactaacatggcttgagaaatcgagtaataacttaattgaaaaatagtataagactaaagaacttaactaattaactaactactaagtggactgcataaattttgaatgaacacgtggcataaattttagtgagagttgatccaacactcttaatataaaccattctaacagcatcatctataataaagtgctaaaaatgtatactgtatagttatatttgagtgcacttcaaaaaaaaaaatattctaaaaggtataaaatttgacccatataattattatgattcattaattattataaaaaattatattaattctttttttttatcctactattatgattttgatttttttctttttaatttatatttagtgcattgaagc

SEQ ID NO: 317757 - DNA, 2485 bp, Cannabis indica
gtataggtgcggatcggataggatcacttgcccgcaagggatatggctctgataccatgttgagaatcatggggttccatctcaaaaccaattggcaatgagtggagtagcccatgttcttatatatggctcaattctctaccatttattccatgtgggacaatgtccacaatactcattaatgctattcatacataatgggcatatagattatggttctccctaaggctgtcctaaagaagataaatgatatttgtagagtattcttgtggaaaggtactgttgaaacaagcagtccaggatatgtctcttggtctaaactttgcaaatcaaaaatagagggaggacttagtttcaggaacaccttgatatgaatgaagcagctcttagaaaatcatttagggtattgtccaaacaagaaaatttgtgggtgcgatgagttcatagcgtatatataaagaatgcaaattggtgggactatcaatcaactacagatggcaactggtattggagacagattgtgaagattaaagagacatataaaagccttcaaaccttgtagcctcttctgggaggtaattatattatccatcaaacttataagcacctttgtggagatcaaaatagagttaaatgacatagagaagtctggaatgatgcaatataccgaaatacaagtttactatgtggtgactattcaagatagatattgtaagctagaaatagattgatcagatttaaagtttgtcaagatgagtcctgtctattatgtggagctgctatagagacaattgatcacatttattttgaatgttattttagtaacaggtgcttaaaagaggtgttctcatggatgaaatgccagggaagaatttacccattaaaaacactgctcagaaaaatttatcgggttaagctctctaagtttaagaagaaagtgataattgcagagatagcgagcttggtgtatcagatatggataaatcaaaatgattgcctttggaatgacaagatgcaaacaattaaaaattgtgttcatcaagtcaaagaaaatgtaaagcatagaatcaaaagtttggatggaaaaacaatgtcaatagaggaaaaggtgtggtttaattcattgaaagtgattagcttgtaattgattagtttattttcaggtctcaaatggagatgctgtttagtttgtaaatggttggttttgttgagcaatacaagtatctcattcataaataaaaaaattagttcaattttttttcaagtacataatttatttaaaatatattgtaaaattttaaaaaattcaaaatgattaaaatatagaaaatataaaaaataatgtttaaatagtctagaaattttatagcctggttaattttttttttaaagttctcaaaactttgtaagatattttaaattgaattaaaaattatgcccaaacaaataggagcccgtgattgctccatataattttccaaaagttcatactttattttgcaattaatgattaatattgaacactttcttaatctcgaaaaagagttcaaacaaaacagcaaacgcagcaatgatgttgatgcattgcaaatacaaaactaactgtaagacccaaacaattaaatgtatttacagagagctgaaacaataattaaacttttattctaactgaaagtacaacccattaaagcaaataaaatcttcaaaaaaataacattatatatacatatgcaataataagaataataatgggggatcagattcaaaagaaactataggtagctagacaacagggtaagatgcatccatggcaataccacaaagaccttgtttctgacccacatctctttgaatcctgacataaccctcttcaccccaattcgtgccccacgaattcttaacaagccagtatttagtgccctcctcctcgtccgtaccataaccaacaacggtgaccccatggtcaagtgtggtaccgcaatcaccagtgaaaacaccagaggagtagaattggaagtattggccccctccctcgatggccacggatacaggctggtgcgccacggccttgaggagctcggcctcgctgttttgggggactgcttggtagcccttgatcttggccacgttgtacaatctctttgtggtggcacatgtgctctgttctgctttgtatgggtatgcgtattcagatgttatgcctccatttttggctatgaaattgaaggcgttctccattagtcctcctcggcatccttggtcgtctgggtttgtgtcacagtcaaggatttttgctcagatagggagattagtttccctttctttaattttgtgattccctctgttgctgccaccgctgagaacacccagcaactacctgtgtaatgtattattattactatcatgcatttcttctatattgttatgtaattattggatctataatgtgtatcagcttcgcaattttattattaagacaccaaaa

SEQ ID NO: 317758 - DNA, 1495 bp, Cannabis indica
tttattcttaaaatataattgcctaattagtttattttgttattttaattttattaaattataagattaaaaaatgataatgaaaatatctatttgcttattttcaaattattaatcttattagatatttaatttaatttgataaaatgatttaaataaatctagatattttaaaattagtttaattttgaattttgaaaagatattttaggattgagttatcttgctacaggttttgaaatatccttcggctgaataactacttgaggccagtaggtattgataaaaattaggattgagttaattaaaatgtacctgccaacaaacaaaaggtttcgggtgctccaagtgcaaattctaagcgtcattttctccaccatacacccacaatttaccttggtaataagttagttattgatcttcaaccctaaataattgaaaagtaagaaacattttttaaacctagtcattttagtcaatttaacccaagtctcatcttgcattgaggctccatatattggtgatttaccttatttgtttgcaataagaccagagctctctgagaatagttgaaaaattttcaacagctgaatcaaagtctcctttgctgaataataacatatcgtcagcgaaataaaagcgagtaaccctcaacccctcacatcttgggcaaaaactaaatttttagtgctcgatcactttgacaaagatccttgaaagatattccatcctaatgacgaaaagtggaggaaacattggatccccttgacgtaaacaccctcttgtaagcaagatatccagtaatggatccatttatcatgaaggagaactgaggagttgtcacacaagtcataattagctctataaacttgttggaaaaattaagcgctactaacatctcttgcatgaagtcccaatctagggtgttgccctctattattttaaaaaatcaaaatggttttgttaacgggaggtttatagcacacacaacattaagatttgtcaaaatttagtgaggtattatgatagattttcgcaatgattttctccgatgatttaaacaaaatttttgaagaatcatgccttttaaagaaaattaatcatcagtatatagtaaaatttcaaaaactaaagaaattttatatattatcctcattattacatagttttagtactacaataattaaataacatattttttacattttaattctctctcaataataacatttgaaataagattttacataatatttattagaatagtttagtactcttatgccttttttgaaataaaataaaataatatgtaaataatggtaagttcattaatctaaaaagttaatataatgtcataaaatatgcattatgtgtataatatacttatacacataatatcaatactactcatgtcataaaataatataattataattatgttaataactatgtgtatatatatccttacagcaaaaaaactatatgtatatataaa

SEQ ID NO: 317759 - DNA, 684 bp, Cannabis indica
tgttaccaaacgtcaccttaatattgctacactttcaagttttttttttttttcaataatgaattataagattcttttatttaaccattattacaattttatttttgggatggttgccaaacgttaaccttcattattaaaccaagatatttccatttttaaaagtttatctatatgaaagatgatctctggctgctatttcctggtaatgatctcaacttgtattttaaagaacttgttaagttgagaagtaatattgatatgcaggctatgattgcggctggtagttctgggaagttcaaagtgaagtaatatttatatataaaaagaaatttttttctgctttaaaatcaaaattatgcaggatcgagaaaaatgaatgtatcaattagaaaataatttttcttattcgccccatctaaaattatcttccggcttcgtccctgcaggtttattttggcacgtggtggataaaaaagataacgatatcctgaacataaggtctaggcgacatgttgcctggtgcaatttttttaatttagatctgaattttaaaacgtcatgttttctatcttttctcggcctacaaataaaagaatgatataattcgacttctggggactagagagagatagaaaataacttttagatcagaaaacatattgaagagcaagagagaagaga

SEQ ID NO: 317760 - DNA, 2932 bp, Cannabis indica
cttttatggtatgtttgatatttttcatcatttaattgtctttgtttccatttttatcttaaattttttaaaaagggggaagttgtcttgggctgatcgcgtggggtttaatggaccctattttctttttttttttggtttctttagagtttttttttaaaataaataaataaatataaaaaagtttttttttattgcttccctttttagttgcaagtcaaattttttttttctaaaaaaaggtaacttcttggctgatcgtgtgtaatggtggtgttgtttttggtttcccttttggttcaattagaaaacggaaactactttatggtaagtttatttgagaaaaggtacgtcttgtcttataaatatttctcacccacttccttttgtctacacgatttcttattctcttcttcattgtgtttctatcacaacaatctcgtgtgagtgtgtttgagttttagttttttttcaaagagaaaaatgatgaagacccaaagaggataatcatccaaggcccctgctgcatctcaattgcgatcatctccatctcctctgggttccattttgacttcactgtcgcctgcaactactctaatggcctctattggtcgcaccaccaagaccaaggctcgcaagaaggttttttctctctccaataagcatccaatggtgtttccaaaaattacttctgatcttggagtcgatgcaccaccatctgaagtggtggtgccatctcgagtcaaaaaagttggctcttttttaattgaaccctcgaaggtggctaaggcaaagggtaaatctagttcgtcttcgtcaaaggctgctggtgctactgctgggcttctcaaattgcctatgaagccaagtcaatcaaagaaaaatgagttggccccaaaaggaaaattaattttgggcacatcgtcttctccatctgctataaagaagaaattaaagactcatcctccatttccatctccatctccatcttctactgagtctgaacctaaggaagaagaatctgagtccaaagactgatgagtttgatgaatcttttccagctcctattgatcctgcattagaatctgatgaatctgagtctaaagattttgctatttctgttccagaagcagaatctgtacctgcaccagttccttaaccattgtcatcaaaaggttaaggcaagaaaccaatcacttcaaaactcattctcttttattggtacaatgataatgctcgtgacatggttatttatgcacaaatttcttgttgaaagaaattgtatttgagtaatcattgtccatatggtgttcttaacattctttaagagaggaaatgggcaaattctttgtttatttattttttttttttttttattgtggataggattgtttaagagttctatgcaaatcattctaactctaccatattttgtaaagtgtttgtgagaggtcattggttctttttttctccacaagatgtagcaaaggctttgcatcttccttctcttgctattctaaatgaagaggagagggaacatcttgacaaggatgaggttcttactgagactgtgggtcaaaagatggtgtggcctcaaaattatgttatctcggtcgccaatctcactttcatgtatcttgtgcttcacaagtttactacaataaattggaaaccgacttctcacactacaaccatctcttttgatatggcctcattcttgtacaaggttagaactgagcatgatattgatttggccacggtcatctatgatcaaatcatttgtttttggaaaggtaataagaaaaacttgaaccttccttttccttaagttatttacaaaattttgagtgtgcagagaagtgatatcaagacagagcaagaggatttgatggcttcttctactgctgcatcttactagacatcttctctgattcttgatactattgaagcctcatcatctaagaaatttaagcctcaatctcttgtgtttgccgtagatgactttcctacagaagcctctgttcaaactgcttcagcacctgcctctgcagtactctttggtgttcgagcttcactggattccttgattgctctaataatgaatcttgacggactctaacgctcagattcttgatgttgtcaaagccttgtctaaggccccggaagcttggtttttttttgtcctgtattttttgtctccattcctaaggacattgatactttctttagtcttaggcttggcatatcaatttcttttatatttttggtactgtggctgctttgaaagacacaaaaggggagagtagatgctcaaaaacttgttttattttgatttgtgtaactctagaccttcttattttgagagagagttaagttttagtttatttttcatgtttgttataagttatgcatacttgcaggaggagttcttctctttacttatttctaacatgtgtgttgtaggtttttattttatttttatttatcaaattgccatagggagagattgtaaaatcctttactagcatatttgataaaatagacaaaaataatatttgtggtattttcaaaattagttttaattgtttattcatttattattttcaaaaatatagtttccttttcttagtgtgaaaaggctttcaaaatcagattctattcccttttgattttgtgtgaattaaatttgagttttccttatttagaatatttgatattatcctttgtttttatgaaaagtcttaatcatattttattcattttatctgatttcttgaccaagaaactgtgtgttgatgtagtcaaagttgccttatttgtttatgaaaattttgctaaaagactgtccaggttcattgtacctatttgaacggattgactgtctgttcaaacagattttgagtttcctttttgggaagattttcatttattg

SEQ ID NO: 317761 - DNA, 755 bp, Cannabis indica
acaagaatccttcgtgctcgaattcttccattttatgcatgttttaattactctttaatcaaactcataatatttattcaattaccaaaactaaattatgggttggtagctatatatatttattccctttttgtttgaatgaataatatatattgtattttttcaaattaagagattgcatttaattggattttttgtcccacatcttttaaactaatatctatttactattgcaccttaaaaaaatctatttacaattgaaaaaaaaaaatctatatctacaatcaaattcgtgtatttccatttcagttcgcgtctcatgtacgtgttcttaattttttttttaattcattacctatgaattagatgctataaaaattcttacacgttttttattatcaatccaaataatatttattgttgtacaaaattgatataaaatacttgcatattttaataaagctaaataacaatataaatacttaatgttttaagtttgtaagtctcataaacctaatatgtatttttagcgacatatagatactcaatatttataaaattataatttttttcttgtttcgtacagattccgctttttaaatttattaaatgaacatttaaaagtaactcatgatatatatgtttctgtctaaaccacatgatctagaatttgagcctaatatatgccctgtttaagataataatactgatacaagtagaaaaaaattacagttttacaaatattaagtatttat

SEQ ID NO: 317762 - DNA, 839 bp, Cannabis indica
aatataaaatctacacttagtgcagattagatgtactatgagcaaaatagtacggattggatcagatgaacacccttaaattttattatattttattcatttcaaatatataatataatatatacaaatatccccatataaaaataattattaaaatctaaaataattaataaaatttatttagagcaatgaatagtactctataatgtagaagaagaatagtgtattttaaagaaaccttataatgaaagagtttagagcatctgttgtagcgtatttttagtatggttctttaaatgttttagaacttttctattttagagaagctattgtgagtgctcttaggaggataatttgctcaaatctcaaattagattgcttagtttattttactatatatttcatttaatttttaaatatccgcaaaacattatttaaaataggacatttgtctaaccttttacactaaatgaggttattttgctttcatgacccttaaaattttaaactttgatagtggaaccaataatttaaatgtgtgtttaaaggatatgatcaggtatgttcggagggtaaaaattctaattaatctaatttttttatatttgttattaaatttaaatatctaatataagtgcatataagttattgcaagaatctaagggtgcttggtgccaagatgccaatactgatttttggaagcggctttggtcattaaaaattcatcctaagatcagtaattttttatggcgagctacttcaggtgtgcttctaacttgttttcaactccaaaagtgtcatgttccttttaatgccgactgccctttgtacaactctag

SEQ ID NO: 317763 - DNA, 1595 bp, Cannabis indica
gtacttagacataagtttctctaatttactgcaagtttcaaggggaataagaaacacggacatggcataactaggaagggcttgggccaccatttttaacaatatttctcgaccagcctttgagagaaatttaccctcccaactcaaaattcttttctctattttctccttaagaaagcctaagatcgctgtctttttcgccccataatgcaaggtaatccgagatagaaactgttttcatcagcaaccaccatacccaatcgagtacacagtctgccacgcaagtccaaaggggtattgacattaaaaaaatattgatgatttggagaaattcaccctttgtccggaagcagcttcaaaaatatgtagtaatctaagaacattatcagcctcctcctcagtagcacgacagtatacatagctatcatcagcaaatagcatgtgtgagatagtaggagctccatttgccactttgcatttaactcagtgtttctttcgaattgcttgatcaacgaagagaaaccttcatcacaaagtagaaaatgataaggtgacaacgagtctccttgtcttataccgcgtcctagaacaataaggcccatactcctaccaccatgcactaccttgtattcaacattcatcaccgtagccaacataagatccacccaacaaacatgaaaacccctccggagcttcatagctttaagaaaaccccattcaatgcgatcatatgctttgcttaaatcaagtttcattgccatataacctgtcttacccttacgcttacgtttgaggtaatgcataaccttaaaagcaatcataatgttatcagaaaataagacgcccaggaatgaaagcagattggttctcagaaataacactaggcaacaccacttttaaacgattcgcaagcactttagaaataattttgtacaaaacattgcacaaagatataggccttaaatcactcatagtagtcacatgtttcttcttgggtattagcacaatgttggttcgattcaagccaacaagtagagagcaagaattaaagaaatcaacaacttgagaaacaacatccataccaaccacatcccaatatttatgataaaaacctggggtgataccatcgagacccagggatttatcaggatacatttgaaataatacttttctaacctcttccgatattacctgttgtaataaatctttattttgggagctagtaacagtcggcccaactccagtcacaacaccatggtaactagaacttgatgaagtaaagatttcagtaaaataatcaataataacatcagcaagggtaaaaggataaagtgccacggtgacggtaaaaaagggtatcccaaaagcaccccattgtccataaaaggataaagggtatcaaactatcaataataacatcagcaagggtcaaaggataaagtgcttttgggatacccttttacttgggagttctgttgaaaaagaagaagaaagaggaagaaaagaaaaagaaaaaaaaaagaaaagaaaaggaaaaagaaaaaaatatatatttttaatttttattttctgattttttaatttttttaatattt

SEQ ID NO: 317764 - DNA, 730 bp, Cannabis indica
tcggatgaaaaaaaaaaaagttaaattggatcaaatgcccactcctacttaacatttttggaggaaggaactggtgatttggtaacacgtgtgaaggaggttacatacgtatacttgacgatgggctttgcgccatgagcacgtgcgaactgggcccaattctaacatgtggctggctagggagggaatcagtgggcctgcctagtgggctgcaattattgtcagataggcccccacgtggtcagacaaagaatgacatttattttattttcttcattaacacttttactctttttgacaatttattttaaaaatatgattttaacttttacattttaaaaaagtatcatactagatcctatatatctattggggactggggagatgtatagtaatattttttttaataagaaatattaaatggtaggatagtgtttagtactttttataataaagtctaattaagttactatataatttgatacatttaaacgacatcaaaataatatacaaataataaaataataaaagtacaatataaaaatatcaaaatactgtattttctataaattaatgtcagaaaattaaagacttagtacaaaagtaaaaataaaatttgaagaacttaaaaaaaaaggaataattacataaggtaccattttttataaaataattacatttttacgtttaaagaatatttttttacatttttacggttttccaaaaaata

SEQ ID NO: 317765 - DNA, 645 bp, Cannabis indica
acaatacaatacatcacaatatatcaaaagaaccctcagtggatattaatgctatattcatagatacgtgaaatttcaaagctacaaaatcggaacacacacaacacgtacgtgcacaatcaaacaagccaaaaacgtattacgtaagcacaatccttaaaaataataattcaaaaaaatatttcatatttaagagcatctccaatagtaatatatactctttaactgtattaaaaatttatatattacctaaaaaatataataggtaattttatctttattttacattattattttttatactttttattttagaatgttctcataataagtacctcttataattattaaataaaattatattatactttaatataattatatatattaaataattaatttttaaaaaaaataataaagaaaaaaaagaaaagaaagatagcaagaatgccatttttaagtcattttacttagtattttctaattaacaatgataaacatcgattaaaaaaagtaaaaaaaaatatctttataattatattctttaaagtatccccaattagagaggctaaagcacgtccacctgtctatgaaaattggtaccatttaataatggaatggctcatagtccaactttccaagtgt

SEQ ID NO: 317766 - DNA, 1695 bp, Cannabis indica
tataagattaatacaatccgaaacaataagaccaagaggagacataatttggctcttgctattgatagcattaaccaacaagagacaatccgactccgtaatcattgctgtaggaggaaaacttgcagcagcactaccttcttcccagcaagatttaacccaactcaaagcttctttcattgacaacgccttaacaacaacagggtcaatttcacctcaaagcttgacggcagcagcaacaaaacacataccagcatgatctctagctatccaccccaacccatgactcctctccctagaaaaagagcagcatcacaattaaccttcaactctcccaaagacggtttaatccaatgctcaacactagccgaggctgactagaagaagaagaaactcctccatttttaatttgagcaaatttccaaagttcaaggtaagtaattccagatgaaacaactttttccacagaagtaactttatcattccaaagtaaatcattacgggccccccaaacactccatagaatcattgccagcttatcaatagtctcagccaaatgagtgttacagaatttctcgatccagctaccaaaatccttatccccatgattaaaacgcagacccagacctcgctccaaacaagcttttgtaaaagaacaaccagccataatatgaaaaatggtttcgggttcacaattacacaaagaacagatactgtaaacatgaacccgcttagtctgaagagagactagagttggaaggcaatttgtgagagccctccaaagcaaattcttaattttttgaagaagtttcaaataccaaaactttctccaaaaactagaattatcctgcatattccatcttccattgcacacttgtaaagcacgataggcagtctaactgaatatccaccaaaagtttcaaaagaccaataccaactatccaattcaggcaacacaggcagcggaattttacaaatgagatcaacatctctaggcacaataagatcatctgaaagctccacatcccaacacattcgattaggctgaagaagattacagacatgacaattctgaagagcctcatgagaagaaatcacaaagggattgtccacattagggagccaaggttggtgaagaacagagattgaagaactagaacccacacaccatctagaccccaatttaaccacctcttgagcttcaaatatactctgccacgcataactcggattttcatccaactcagaatcaagaaaagaaccctgggggtaatatctagcttgaaaaacacgagccacaagcaaagtcggattggttaaaagacgccaaccctgcttgcccaacatagctagattaaaatccctcaaatttctaaagcccaatccacctttatgcttatgcagacacaacttatcccagcttttccaatgaatttctccaccttgagaggccttagaatgccaccagaatcttcccataaggcgatcaatgtctttacagatttcaaggggaaccaaaaagacactcatggtgtaagaaggcaaagattggatcacactttaataacacctccttaccagctcttgataaaagcttgctatcccagttttgaatacgcttcctaaccttctcctttaagaagcccaaagccgccatcttgtttctccaaccacactcggcaaacccaaataaaa

SEQ ID NO: 317767 - DNA, 1384 bp, Cannabis indica
atgaaagagcacaagtatttgtgcataaaggagaagtaaggaatgagatgaagttgctaaagactagctcgcgaagtaaacccagcacgagtactgcaacatcaagtaccacctcaactaaaatagataatccaagtggttcaaacacataaagaaaagatgactctagagaatcatctaaaattaaaaagacagaaaaaaaaaccatgacaagtatgtttaaatctacttagtatacaacgagttgaatgaaactcgtgacaacatttttcttggaaatgaacacaaggttacatttcgcaaaccttagccaatgagacatgcgagacataaacaagatttaatgaaattttgtcaatttcataaagatatagggcatactactgaagagtgtcgacaactaaaagacaagatatagagtctaatctagcatggatatttcacacagtatgtgaaacatgaagggaacaagccaaaccaccccaatcaccctattaacccgaataaccatagaatgaacctctccctattgagggtgaggatatattggtcatttcgggagggtcgcatctcgctggaaacaataataatgcccagaaaagatatagcaatgaaataaagaacgaacaatcgatgtttgctctagaaccagtacaaaaagcaaagatagatgaacctccaattatattcttggaggaagatacaaagaatatgcggtatctgcatgtcgatcctctcatcgttacagttcaactcggcaataagagagtgaacacagtgttagtggataatgggagttcaataaatatcctttacaagaatacatcaaagaaaatggggttacacgatatgaagttaaaaccttgaatggtaagcttatgtggattcacaggtgatagtgttgccagccaaagcatcattgaacttccattaactgtaggagagccaccattatcaacgacgctaatgcaggagttattagttgttgatcttccatcagtttataatatatttatgggtcgccctacattgattggacttggggcagtaagttcaatcaaacacttatctctaaagttcccaacacaagcaggagtaggtgtagtacaaggcggccaattgttggctcgcaaatgttatcgcatagaacttcaaaatagaagagccaatcattaattgatggtagtcataatagaagaatgcgagaaggaataggaggatctagatcccagagtccaagacgagaataaccagcttaaaccaattgaagagctgcaagaggttattttagatccaaataatcccacaaaatgtctctatattgggaagaatttggatgaaaaactaaaatagcagttaaatgattttttaaaggcaaaccagg

SEQ ID NO: 317768 - DNA, 620 bp, Cannabis indica
acttataattttataaatattaacgtattcatctacaaaccaaatgttattttttatattgcttatttaaaaaaaatattacacatccaaaaaatgtcaagcccatacaaacagaagtgtaatcctcataattgatattagaaaaatacataaagatgctctaattagtaaattattcaatacactttttcttcattttggctattgtgcttactttccaagtgcctccctcttttgtatttctaaaagtatatgaaaattccgcacaaagttatgaaaagctgacttaaaaaaaatgaatataaagttaaaaaatatagtaaaaattagaaaatagatttgaattacaaaatttccaatgtcattcattattgctaagcataataaattttatagaagtaacaatttcctataattctagtgcagatttaaactaaagaacgtacattataaaaagtaaactacagaattatgataattaccttcatttaagtttgaagttgtaaaacaatcctgcaaaaatgtaattatatgtcttttagtataattagtaatatctatacacttatcaaacataactttttaccataatttgcagcctttgcgtcaatattgaaaga

SEQ ID NO: 317769 - DNA, 709 bp, Cannabis indica
taattttaaaagaggaaaacaaaaatttgggcccctgggctgggtgggccctaggcacaggcctagcccgcctgtgcccagggccgggcctggggacaggaaaacattccctacaaattcctcatcttgtctgcatccctacccctatctcagtaactattaattttttttagtttaatttttttttctataattatatacgttgtaaataattataaataatttacagtattaaaattattatttaaatattttattacacataactccttttttttcttttaataaatatgctaagcaattattttccctttattttcgattttatacactattccaaatttttcaagacttacatttggtcataaaacttttttacataccaaatcataaaagaaaattattaaactaaaaaaattctccacaataccaatatatatcgtttttccaaggtaatacataaatattaaagtgtttcaaaaaaaatatttaagtgtaatgtggttcactgtaaggcaacgatggtctctaccttttagccaatgaagagggttgtagaattggcttcaccggtgggtgcagaaggaagatataaaagactgtccctttccccatatttttctatgattctctctagctgtttccagccaaattccatctcccaccgctttctctctcaaccacacccttattctctctctctctctct

SEQ ID NO: 317770 - DNA, 768 bp, Cannabis indica
tatatccgtcgatattcagtgtatctttatgtacactaatatcactcttattgatgtgttatctaataggcatacataaaaatatgtacgctaaacatgtacgtatgtatatctattatactaattttatctcgattgccaattcaagtgtgtcggtcaactttagtagaaattgttgctcaacgattagaggccctttgattttctaaataatcaaccttcaaaatcctagttgaaatcccttgctttaagtccaaattttagcaaaaatggttggggttctttggcttagggtgaggcggagagagagcaaggagagagaaagaggttgctcctctttttgtgatatttatctactaactatttttttaaactatattcagcttataatataaggatatactctagaaaattcatttacaacataataatttgtctgaggcgaaaagatcaaaaataccctttttcttataatttaagtaatttaaatgtttaggggtaaaatagttaaaaactattaccttgtatacctaacatatttaatgtataactaactttacttgcttagtttcaagatattcaattgtatttaagtgactttaaaggtcaaatcgtcgcactccacgttaccaaacataaactatgaaaattgtaaaaattcatatataagagcatctccaatggggaaattcaaatttagtattaaatcaacaccaaaaaactactatttcaacactaaattttttttcaattccaaccacaacacta

SEQ ID NO: 317771 - DNA, 633 bp, Cannabis indica
accatgccaaatccccttactacattattgacacttgaaaaattgaatggtgataacttttataaatggaaatcgaatttgaatttaatcctagtttgtgagaatcacaaatttttcctaattgaggagtgctctgaggagcccgctaccaatgccccaaaaactgttcaggatagatatgattcttggattcactccaacaacaaggccaaatgttttatgcttgtaaggatgaaagatgttatgcgtcagatgcatgaacatatgaagaatacatctgaaataatgaattcaatatatgccatgtttttgtagcagtctaatcaaacaagacacgatgacactcgtagctacttgaattataacttagcaacatattaaagtttaggaatctgtaatcaatgcttgctagtactgtttactgatgctaattccatgatccaagtaatctcagtttagattatggatgtagtatgacatcaaagtgaatggatgtatataatagatattatatatgacatggaccgatatgaatgaagttatttttatctaacttatcgtttactataatgacctaattcgtatcataacaatgatcaatagtagatcggcctaaatcttgagtaatcatga

SEQ ID NO: 317772 - DNA, 1063 bp, Cannabis indica
ggtaaaacatttaaaaatttaatttatatagatgctgaccattttggtacttcaacagttcgacttggtaaaattaggtaaagtcattaaatttttgcactagtaattacttcttttttgtcctttgggataggataggataagattgcaatgtttttttttttttttttgttatcactaacttgtagttgtaattatttgtagagttttattattgaccactaatggattagtagtaatttttttttacttgttagtgccttacaattagttagtgaaatttttttaaaatattttttttgaaatgatatgtgatttaatacttaataacactaataaaaaaatattacaaaagatttaggacaccttttagcaatattcttatgaaaatttgtatattgttttcgaaatgtaaataatattataaaaagtaatataattaatgtataaatttataatttcaaaaagatttttttaaataaatttaatctatatatatgttgatatggtttttcgtcaactgatcaaataagatcgtaaaaataaagaggattacgatgaattaatttgactaaataatatgcaataaataaaatagacaccaggaatttatagtagctcacccccatatcacgatagtaatggggctagaaatctgtttcaagatttatgaacacaaggctcatgggagacttaatattcacaaatctaataaatatggtggttgtaaggttcttggaaataataaaccaataaaagtaagaaaaaagaatggtccttgttcttagaaactgtgtatgttaatggcgtttgagttgtagaggcttggtgtcaacaaagtatggacgacttaggaaaaagatgaagggaagtaatgttcttagcagtcgtccaatgagcaagcaagcgatccccctatcctagcctatcactctctttatataggccttagtgtttgttaatgatcccccacatgtcggggtatcacattaacaaatctcgcatcttatttgaaaaactgtgtttttgcaaatgtcagttgtatataagaaaatataaaaac

SEQ ID NO: 317773 - DNA, 3141 bp, Cannabis indica
gtaataaaatcttaaacttaataaattttaacatatcaagtaacatcataaattactataaatttttgtgttatgttgtatttaaaagttacgatatagtatactaataacaaatttatttaataaaaaaagtttgatatgttaatatgaaaatttataaagttaccaaatagtatcttaaacatagaattagttatattataaaaattattatatatatgttaattttaaagttgactgatcaaatattcaaaataaacaattaaatgtgtatgagaaaaaaaattatcttgaaataatttttttaataaaaagtaactaattgatatattatttatatcaaaagcaactaaaaggttacttttcttttttttaacacactgaaatttctggaagcgatatcttttaagtttttttcattttcggtaattattttggatttcggtatttgtgctgacgtggcatatcggtatttgtgcaaataattttattgaaggtatttttgtaaataaaatcaattttaagtataataatgaaaaaaaccctaatttttattacttattagtaaacatgtcagacatatcaatgccacaatgtacatagatgtatacgtgacaaatttttataatattaattatttaaatattattaaaaaaaattgaaaaaaataataaatttaaaattctaaaataagttaaattcttttttttcgtttctttttcttaattttctttctctttttcttcttttttattctttcttttttcttcctcaggccacaaatctcctttcttcttcgtggcccttttctcgcccaaaccaccaatccccttttcttctcccacggtctacagcctcctttccccggagacagtcactatgggttgtgcattatggattacagtctgagtctctccattataggctacacctaatcgaagctcaatgatcctccaccagtggcattgtgtcgagatcgatgtaaatacctagacgaaactctctgctataacaacgacttcgttgaagctcacatcgcttaccttttcttcttctttatctctggcggccatggcttcttcttccctagtgtataaatcaaactcgggctctattcatccaaatttgttatccttctttctctctctatatctatcttttatatttttcttttaatttatttttactttggatttgatctgattgttatggtgatcgtggtagtggatttggatatttgacttttgtgttattatttttttaattttataatcaagttttgtaaatgagaaagtgttgtggtaatagatttggatatttgatctggaataattaggttttgtgcttatgatgatggttgttgtgttgagttattccaaatctgattgcaggtaatttttttgtctggtttgaggattattgtgtttataaattttgagtattttttaatttggtatgagaattaatgtgttcataaaagtttggtagcggtggtggttttttcaaatttttctaagattaaattagtaccatgcgcggttccaccagcaaagacaccggacaagatgggtccttctgaactagaagaactcaagaagcaattaaatgggatggtggaatctagatacatggtgccctctaaagctccatatggtgtcccagtattattttaaaggaaatcagatgggtcaatgcggatgtgcgtggattatcaagctttgaataaagtcacggtaaagaacaagtacctggtgccaagtgcagcatatttgttcgatagactgaccaaagcatcatatttcaccaagttggacctctgggcggcatactggcaagttcgaattgtggtgggagacgaagcgaagacaacctatgtgactatatatgggtctttcaagttctgagtgatgccttttcgattgactaatgcccatacgacattttgcaatctgatgaatgacgtgctatacgaattcttggatcggttcattgtagtatatctggatgacattgtgacttataacaactcattggaggaatacttgcagcacctaagaaaggtgttgacgaagttgagggaagaaaaactgtacataaaaaaggaaaaattcgtgttatgtaagaaagaagtaaaattcattggtcattgggttggccgagggaatctggtaatggatgaaggaaaaatcaaggcaatcatggattggccttttcccacaaaagtagcgaagctgcgttcatttttgggattggttaattattatcgaaatttcattaaggggtactcaaataaggtgagtgatctaactgatctccttgaaaaggatcatagatggcactggtctgaagaatgcaatgaagcatttgagaagtttcctgactttaatcttccatttgaagtgcaaacagatgcatctgaacatgcattaggtggagtactggtatagaatagtcatctgatagctttcgagagtcggaagttaaaagatgttgaacaaaggtattctacccacgagaaggagatggcttcggtagtgcattgtttggatgagtggagacattatcttctagggaaaaaattaacggtgatgacggacaatgtggccaacacttactttaaatctctggagaagttaaccccaaagcaagctcgttggcaagagtatttggcagagtttgattttgtgtgggtgcatagaacgggaagcaaaattaagttgttgatgcactaagtagaaaagaagtacacgcttttgtttatgcgtcgtctcaggtgagttcaactttcatcgaccgggtgagggagcaatcactgctcgatcccggatacaaaaagcttttagaggaagcaagaaatggtgaactgatgtggtactgggaagaggatgatcttctctatgctaagggtggcaaattatttgtaccaaatagtgatggtttacaaaggcaatttcttaaagaaacccacgatactcagtgggatggtcctcgggtgtggctaggatgctggctttattattgaagtcttatttttggccgaaaatggagcaggacatagaggtatacgtgaagacctgtcttgtgtgccaacaagacaagaccaaaagtgttgggttttgtgccctaaataaaacccattac

SEQ ID NO: 317774 - DNA, 1431 bp, Cannabis indica
ttaacacaaaattctaaacttgtgttttcatccattaagattagattcaaatggcttttgttgttttaataatcatttaaacaactagtaaatatatctaagagtacttttttcttaagcacgccaactaatattttattattgttggaattaaaatctttctaataatatcaaataacaatttgagattgaactctctcctttttatggtcacaaaattttctactatagaatccaacttcatgcatgtacattttagtttttattacagtcaaatatagaacaatcatcaaattaggttttatctcctatgttattttactccaaagtttgtcataatcaagtttgacttgtattgttttgtcccaatgaaaaagtttccaatagtcaacaatacatttgtatattttaaaatattatcttcaatattgggagagttttaaagggctttgtgtaaagattaaaaaaaaactaggcttttttgaaaaaaaaaaaattagtagtatattaaaattacaattccattactcgtttttttttcttcttttaaggattcgttcctaaactttcagtttcacttataattttttatttatgtatgtgtaaatagaagaaaaaaaaaaaaattgggccttagaaaaataagagttttgtacaatagctcaaactgcctaatactttagcatgatgagttattggttagtataatatataataggaatatttacggtaaaacccccctaaacatttataattgttacacgtatgaccctaataaaaaaatagcagcaaaagtactttatcgtacaattttgttacagtcgtactcttttttagctattaagtattagctcagaaacacgtgataacatattattggatcatgtattaaatacgctaaagaatatgtcaccacgtatttctgagttagcacttaacgagtttaattgacacttaacaatcaaaaaatggtttgactgtaatagaatcgaaatacttttgccgttattttttttattaagattatatgtataataattataaatattaagataattttgccgtaaatattcctatataatatagctcggtggtacatagcactttttttcttgcaaagaaaaagttatgtgagtttaaatctttccttaaaaaaatagtctaacttagtgggagtgtaaagagattattttaaaagtactcaaaaattacaaaaagtttacctttctacgaaatattttttttatatatacaaactttttttcttcttacaagatcattatttttaagttattctaaaaaaactgttattttcacgttgcaaaaatatattatagtattactacaacattaaaataatattattttctctttaaaaatcacaaatctgtataaaaaaaaaaaaatccataaaaacataaaaaaaaaaaa

SEQ ID NO: 317775 - DNA, 1403 bp, Cannabis indica
gctggaaacataatctacaattatggaattctaactttcctaacaggtcgaatattgattctctttaagtgttaattctgaactgaaaaattgtgcacaaatttagatgagatctaaatttagaaactccttcctggttccatcactagctggagcataaactcgatccttgtactgaagcattccactctcaaaaattgaaaagtccttagccttactaggtaggacttctttatgggattttaataactcaaggtcttagatttgtgcatttctaaccctttctaataggttagactggatagtcaaattattaagcttgccaaccacaaactaaataccagccctagtcatctctattgctaaaagggaaaaaatcaacttagaactggatatctgctcgggatcctttctgctctactacattagctttcccaggattatacaaaatctcacaatcataatctttcactagttctaaccatcatcattgtctcgtgatcagatcattctgagtaaagaagtacttgagacttttgtgatcggtgtagatttcacatctctccccataaagataattctgcatacttatataggaaatatccattcctagaatgatatcaaagtcttctgtggataactcaactaagtcagcacccagttctctaccatccactctaactggcatagatctaatccagcttctaaagataactaatccttcattaggtagtagggttctaaaccctactgcattactatcacagggcctatccattttattaatcactctactagcacgttagttctggttccctctgaacctcttatcctgacccgaaccactagatgttgatggagcttttcttttctgatcattaaaggaactaccaccacccctaccaaaactagaagtaggggcagcaaacccactatcagtctgagtcactacagactcttgaaaaggctcaatggcaccctcagccctaagatccttttccaccatctgagcataggtggtgccttcatcacttgtaatcgccaaatcgtgttcaatattggcgtcaagccctaccaaataattttccttcttaatgaaattagttggcatgattctcgaaaccaacttggcaagtctatcaaacttggtggtatactttgtcactaacatagattgttctcgaactttatcctcttcgcattgtgaactaaaggataatttcaaataaaataagaatccaacgatgtcccggtaggcgagagtcaaagtcattcttattttataaatctcttcattgtttcatattgtaaatactagtctaagttgtcatctttggatgtacaactaaatgttgcatttacaaatatttatctgttgatatctaacactgttatgtttgttt

SEQ ID NO: 317776 - DNA, 863 bp, Cannabis indica
aaaaattaaaaaaaatagaatgtctataaataaaagttgtgttatatttagtataaaattttaactttataaataaaattttgatacaaaaatcaacacttaattaaattctcttttattattttatttgaaaattcaaaataaatatattttgttattaatttattacctatataatgtgattgttaaatataatgaaaaacaataaaataaagcactacagaattataaattcaaagagtcatttacaacaacagaaaatattgtaggaggaatctcccctaactaaatacaatcagtatccatcgttaccgcctgtttagccaaattatgagcagcttggttagcatctgaacgaatatgagatacacaaacattagggaaattagataatagatttttaacatcaagaactaaataatttttataaaatgaaatatattttagcaatgcatcactcgtaatagatattctatgtattagtgtactcagagcatatgctatgcatttttattttatttatgtacttgtttagatcaacattaaataattattttttttatttattttttatgttagttttattattgtattattatctaaccacaatttttttaaaaatatatagtcaaaagtttacattatatttaatgttaatactaaaataataataaatcataaagaaaacaaaattagtatatattcttttaaactaaataattaaattataattaatgtatcaatgttaaactatgattattttttttatcaatttatgtattggagcaagttttttttttttttaagtaatgtataggagcaagttgtatgtatcaaatatgtcgcttattgttagtactgtt

SEQ ID NO: 317777 - DNA, 917 bp, Cannabis indica
ataggtgaaaacaaactcaatatacaacccatcttagtggtaatgcgaaatgataccttcaactaataaggtctaacggaattcgcaagatatttagatgaattaatgcaatacaaaagcaaacttatacatttttgcaagcaaaagatactagaacgtctactcattctccatgaacctagcttcactttgcaacacatgacagataatgggagccataagttacacagaaattgatcaaaacaacaaaagaggggcacacatgacctttacatttcagcaaactactgaaaattgtgagcatacatggacgatcatgatgatgatattaacctaaatttaaccaaaatttgaactcaaacaagcataaaagactaggttaagacgttggagttcagttatacattgatacactatctaaatttaggttcaaaaaaaaaaaaaacttagagataattctaacaaaaaggtaaagattcgtatttaaatccgaggttaatagatgacaacatgaagaggttaaatttaatacctaatgtgcctttgcctgataagaactcgagcatggtggattgacttagccataccggacttgaagacaagggtctgaagacgacgctccaaaaagttctcgacagttagagcaagaacgtaatcgagcttgttctggctctcatccaacaatccgtatctgttcatcctcctcagaagggcctctccctcaaaaatccgacgtgggtttttctcgtcgagggtcagaagcattctagcgttgttacggattcggctcagcacatactgaaccctccacaactctctcttacaccggagaccatactctccgacgagcttcaactcagcgtccaaacgctccttctcgtacggacgtctaggcttcttgaaggttttaccatcta

SEQ ID NO: 317778 - DNA, 1338 bp, Cannabis indica
acaaaacagatggtccaattagttacttttgcaaaacacaaaatctaaaataatatttaccctattttattttacaataggaaaattaatagttactttaatctttcttttttatatttaataatatgtattcccaaaccaaagtgtacacctaaacattacttaataatgtgacaatgttttttttcttttaaaaagggaaatttacaaaaaatatatatatatatatatatatttatatatatgggaaaaagaagttagtcaacatttttatggacataaaatttattatacaaactatagtaactttagaaagaaaaaaataggaaccataaaatatcataaataaagttaacaagatttttaagaacaaatatcacccgagtactcattgttgccagaaaagtcgttgaaatttgctatcgtcgtcgaaaagtcactgatatttatcatcattgtcgaaaaagcggccaaaattattgtcatcactggaaaaatcactggaattgtcatcaccgtagaaaaagtcatcgaaagtgttgttttcacaggaaagtcaacggaattggactttagaatttaacagaattactttgttacgttcatcaactagttagaaatctaatacacttaaattagttctgtaaaacaaccaaaataaaaattaatacaccaaaatcaattatctaaataacaaaattaaaatctgaaacttaaaaccaacttacctaaagaaaacaaaacaaatagtaaaacacagaaattagttacttagtacaataaactaaaaaaattaaaataaaaaaataggatgcataagcaatgaaaaaataaattgaaacaaaaaatcagttaataaaaaaatttcatagaaatcatatacatctattagctaattgaaaaatatgacttggaaaaaccggctgcataaaataactaaacacaaaaaccaattacataaaataactgaattaaaaattggtttcttgtattaaataaatcaaaaatcagtttctaaaaaaatggttactatcatgcacttataaatattgaaaaattggtttttagaggtgaaaaaaactaaacatgtgagaaaaatctcataaaaatgtaaaaaattaaaaaaaaaaaaattataatataaattttaggctaattaggatttttgccccctgaactttgacatgtaccaaatcatgccccctgaacttttaaggtcattgaaaatgccccctgaactattgagattgttggatttaaggacttttttctatgtttagtaaaaaagtctaacatggatgaaagttcaagagacataaattagtacatgtcaaaatt

SEQ ID NO: 317779 - DNA, 950 bp, Cannabis indica
gtatctcatatttttaaattgtacatatttggtacactaaaaaaaacttaatcaatataattttatcaatttaaccaaatagttctaaattatatgtaatcatataattaattttgaattcaaaattcataaatttttatactgtttgattgtattgataaaatttcattaaaaaaaatgaatttagggtactaaatatgtatgattttaaaatatagagtaccaaataagtattattaaaaatacatggtacccaacttacatttagataaaacgcaaggtactaaatgtgtagacactcttttaaaaaatacaaaatctattttgtcatttaacaaaactgagagattttataaaacacaagatccaaaataatatttatccaattattaatatgaataattatgtattatgtgagtatcaaatatacaaaaagaaaaaaaagaaaaactcttcacaaaaagctatcaagaatttaagcctctcaaactatcaaaatatacaagagaagaaaatttcacataaactagtgttcattcattcaaattagataatacacaacaagtttgttatagtcagaaaataactcaatatggaagcaccataattaagataatatctcataattaagtttgttatggttagaaaacatctcaatatggaaccaccgataatatctcataattaagtttgttatgtaaaacctaatctagtctttcacaacagttacaaatggttgatactgcattgctgcattgtactctttctgtgacagtcagtagtcccgtgatccgtaaggggaaataccgggtaagctgtgcaatcccacaccgcctggggaaggtcaagtgggataattctgagactgtgtaggtatgggactacatagttgaagagagctcaaatggattgattggtactacctatatcaacaaggtgcatcttgtttt

SEQ ID NO: 317780 - DNA, 1260 bp, Cannabis indica
aagtgtggtcgacgaggatgtcagaccctaaagggagtaattgtgacagtagtctcgtgatccgtaagaggaaataccaagtaagctgtgcaattccacaccgcctggggatggtcaagtgggatgattctgagactgtgtaggtatgaaactacacagttgaagatggcttaaatggattaattggtactacatgtatcaacaaggtatatcttgttttttggtatgcccattacgaaagaactccacggttaagcgtgcttaacttggagtaatttcaggatgggtgacctcttggaaagttttctcaagaagtgtatgagtggggacaaagtacgctgaaaacactcgtgttggtttgtaaggtcagtcaacattccatgaagcagcatgagtgacgtacttgtgcataagtgttatcattccatgagtgtaagagctcaatagagatttgaagcaagggactttacaatcaaactaatatatacatattgtcatatagaagtgagaagaagagggagagaggtagggaaaaaatgggtacttgtttatgaaagaaataaaacgtgaattgaattttttgtaggggaaaaatgggtacttgtagcgtatttagtgatgaaattactcttacagatttttgtactgttcatatgtacataatgtgttttacatgtttataattttgtgttataatcttctctttatctccattattttttattttctgtatttatactatatatagagttatagcattaacttattaatatctttatccttctattattcttgtcacatagttatattttttgttttggtatttctatttaaccacaataattttccaacatacatgtcccatttaaattgagtgtctttaagaagaaacgattacaattatttttattatattatcccatgaatccaaaaatattatggaatatatattctttgcgtaaaatgactcaatcccactctatatattattcctagctagtgatctgttttacattaatatagaatagaaactgtaatattgaatttccatgattcgtgtatttttatagattaatatagaaatctcttatttattacattaataatataaatagaaacctttcacgtacatttggcacaatatatttcaacccaactttctcttacattatcttttcaattcaatcaaacgatcaaatgtaatattaaagaatttttttttggggttttttctattttgggttaaaattaccttaaata

SEQ ID NO: 317781 - DNA, 660 bp, Cannabis indica
aaccttaaattttttccatatttttgaaaatagccctttattattctctctgctgtggcgtgacccagttagacagatgctatcaaaaaaattaagtgatttttatgaaaatactagattttagataaaaatttacaattttactgtcagatagtaattttttataaaaatactattttttaaaataaccataaaataacataacaaaataattaaaaataaaagtaaaacaaccgtagaacaaccgtaaaaacttaacacaatatataatataaaacttacatagtatttttgaaaaaaattctgacccaagtaaaaaaaattaaaaattttatggtgtaaaaatcccaaaaatcaatcaacatgaaattctttttctattatgctataaaaataatatttctccatataaaagtatcattcattttatatgaaataaatgattaaatggctggagtactcactccacctgatttttcatttcatacaatttttttttttaaaaaagaacgaagtttgaaaatggtgtttatcgatttatatacttctagtagtcttaatatcaatatatatgtatattttagaaaacatcactttgtttgaagttctttttcttgtagggaaatttacatggtattactattttcttacgcagtattt

SEQ ID NO: 317782 - DNA, 500 bp, Cannabis indica
taaaataatttccaacacttcccgctctccacaccaggttcttcattttggggggtagtttgagactccaaaaatgtttccaaaatttattctcaacagtctctatcaagtccatgtcacctttgagttcctacattaatctatatgcacttttgacagtatacacaccagaaagctctcgagaccacaccaatcagtcacgagttattgaaggatcaagtgtaatctgcaggatcaaagcacggtctcttggctcaaataaatcattcaagatctcttcatcccattctaatctgccctgtttcatcaagtttgttagtttggcattcatgagacttgggtgattagacatgattctaggattggtttcatcatgggagccatgcctctcctaagaccgagatagagttgccattgccaacattccaacgaaccccattagccattaatttttgagcttccaagatactcctccacacatagcttgggttggaacctaa

SEQ ID NO: 317783 - DNA, 1393 bp, Cannabis indica
ttatgtataatagctttaaaaaataaaattataattaattcatttaatataatatatctaaacacatttttcttggctctaactatgcatgtgcacatgtaaaaataattgtgctttcattaatctgattatttaaataatttttaaaagttaatatatttagagagtatagttcttattttttctttttaaacagttagaggataaaatatttatttattttatacacattgcattaatataactaaaacacgttagactctaatgtgccaaatcagttttatattaaccatataggatggaaagagaaagatcagtatcaagaatatttgacatcagtaatagttcataatttttttaaatcaggagaaaaaaatactgaccaatttatttttatagtaatttaaattgtaccacagctataaaattaaccataaatttagatcataaaatatataaactttactataaaatataaaattattttaatatatgtaattctcaattgttataaaaactgcgcgaaatgcggtaccattccctagtcatgtaaataattagcaacagtgaaaactcatcgaattggtaaaaaagtcagcgatattattttaaggaccgttgattttgatcaaaaattcaaacgaacagtctaaaatctctccaggcattcaaaaacacgagggaaaaccccttgtcagttgaatggatactatttaatggcagtgtatcatttctcgagagaacaaaactgctaaaggacgcactcattaccattcaggaaaatatcattttacctagccgatatcaaataaaaagccctttctattcccagaaagagttttttagggggcgattgttatgtccatatttcgtgcagccaatatggacacgacacatggatataaatttggaaataaagtggatatataaatgaacaagaatgtgatagttagattacctcaaaatgtgtcataattaattgtatacttaagtctcacctaacaattcaataaggctaagtcaaaagtatctaattaggtagtaattgtcgagacaacaacaatcaaagtccatctcgaacctaaccgagatgggcagaacaagtattttgcagaggaatataaagagcacaaaagatacaatcttaagagaagaaaattagtcctaaggagcacaagagatacaatcttaagagaagaagatttgtcctaaggaggtccacataaaggagataactcggagctttgttacctcttttggtggacccccaatcaaactctcaaatgtctgaagattgttgatcaactcgtgaaaatcaaaagttaacttgttcatgacgtagtttgaagtaaagggcaaaaaaaagctggagttaaactattcaagatcaaac

SEQ ID NO: 317784 - DNA, 600 bp, Cannabis indica
aaacatgtagtgggtccaaagattttgatggtcggataagggttttatgtatagaatacatccatttttggaagaggaacaagatgttgattgttgcatatatgtatggtttaattaaagttatcgtttttatatgcaatattcagaacattatgtcataccatacctttccataaatggtacgtagtaaattagtctagtgtacaaaattccaaatgggaaaaaatctctgctatgatgcatgcatgggccaaattaagtatatataataataagacataaatatggaagaacagtgttgatattattcattggtatacgggaaaattgaagctttgtaatatggagcataacaccgttacagtacgtagtatataacgtattatatattattggataataagtttgttgctatataagtgatcacagctcatccaattatatatacatgaaaagttactggttgaatatgtaattttaatatatactaggtggatgtacgtaccgagtcacgtattgatagttttatttaagattttagttattttaagattttgaatatattttatttttaaagatttcaaattttttgtttgaaaa

SEQ ID NO: 317785 - DNA, 881 bp, Cannabis indica
gcgtcggtagcaaattttgcgaaaaccgacgttgaaagggcttaaaaaccgcctctatagggggtttttgtagtaggtgataaatttgttcttggggatgctcttcttagtcaaacttaaggagaactaatttcatgtcattggtccttgaccacacctgaacatagacattgtgtatgcttaacttcataagaagaaatcaatttttgtcaaggaagctcttgtcatgtttttaagcatgatgatttgtttcctgtaccaactagaagactgtggagctttcatgtttgatgtagacaaaatgcacccaataaagaatatccatacctatctaaagcactaatgttctattcttttgtatgtgagaaacttattttattcacatgtaaaataaattattttaaatattatttttggcgttataaattatttatagtttatacgatttttaaaaaattgtaatgtatagtgtcatatatataaagtaattctaccgtaggactcttagtttgtaactcatcgcatggggtagtattttaaccaataacattcaagtcaatagaggctacatagaatggtagtgtgcacatatacatgtgataattttttctagttataaaaaaaaagtggctgccttataaaaaaattgttaaaaacatagaaaagagatatctatatatgttgtgtgtatgtatagattaatgggctattttttttttattttgctttaatttaatgagctttgttattttaattttattttttattacaaaaataaataaatatgctacaaaaaattcatatataattttgagaatgtaaaaaaaatatatgttaatatgtgtcataaaaattataatatgttcataagaatttgttag

SEQ ID NO: 317786 - DNA, 824 bp, Cannabis indica
agttgtctctgcagtcttgtccttaacttttatatgtattttgtacctatattaaaacaattatttacaaccgtaaaaaaaaaatcaataatacaactaatatcttgatgatgaaaaattagaaccattttcttacttcacaagaggatagtcagagttcttgttgcaagtggaacatttataaacaccatcgtcaagtacaagttttctaaagtatttttggcaggagatatagtatcaatcaaatgtgttgtctatttctgttattttgcccctcacagtaaaaaagtattcctacaattaaagttttttataatatttgaacaaaaaatacacgaggaagagatttgaaaattatttttattattaaatctcaccttaagttgaggacttcaatcagtctttaagagttcttcaatactcatcttattaaggaacatcttttcctcaagtgaaattttattcacattcgacctctcaatgacttcaacaccattggagatggtagaaaaattttctactaatgatattgctacataatttatttttagatttatgtatattttgctggcagttgtcatagagtaacgaacttcacatatttagagtatatctaagttagtaaaaatatattataattcaaaatattagatagtgtgatcttttaaaaaaattacctctaaaatttttaatacttgttgaagttactattacaataacagggccattatccttctcgtataattttggttcgaacatcttctccaaatctcctcacaaataatctttgatgtgaccgaactataaataaaaaaaaataaaaa

SEQ ID NO: 317787 - DNA, 1387 bp, Cannabis indica
ggcgttacaattttggtatcagagccgccatgtttgtctactaaagatcgtcaagacatttaaaatcatcatcaaagaaaatctcggctcatggttcaataagcatttacttgtttagtaaatttatgtgattataaaagcatgttaggaagcataatagattataattacttattttaatgcattgccttaaatccataagtgcggtagtaaaattaaaataaggaccgttgcctgaccaggtcgacttacgaatcgatgggtttgtcctataaaatggacacctggcgcaatatggagagtcaaagcaacaaggttaaggctagtaacagttggagagaatggaatccaagttatccccgtaaccgaggtgaaattcgttggaggacttctggcgggagtaatgattatccaccacaggctctgtttgatttagagcaaaggtttgtggagatggaagttataaatcaacgacatgaagaggaaattcagaggttgaaacaacaaagatctcctgtagtacctttacctcatatgcgaaaagttttcaattcgatattgccagcgcagcagagtatggctagtaacctagtggaaacattgcatggggaaaattggatgccagaatctttagcacttctgggagattcaaagcttaaggacgccctttggactgggagccctaaagagtttgttttaaagcctcgggaggttattatagaaatttgagttactactccccttatttccatttatggaggaggtggtaagggctccgtggttgaacagaagaggaaacatgcattgacagtggtgggtttaagacgaaacaagcagctctaaaggaatcaaggtagaggtagacgccagggctattcttaccctgagtgcccacgttgtaagaaacaccatcccgaagagtgaaaccggaaagcatgcttcgagtgtggcatgattgagcattttaagaaagattgccctcagacggagaaacaagagcagcaggcaaaacccgtacttgctcagatgtttgctatcactcaaattgatgttgcagccagtccttccgtcgtgacaagtaagcttcttgtcaacaactcctattttactgtattatttgactttggggctacacacttatatgtggcatcacgggtaattaaacaattgggtaggccctgtgactttatcgaaagagggtttggaaccctattgcctggtgaggaaatcggttgtctccaaaaggcgaattaagtctatgccagttagaatagaagatagggagttgagtgatgacttagtagagttggaattagcagagtttgatatcatacttgggatggatcttctatctgttgggttttgtgccctaaataaaacccattac

SEQ ID NO: 317788 - DNA, 2103 bp, Cannabis indica
actttactcgacacataggaatgtgtagcaccagaatcttaaagtagtcaacataataccatcaatagaaatttgacttgacacggtagaaggaccagcactagcttctacttgagtcggagcaaatacctgagcaagaactagagtatcatctttcttttgttctaatctttgcaactatggataacttctcttcagatggcctactaccccacactgaagtaggcttgagcttaacatttaccctgatggcatctcttgcaccttgggcacttaggataggttctctagttttcattatcacctcggtgaaaaccctgattactttggaaattcttattaggacccgtagctggtggtcattaggcctcttcttacaattattagggttatcactcctaccaaaactaacattgggcgattgtttccatgaatctcttctcatattattcctctttcggatttgatcttctgctccctcaacagctagggctaactcaaccacctgagcataagttcaaacaaccctcagttgcttagcagcaacaattatatcctaagaaatatgctcttccaacccttaaatgaacttggcctttagcagcctcagtggccacttcattagaggcaaactttgccaaccagccaaatttggtggcatactctgtcactgtcatactgccctgagttagccatatgaactcttcagccttagcagcacggatagattcgttgtaatactttttgtagaacaaggtccaaaaggcatcgcatatcatggtattcagatcatgacctttacacacaatttcccaccaaatgcaggcatcttctcgcatcatgaaaataacacacccaacctgatcattaccctcaactcgtataaaattaaagatggtcgatatcatactcatccactactctagcttaagtgggttagcaccaccttcaaacactggtgcattctacttcctgaattgctcatataatagctccaaatgatttctcacatcctgtagcactaccaaaggtgccgaaggatcaggattaggatcaggagcaggccgagcttgctgctttctcaattctctaatctgattaccttgctgtcggatggtctcttgcattacagcacacatttgttcacatcctagaaagctcgcgattaatcctaccgaatcacctcgggtgcataatctaatacacttgcgaccataaatttttgacatttagaatcctccaaaccaaaaccaatactaataagcatttccatacgtacacatacataacacctattgcctataacctatcatgcttttctaatagctcatgccttcaggtaagcagatgttgggaatattttaccaggatctagatttactaacaagtatgttgaattaacatcctaaacatgaatatctctaaaataataaaattaaacacataagggtttaagaaaaccttacattggttgcagcagaatataatgactccttcgttcagatctctagcccttgattcatttctgtagcaaagcattatcaagatctgaacttggatctctttctctccttcaggtttggttaccactgtcttactcactatgattgagtacttgacttgctatgtgtgggcatggcactctttcacttaaggtttcgaatggtgaagaacaatgaaggaggtgaaatcactatggaagtgactctctcatctaggttgaaggcaatagttaaattgtgaaaagttggattagtgagagcatcatgttccttttatagtttcaactagggcttaggactgaattatatggattaaaaaagaataaaatattgggcaaaataaacactagggccagccacttaaagggaccaatctctagttacaattttgccacttttttcaaccacttattcttctttcaataatactatattttccaattcaatcctataaaagtcaaaactatttatttaatttataattaattatcaaataaaattatcatttatgtaatttattaattagaccatacaaagtctcttaattaataaattgaccccaaagcctcttttcttcacaattaagtcgttgcttagtgaa

SEQ ID NO: 317789 - DNA, 828 bp, Cannabis indica
agagtaattgactcttattagttatttgtctctctaatacccatacgttagtacaaaaattgttgtgataatttcattgagggtgagctttttgttttaaataaagaattattattttaaatgtttatgatataacttctaaaaactattaatataaaaaggaggaaaaggaaaaatataattgagaaaaatgtaaaaaatagtaattgatctagaaaaattataacttaaaggaattgtaatattagaaatataaagcgacacttgacatacctataactcacatatctaataaaagaattatattgatatataaatagattgagaaaacaatatcaaactgaatatgacctcttaaacaaaatatattcaagtgcttactgttgtccctttcagtttgatgggcgagtaatctcataatagccaataggtgtgggtggatagacaaagacaataagaattaattggaaattaaaaaaaaattaataaaataactgcaagtctgcaacgcccaccgtggggctcgaacccacgaccacaaggttaagagccttgcgctctaccaactgagctagacgggctgatgttatcaatttaaacatcttttgttttaaaatatatagcaaagccatatggagtactgttatttatttttttttatttttgattgaagagtcttgctttattaatagagggttaaaatggtaggacttacttaatattattattaccacttgaggctagctcaagtggccataggtgggtgtgtgagtgttggaggtccttggttcgagtcccaagtaaaacatgttgtaatatataaacgct

SEQ ID NO: 317790 - DNA, 962 bp, Cannabis indica
atttaagctaagcagtctttacactctcggtaactctccctctccctctttctctctgactcttaccaaccacccccacaaacccacaacctcccaccacacgaaaccgacgactttctgacgagacctacaacctccgaccttagctccaccatgaaacccaaacccagtcccaagtcgcacaaccccatcgtgaaactcacaacccaatcgtgaaacccatagcccaatcacgaaaccccatcgtaatcttgagacccatagcgtaattgccaaaaaaatgtatttttctaaactttttattgatttttaatgggttttggattttaaatgcttgatttttagggattaggttattttttcgtgttttgggttgatattcaatattacttgttaaagttttgggtttttgctaattatcaacatgttgcgacattgttcgcacatttattgatttctctttcaaatgtaaacaatatgcagaatttgtgtgttttgtcgatgtttcacgacatgtagcgacatctctgtgcgacatgtctttatggtttttttttttggaaattttaattagttatctatagtttcatggtatcgctaaattatcgttaatagtatcgctagatatcgttaatagttgagctgtattttaattgtttgaaatttgaaattttatgtcgttagatgtcatgaatattattgttatatatcgctaaatcatggactttgttgatgctatttttcgggacttgttgcaacacattagcgacacagtttacgatatgaaaattttaaagttttttatatgtttgcttacttttgcagatggcttctgaacttaaacttccaatttcttagtatttcacagtacatcttacctatcgaggtataataggtttagagatatcaatgctgtagaaaatagtgaatcgaattatgtatttcatagaatagtacatatt

SEQ ID NO: 317791 - DNA, 1951 bp, Cannabis indica
tttaatgtcaagtagctgcttctgtaaatcagagaaaccgtctttgtttatcacgctcagcctgtctttgaactgcttcaatttagagacaatctaaaaattttattaccaggaatactcatgttccagacttcctttaattggccatcatacttaggatgggatttccttccacatcacaaaagaaagtaaaaaaaagccttttcccccccaccatttgaggatgaagagataaaattgctagagagtgatcaaacaaaccctcattgagaaaaacagcctcagctagctcatatttagtgatccaagattgattggccatgatcctatcaaccttggaataaattctatcagttctcggttgcttgttagaccaagtgaaaaaattcccgctagctttaacatcttcaagtttaaagaaattcacacaagtaagaaagtcagagtcaggatagcacctcaccctatgccccaccctctcttccttggctaagatgtcattaaagtcccccatcaaacaccaattttcatcagagcatagttcacataagtccttccacataatcttcctttcaccccgactgttagaagcataaaccactgtgagcaagctattgaatccatcaactattgaaatcttccagtgcattagttgactagtacatttgaggatgttaacagtaaatctatagggattccaagcaatagttatctttcctcctggatgccaagcaatattagaagagaagcaccatccatcaaaaacattagagtaaaaggctccaagttttggagcctttaccctagtctcaaggagaccaacaaaatcaaacttttaagtattaataaattgctttattaattgttgtttagattgattgttggctcctcggacattccaacatagtagcctatccattgaaaagagagggatccccccctcttatgttgtcctcatgtactaagtctgttacaaatatatcatttcactttctgccaaatttccaacaccaggaatagcagttttttcgacattaagggcctgaaaagcattgtgagtctctgttgcagcagccacttcctgaggtttctccatactgcttgttgtcttcccttttgagaccttagtaaaaccatcagcatcagtttccatggtctttctactatcttttttgaccacccattgctgctttgcagggccatcttttttacaatcagttgcagtgtgtccaatgccaaaacagtgcgaacaactgatcggtttccattcatactttacaccaaccgaagtggtgtagccaaattcattttcaaattcaatcaaatccgagagttgctgatccatgaaaacctccactaaaactataggataggtcagcctttctctttcctttgtgacagagtcctccattagaggcttccctatttgccccacaatctgaaagagagacctttggccgcaatatttcagctctaactcctcaagttgtacccaaattggaacacatttcacatcctcgttttttaaaattgacattaggatcccaaggtttcataatgacaggtctacggttaaagaaaatatatcccccattgagaacttgatctctgaactccaaggaatgaaacctgatgagaaatattccataggttaacaatttaactcgatcaaccttgtcttgccatattctttttgcaaagccctcaagaacgtgcaatggaggattaactccaagaacatagcacacaattgagggcttccaaaataacacctcctcttcaatatcatctaaagttatcttcactttgccattaccctactctgaatccctaaaggaactctccagatttctcatcacagaatttgatcgcaagataggaggaagtgatatttaattaaatagaaaattaatatttaagttgattttcatcatgatacttaaatatttga

SEQ ID NO: 317792 - DNA, 969 bp, Cannabis indica
  modified_base (19)..(19): a, c, t, g, unknown or other
tttaaattattttttttanataaaatatctaattaaaattttttatcttaacattaatttacttattttttaaaatataaaataaataataattaataaaaaattaataaaagacttattttgtaaagtaatagaacatctgaattaaagttaacttaggaaactaaaaagatcgttaaactaaaaattctattacatagtcatattttatatagaatatagaatgaaaaccccacttgaaaatattttctactaatagtttacaataattatgctaatatttatcaattaaataatatttatgtttaaatgaatttacttcaagatcttaaacatatcttcttattttaacttcatattattccaatattgtatttccattttttttttttctaacaattctttaactttgtttttcccttaataaaagttaccacaaacttcctttctaaaaaaaaatttatttattcacaaaataaaataaaacaatatgaacttcaccaaaatagaaataatgaaaaattgaattgccctagaatttgaaattttagacccctatcatttttcaaaaaaaaaataaaataaaatttaagtatatattttttttaataatatttaaaatcttccaacaaatcatatatactttgaatatatttagtaaataaaatctttaaaaatcctacatatatatatattattaatgtaggatttttaccgttttaaccctacaccaacaaagccacaatatcagttatcaaggtcaaaaatgacctttcctagtctaagtaaacccttagactaaacggcaccgtattaaccccacgacatcaatcttgatgtcgtatgaatcctttgattcaaagactcagtagaagagtctagaatcccaaacactcagacacaaaacactcacacactcacaaactcgaaaccctagcagagcaagttctctctgagaacttgactcga

SEQ ID NO: 317793 - DNA, 945 bp, Cannabis indica
tgacaatctgtcaatctaggcgcattccaagtaatcaatcggagatccaaattttgcatcttcttagtcttcgtcaaaaacaaggacataggtcctttcagagaagaaacaataagttttgggtgacaaaaacagggaccagtgccaaggttgacacctggggctagccttgtgaccaagttgacattttgtcaatctaggccattttaattggaatttttcgagaacacttatgagaatcttcttcatttcataaaatattaagattaaaatatatctagggaccaaacagaatttttgaggggccaaaagggggacccagcacccaggttgacacctggggttaggcttagtgcccaggttgacatattgtcaacctgggctgtttctaatcaagttctgcaaaaagtctttggggaattttttttttgtggtcagaaataatgaatattcaagaagacttgagaagaaaaacacaatactaggcccttggaaacaaggctcagcgcccacgttgacctggtgctggtccggtgaccatgttgataatcagccagggatgatgccttcaattgctcaaatgtcaaatccaatgcgaccattaaatatgaaatggtcaaaaagggggtaagatacctcgtccttaagtttagaagccttataagtatgaaaaacaaaatctcgcgagctctggagtaagtacccaacccccaagttaacaaatggcctagtgcgctgggttctgcatatccaaatctgatgttgtttcaaccattcatttagtttttcacataaaaaaatatccatgaagtcagagaagtcaaatcacaactttgcatttctcatttctagcttactcaaaaatgaagagttttgagtctctcatttccgcaaaatagcaacatctctgagaactggtgaccaactttgccaaaacatagaata

SEQ ID NO: 317794 - DNA, 577 bp, Cannabis indica
actcgggacccaaatctaagaccgagacccagaactagatgctaatgtcgatccctgacatggacccaaactaagacccgaacccagacccgaactcacactcgaacatggaacaggacccgagacccaaatctaggactaagacacaaaactggaccgcaatctcgatcgttgacctagatctagactaggacccgagacccaaacaaaaacaagaccaggacctgcgattgggatccagattttgaccctggatcggatccagggcttggacaagactatagtcggtgtcttaatctagcactcggactaggacctgaacctggactaggacctagacctaaacccgaacctgggacctacaactggaacttgaactagaactgtactaggaccatggaacagcaccggaactgtgaccaagacctagacctagaccctgacccaaccctgacccaaactgagaacagaactcgtgctcacaaccagtcccagacccagattgggaccgagactaaaacttggacttgaacccgaacccgaacccgaactgttggaatttattttaccaggatct

SEQ ID NO: 317795 - DNA, 3094 bp, Cannabis indica
acctaaatagtctctgatggctcttatcctcgactcaatgagttcggcctcgaaagtgacgttggggtcctggagagtctttgacttacgaggcttggaagacataatttcttgagggactacattctagaggtaatgcacccgacccacattgtcctgagttttctcgtcagctgggactggaacctgctgccctgacatatacttgggatacttataatcacaagtatactcattttcagcgagtaggccaacagatcttagattggcttcattcaagagaaactcggctgattagagaccaaagggaagacctagcagaagcctacgtccctcggccatctcgagagtggggggtggtcttttcgagaccgctgtcaaaaggataaaatataagtcagcgaggccaaaattaaaaacatagaataatttaaaaccaagtttggggtacatggttacttacgtattatgcaaaaggtagttgtactgattggggagagaccacttgtgtagaagaagtcttctttgaaaggggtcttgtttggtaacccaacgatgatcttagaattgcctgtatgagtcccaacatagtaaaagcctccagcagcatttttcctcacgagccaccggtacttgcttttccactagttttaccataggccccctcacgtccctagcgagtaagttgttgtggtgggtagcagctaaattcaccagggcaacagatctaacacgaattttctgtttttggtaaatgcaacaagtccttaagataccacctacatagtctttgatggctcttatcctcgactcaatgagttcggcctcgaaagtgatgttggggtcttggggagtctttgacttatgaggcttggaagacatcattttgaagtccagattacttggtggaaaagcaattgtgactctaggtaaaaataagggcttagctaaaggaatagatgataaaattgggaggttcaggccagggagcatctcgtaagaatccacattgaccctctagcaatatcatcctggtgggtttttatcaaatggtttctaattcttgcatcatttatctctaattttgactggggttttgaagttttgcgtttgtaggggatggcaagttcactaggatactctgtttctacggattttggagaataaacttctgaaccagattgggacatatttacaaaaagagtaatcccaattcctggatgaaatttatcaaactagaagctttaaaatatgagaaacctaaaaatttgtactctgcctaaaccctaaaaattactcaaaatttcaaaccaaaatcactaaaagtaaatggaatggcaaaaaagtagactataaaaacgataaccaaaccaaaaaaatgtaaaaaaaaagaatagagaaggatgggtcacttatcgtttgaagtcgggttgttgtacgatgaaccattctacaactgaagatggagcgaatggtgtgatgatctttttgaactcttgaggtcgaacaataaattcgaataaacacgcaaaaagaatgtaagtgatagtgagggcatgcaaagctttgtaaaatcaggatggagtttttcacagaaaggctcaagaaattttgaaatggcgaaaatggttaaaatgtggttcttttttcatttttataccattgggttttgtctctgttagattaagaaacaaaggatccaacagatagaaatgagagagaagtggaaaagatggtttattaatgctcatgatgtgcctcgaaacaataaaccgccaaattaaagagaatgcattttttcataagggattatggcagatataccctcagtaatcatttaaaaagcattttttattgaaaatgactttaaggggcaattgttaaacccgaaattagctgtacttcagaaggtgacacacgttaatctcgtggaatatgaataaaaaaatataatggtaatcatatcattaaatgcaaaatggaataactcattaaatatagaataaatagagtatatttataactcgctaactgcacagtcttaagcaagacaagaatgtacaaactatcaatttttgtatcgacgagaaaccatcttgtctcgaaaggcaaaatcccgtaggggccatagataacgcatagcaagacatccatctcactacgtctaagaaggcattgacgaggcgagtcagttattagaacacttagcgtataatacacattatactaactaagtgtaataacttgaaggtcatgattgtccagtctgcaaggctttatggtcaaagagaagttcttaagtttgctcaatgaactggtgctcatgccattgctggaaggcttatgaataaaccaagttgttcatgtatgaggtgagatacctctagcgagatatcctggaagtgagtttctatcaatgttagcgttgaccaccttgaagacaatttaaatcacaactgtgtgattttttaatattatatacacgtacttaaatggagtgtaataaaagcccataattttgatgaatattgttatgggattcgaatttgaatgtaattaactgtcaacctatattactataaataggggcagattctacaaaaaaaaaggaggaaaaatcttagagagaaaagggagtgtacagattgtaaaaaccctaatactgtatccaaaaatatctgaataagatagactcgtggactatgcagagttaactgcaaaactacataaaaatcttagtgtcatcgttattattttcattatatttgtacttgatttattacaaaataggttcataatcgttaacaaaaatctgcgttaacaatatatatatatatatatttgttcatgattatagtgtcgtcagaacactggaatataatcatgattatatgttcaaaagtttaatttccatgatttgtcagttcattggatttagactgacatgatagtcggagataaggtatacttacaccttggataagtgttatgtccttttcagggcattggcaaagtttacaagtatcagatgtatggagtgtacattggaagggaccgatattgatcttggatatataagatatcataaacttac

SEQ ID NO: 317796 - DNA, 1476 bp, Cannabis indica
ggaaagggagatttgaagtcactatttctacctatgaagagaattcttttatgatcacctttggctgtgaaggtgacttactgagagttttgtccaaggaaccttagcatttccataaccaacatatgatcctctgcactccaactgttctgtcaaatgctccattgggttcttatactataactcatttttgggttcaagtgtttcgattgccctttttgagtaagtttgaatctcttgctaaggttattggaaacttacttggtacttacatcgatgtccatgaagactcgctcaatgaaggatgggatccatttctccgtatccgagttggtattgatgtttctcaacccattctccgtggccaaacaatcacttttccttggatgtctgatgaactttggcttgattatcgttacgaacgactaccagatttttgctatgaatgtggtattataggccatgtatttgacaagtgcccatctttcctggaaaaactggatgaaggcaaggaacctgaccttccttatggtccatggcttgaaggatctcctcttccaaagtccaactatgatcgctatagacaagatttttctaaagcagggccttggccatttatcactagactggctcgcaatactatttcccctattatcaaccaccctaaaccattccctgctcttccatcactggtcacttcgcgtgagaaagggaaacaagtgatctaggataatagcagcccctctgcatcaacaaagcctactaattttcagtcctttctagcagagagtagttccaaggctggtacatcttcgatcattaatttggacaagcattgtgatgataagccgatcatttatctcttcctccttcaaccacggttaaaacagtcaaaaatgtatatcaaggcaatatcaataagtcggcttctgtttccgcaacaacatctattatgctttcagttgcaactcctccagcatatgttcatgtttctcctcagaatagcagtcgccccttttcccaagattccactccagtaacaacaaattccacattggttacatctattcctctggatttctcggctgctaccatttcgactgctaccactacttcaccaattttcactcatactgagaatagaatgccatctattttcactaaaaggcagcatgtttccactggaggtaatgtgcgcactgtgctgaagagatgtcgaacaagaatgactcctcttgaagattccaccaacctttcatcacactaacatcctgaagcttcttatgaaaatgctgatgtttcactacaagcagatggtgatggtgctctcttggcgaaggctgatgttcagcctcgccaatcgtcatgaatatcatctcttggaatgctcggggcttgagcaatccgagagcattccgtcaattgcgtctgctcatttctcaaaaaaaaacctgatgtaatttttattatggaaac

SEQ ID NO: 317797 - DNA, 826 bp, Cannabis indica
aactaagcggtctttacactgctgagttgatttggtatgggcagaggtgttgagatgtctctactattatagttaatggggtggggtcgattctaggatgtctcatgtcttttctcatgaagagttaggagtcatatccattgatcttttgtcttttatgtgcatttttttatttagtgtgattatgtttgtttgtccttatattttgtttaagcctttaataatgatgttgctataccatcctgcctgttattttaacgagattagttgttaatgtaggggggatcattgtgatctttattggattgttggtgttttattgatttcctcaagttggttttgtgaggtggtcatggatgtctctctcttctcgggtatcaaatagatttctagattattattgatcttgtgccttttgatgttctactttgttgtgttaatcgtcttgtgtatggttggttgtatatttgttttcatttattttactttgaataatgattttgttattgcccaacttgttaattaagacaacttcattcatatcggtccttgtcatgcatatataatctctatttatataatacattcactttgatatcatactatatctgtaatccgaactgagattatttgcaccgaagaacgagcataaatgaatcgtactagcaaccttgattaaagattcctaaattttaatatattgatgattgttttatttatagctaaatagtctaagttttctgtacaactacaagctataacctcatatatgaataaagattttttcgatatttacatataaattattcagtaataaatattaata

SEQ ID NO: 317798 - DNA, 1604 bp, Cannabis indica
gtatttttgtaatattgttacctttttaattaaaattgaaaaaagcccaacatgttaatcataatacaataaataacggtgtgtaatgccctaatacttaggcgcgctacagtgatttttaattattgtgccacatttgctaatcaaagggtttttccttaaaaatcgtgtaaaaataaatttttgatttaaactatttaactttataaacatatatatttacataaattgggatgtttaaacttttacaatcataatcaaaataacttttacagacatgtcgcacatcgactacaaaatacagcccaagtcatcctgagaccgaacattccaggtcgcactgtctcgacatgtacaatcatcccccgagctcagaactcactcatgttcaacctttgcctttcttttacttatacacgaaaataatatatgtgagtcaacagacttagtaagaaaagtatataacatacaatatattactgacttgtgtctaggcggccatagacctatccataaggcttatataatgaccgtttaattttaatatgagaattaacagataattagagtttaatttagaattagacttttaattatgatttacgtaattatgaaaatatatttaaattctaagtgtgttaattatgcaatgtgtaaaatttgttttttatattttatccccggtaacagaggaatgcgacatttgaccaatagagtcacttttcttagggtttagtattattgaaatagcagggaattttagatagacatttagaattttgaggtttgacagggttataattttgaactattttacccttaggccactttgccatttaaataccttagtgggggtattttagtctttttcagatggcttggctaggtggcaccctctcttttgggcagctggccattgttttatttaatgaattaactaaataaaaataaccttagttattagtggataatttcaaagaaaagaaaaattagaaatttggggattttggcttctccttcttcttgcttcaaatcagctagggtttcagagattagcagctggttcttttcaattaaagtagggttttatcaagatcttagtgattgtaatccaaggtgagcttccccctccttgttcctataaatttaaacctttaaagtttagattttcatacataacttggagttaggttactataggtttaaattgagttggtttctattttctaaggttaaattaaagttgttggagctagtttggacttaattggatgcttgtgtggttttagatcaaagtttgagcttaagaactcaaactttgctctttaatggtagattgtgttttctgagtgtattgcttggttttattgcatgatataagtttattatggtatttttaggtactctggaacgtttggtactaattaaggttgaattgtgttgtgtgtgaattttttttggtagttcccgtattgaattggtcaagcagttcacttttgcacagtgaccggttcccctgacaacacacttagaaactgggttttatgttgaggcagtttggggtacactagattttcatgttttagcaatatttagggtattgt

SEQ ID NO: 317799 - DNA, 1276 bp, Cannabis indica
aaattacaataaaataataaaaatatttgcgcaaaattctacactagctcgagagtcaattttgaagcccaaatcgtcagaattgtggtggagtatgagacacacttagatcaatccgttttgaaaagagctttcatatgccacttgaatcgtgtcatttggataaaaattaagagggttatgaccattttactgagcggtgtgcactactgaaagtgactacgagatcaggttgacctttgacgcctaggttgaacatctacctagccgcccagaatttggtttcttgggcttcaggcatattttgatatgcttgaatgatgtgatagttattctcaattcattctttgaccttgatgaagttctcttggcaattttactttatatgcacaggtaatgcccgattaccagtaaatctcactagggacgactaggtgaaaatcaggtgatcactaatgtacacgagttgttttgattttgttaccaatattttctttatagatataacagttattttattatttttaaatatgtattttgtaatataaattaaaagattattttattattcaaagtgtgacctttgactacctaagttgtagatattacatattactacttaatataattagttacttaaaagaaattccataaatataaattaacaattttactatcaaaaaattaaatataaacttattaccctattaatattattgtagtttatcttttttgagaaattaattaataatattattgtagttgagagagcatgtgatagacgacagcaggtacatgtacaaactagaaagaaacacatatatatatatatatgtgtcagtgtaggtatttgaaagtttgtcaaaaaatggaagtatatgtatatgaataaatagctatgtagggatataataagtatgaatatccatttataacctcattaccttaactagataaaacttttatcgatatctgcaaataaacatacagttgttgtctgtctatatgcattgtacactcaccattcatccacaaatatcatatatagtattatagggaatctttcttttccttcactactttcacaccacaatatatatatatatatatatatatatatattaatttgcagatcattcatttcatcagtgtatagtgttagacttttatttgggcttacattaaattttattggttttattaaaacttgggttgattggatagttctttgctgtgttagcccatattgttggtgatcaattgttaatgggcttag

SEQ ID NO: 317800 - DNA, 1960 bp, Cannabis indica
ttacatagggtcatggtccccacactaactgaaataatattttttgtagtctcaattaattggttttaattaattaattagaattctaaataagattatgtcttgtttgtgaatttttaccaagaaagggcttaattgagaagaaaaaataattcaaggtttatttattaattaagagaccttagaaggtctaattaataaatatatttaaatagtaattttatttgataattatttataattattaaatagatagaattagtatttaaatgactagagaagaaaatggcatcattgaagaaagacaagtttgtttcattaaggaaacaaaataatggaaaaattctaacttatgggcttcacttaggggttcggccatgagatgaattccaagccattggatctttctaaccagcccattaagctctaaccctaaacttaatgaattcctataaatagaaaagtataactcttattttcagataactcaagacttcagtctcctttgtcaaacataaattggaaaataaagagagagcttcttcttcttcttcttcttctattttgaaaattcctacttcttcctcataaatttcaaagctcatggtgattgagagtatgcccactcatgtcaaagcctagcatagtgtggaagattgtgtctaaccaaaataaaggagagaagatccagatttagatcttgataatgctctactatataaaagaatcaaggctatatatttgaatggaatgagtcattatatcttagtgcaatcaatgaaaggatttcttaatctcttatgtgcttattttattgttttagaacattcatatttaggatgttagattatagattataatcaaacatatatgttagtaaatctagatcataataaaataacttccaacataaattgtcttatcacctctgtagtttcgtgtgatcgattgttaattgctacattttgagcccctagacttgctgcctgtctatccatccatccttgaaaagcctcttttgatgggcaaattcttcattcatggctgctccggtatctatctgcctgatcatgatgatgggtgttagtatgcttctgaatttaagatactgcttctttcaaattatacaacttggtatcatcatcgatagtcacttgaggttcgccaactggtggccctccggtacccgagctagtttctccaacaccatgggtactagtagtttcagtattttgagtgcctggagtaactccagttccaggagatgtgctatttggatccttaatatgagaatttctcagatttgtaggagtttggacatttggatcagtcaccataagatccgtagaattagtttcataccaaactgtgttgggatcttatgccctaaataaaacctattttaatataatatgatttgttatcaatagaagattagaattcatttatgtttacatgtagttttcatgtttatagtttaacacacaatttttgttaaatctagaacatatagttattcacaattacagtgatgtcaacatagtggaaagtaattgtgattatattcttcaaaagaaaatgtcacatcattcatcagtgcactagatttacactgatgtgatagtcaccgatagagcttacttacaccttagataagtgttatgttctttttaggacattggcaaagtatgctagtatcggatgtatggagtatacattgggctaggaccgatattgatcttggtaaagatattataatcttaccgttgtatctttcaaagtcaatatcattggttgatcttagattaaaagatcttaaccctgacatggttaggttcgatctcaagagtgttacatgtgttcttagagttgttagttaaagcctaccatttggttcgggtctttttcgaaacatgatagtaaaattgagtgggagcgctaatcatagatatgaaatata

SEQ ID NO: 317801 - DNA, 1084 bp, Cannabis indica
aaataattaatttttttattttaattttaaatatttattacgtggactaataaaattgtgccacgtgcacactgtgtacacgtagacattccaccatggcagtttacagccaaaaatggatggaaagggctaagtgctaacagaacttgggtttaagaggttttaccatcaaaattttagaattgggggttagttgcaaaaacctggccacttaaggaggttatgccgcaaataactctcctactaaatttgtattaaaagtttaaaacgctatattattatttattattgggttaaattattttggacttgtgctttgtaaaagttatcgattagactctattttgtaaaacgataaattgaactctgtattttctaaaatagtacaaaatagtaactgaactcagtttttaataatttttgtaatataatcaacttgaagacaacttataacactaacacgaatatatgcaaaaaaatatatccaattttatcataacaattctagatcggtatattattaactttgaaaattacctaattttaaaaaatatatggtctaatttatcatttaacaaagcatataatttaataagtaatttttacaaatataaagtggaaaattgtatttacctctattggtttggtatatatgttgtgtacacttactcatataagtaattttaacctcaaaagtcaaaagtctacttattttggtccttaatgtaatggggtaaactaacctaacatgtctaaactaccacgttataatttcaggtaattaatcaccaaccacattattattagtttatttaacagcagtatttttatatatttaattttgtagagatatgttaagtctggatctggattcttgaattgtattatgaccacattcaacgacaaccaaaagagaaagagagaaaaacaattaaaaaatattaatcaatacatgatgaggatatttatattttgatccaatatacacattcagaatgtcataggttgtagtaaattattagactaattttgtatagtataatataataaggttctgtttagcaacttaaaaaatcaatttttc

SEQ ID NO: 317802 - DNA, 1087 bp, Cannabis indica
agaattcatctctgttcagctcttatatttcactcttgtgcgatctctctctaactcgatttctctctcttattctgttgttgaattgtctcttatatatagcagtaggatattgatcatttacagaaataactaccaaccgaaataactaccaactgtcacgacagttaagtcggttggttaagtgttctaaaccccacatatatttatatatatttaaattaatctaaaattaatatgagtttaattaagttaaaacaaataatattaatattatatatatttaaattaatttaaaataaataatattaacatttatatatatttatgaaactaactttactaacagtgttaaatttaacgaatattcttatattcttaaaatattaggttaaactaataaaaattagtttgatagtcaaattttatatataaaagtatatttatatattgttgcaaataaaataccactttgaaattggcattattcacacacttgttctcgttgtatatagtatcatgaattaacttaaatttatatacaaataatagggataattagacaggacaccattttttgtaaaaaaaattatatttttatgtttaaagaatttttttttttacatttttttacggttttctataaaaacaacatgaaaataaaaagaaaactacataaaagtaacatgaaaataacatttaaataacatcaaattaacaacaaaaaataacacacagataacaacaaattaacaagagtacaacataaaaaagaccgtattttctgtaaataaaatcaaaaaaatcgtaaaaatatttaaaattccataaaaccgtatttttataattttttttgttatttttgtgtatttgtgaaattatccctaaataatattgatttggaagaagaattacactctatactctttttatattgtcctcttttattcttaccttcttttttaaagtctatcatttttacctctttttttaaacattgtaccaattttgcccctgtaacttcaagatattctccatgtaactctcttatgttagggtattttgggtacaatacatataaaaagag

SEQ ID NO: 317803 - DNA, 1711 bp, Cannabis indica
accaaactcaaacacaaacaatagtcacagtagaaaaaacaccatttgactattaaaatccaaagttttgagtttaaagctttacacatggttaaatccaactaactaacaacaaaaccagcttgaatccactcaattaaacacatctaagcttcttaaaacgacaacaacaactaacagcaaccacaacaccaaaatcaccaagcatgcaaccattttcttccttaaattacaaagtccactaaaggacaaaggattaaaaagcactaaagggtattttgggaaaactctaaattcccgactaatcctggcattcctaatgtctaacaaaactgccccgctatactaaaatattagattgtgattctactgagccatacaccgcgttccatgttgccggacaccggaaatgcaaaattatgaaaattcactatatgatatatttgatatgttaaggtacatcccaacttttgttattatgtacaaaatctattgaccaatcatatgtttcttccatggttggttgttgtgttaggatttatgtcttgaaaagtctataaaaatatttatgattataaataagagttgaacattttcatatacactagtttgttaaattattaatatttaatattgaataatttattacataaagatcaaaaattacttattcatatatgagattgtgacttgtagttgtacagaaaattaagatcacttagtcatgaataaaacagtcagcatcatattaaagtttaggaatttttaatcaatagttgctagtacagttcactgatgctcgttatttgggacaagtaatctcgattcgaattattgatgtagtatgacatctaagtgaaggtttaatatataatagagattatatatgacaatgatcgatataagtaatattatctttatcaaacatgtcatttaccataaaaacctaattcatatcatcaatagtagatcggcttaaatactgagtaatcatgaacttctgttcatgttattagctgttgattttatggtactaaatcagatacgcagcgataaagtttaattctgattatcattgtatcccaagatcactatatatattaaattaaaaataaatagatgaaaagaatatttacctattgatgtgtttcagagtattcttgattctttttgtatgttgtatccttttgggttgattggaaattcacactgttccaaatcgatccatgatcacacacaagaagttagtgtgagctacaaggagtaggcgcctacgctagtgtagggtgtccctattagttgtctttttgtcgtaattaattaattaattagttaattcaattatataaatatttgaatttgacaaagtttgccctttggttagacaatgaactatccagattcaatgagattcttgcactgtttgtggatatttacatcgtaacttcataagtgattttagtaattacgtaaaaaaaaaaattaaaattaaggataaatataagtatctaatatatgtaattgtaattagaagtgtttatgtatttatttaaaatctatatctatatctattctatataaagtgtgcctatataactgaaatttttggtttatgagaaattcataggtgactttttatttttatttaataaaataataaaatattatttatatataataaaataatcataaaacaaatcccattaatatt

SEQ ID NO: 317804 - DNA, 613 bp, Cannabis indica
tatttaataaataaataaaaaatcaaagtttaatatatacacacatatctaagaggcacctaaatctatttccaaaaaaaaggcgcctaaactttcagaaaaatatacctaaattttcaaaaaataaaaaaataaataaaaaagaggcacatttatgcagctgtaatacatttcatttttgaaaatacagctgtaatatatttattgtacatacaattgtaataaaaaagctaaccctaacttatttctctctccccttaatttcttttcaaagccgttgcacacatccaagagacccatggagggatcgacataggcgagggtgcaggcggtggacgatgcaggcgagggtgctggcggtgacgatgcaggcgagggtgcaggccgttggttcgacggtgcaggccagggctggtcgacgatgcaaacatcggtatggcggagcgatcagcataggtgagggctttttgtcagcgaccaacgacttcaacaaagcatgcatttgtttttgacgacctacaactttaggtactatggtattaatcagattttcttcttcttcttctaattcttttttaattagattttccttttgtcttctcaactctcctta

SEQ ID NO: 317805 - DNA, 1382 bp, Cannabis indica
gaatttatacattaaacataatcatgaaataaatcatgtgaaccatacaacataaaatgtgatttctgaacttttattaattaataaatctgattatattgaaatgggttttatttagggcacaaaacccaacaggcttatcgcgctctcagagggtcgaccgaatggatctaagtttttccaaatatgcatgggtactgtgcgaactctaaggctatttacatccaccttctctactcttcctgccgagacagggatgtaggccttcattcttaataatgcctttggacagcgagcctttgacttctggctggatctcaatggatagtcaagctgtgtctcttttccttttcttggacaagttctcctttttacaacttgagatttgtgatggcaaagaccatgcatgtttcaatcttttcttaactctcaatgaaagcacaaaactatttactgagatttttggaaatcgatcatctagagcttaagaaagaaactaaaataattagaaataggtatatagtttttacatgatttgggcattaactatccttagcccatgagtctatattattagccttttaggcaaatattacatgctgcaagagtttacatcatgaactcaagacctttattcccctcattcctctcataggagatgaagcttatggggattttttggcatagtttctctagttttagtaaataaacaatggtttttgtagacttcaaagagtcatccactatcttgcaaaatgtagcagtatttataggcgatctcttcattcacgtgctttttgggctaatcttgctagaagagatctaactgttattttggtaggtgaccgttccatcacatagtttgcagagatgtcaactctcactgttcggtcatcctatacgtgttgcttaagggcttctccttattgaattgctcttataaattgtcattggatcatttgggcaggtacaagttggcgtgcatgccctgtactatggcccaacgtgggggaaaagacctggcgccgtaccagcaaaagcatggttgtcacctctatagtctgataggtacaggcggagctctctcgtgacaccgtacggggatataactcattctaagtcctttcgcaacctacataggcgcactcgaggaaacccttagccttcgtagggcgctttgcttttgctctcgggactgggaaaagtcatggaacgtagaagctctacgcgtgctagccccgcagggaaatacccttcgcagaagcctctcgcgggaactagggccgaaggcactcatcagctgattattatctcagcttccttggttccacgtgtcaagcttacaaaaatctagacaacagaaaggatcaatggttagagat

SEQ ID NO: 317806 - DNA, 2293 bp, Cannabis indica
catgaaaagaagaactgtttagaagagatgttatagttgccaaattacttggtagttgcagcacaaggtcgtagtcttagagttcaaagcaaagtttaaagtacatttttggattatctgtaaaaagaaattattgaaatatagaattattgtagtatcattacattccgaacttgtaaaggtcctattacaaagcattctacctccaaaaaaagtgtgcaacaactgatataaaatgaatcgtccaaagatatgttgggaatcacctccttcataaacaagaataagaagcaataaaaaatatgaagaatataagtagaataaggaaaaataaaatgaagacacaaaaccaagtccacggaaactgaattaatgtagatcttcactacacggagaaaatgattttataagtgctatcagggactgaggactcactgaactcttctcacaaccgagacctgatacaccaaaggaaaaccgctcttgagctgtaaattatatatgaatagaatgaagaagagaggcccttatttataagcttcaaaaggcacccctattaatcaccagattaatatacctgaccatgttaacctattaatcaccaaattgatccaccataaatattatagtagagcaaaggctcgtatagaactcaaatctcctgtcaaagaatgttgttctaaagtgtgttaaccaatgagacatgagaacatgacatgtcatttagtgagttcagaaataattagctagaatctatcgctttcttctccattgttgctaaagtaaccaaatagccaataggcaatattctttagagtttatttattccaaaaacaattataaatgttttgccaaaaccaagtgtacttttatttccttcagtattcatcatcctgtaaatttacagttgcagcctactttattattattatgaaaaataaataagggttcgtttggtacaccgtgatgtattgtattatattgtatattattctgttggattgaattgtattatattagtattatttaatacaatactatgtttgatactgacttgtactaatatgttgtgtaaaataaattatttacagtaaacacgacccaaccctaactacggtctagactcggacttggacccaaacccatacccagagcggaactgggacctagaccccagacttgaacccgaaccccagacccgcagtcagacctaaaccccagccccaaacaccgaacctggacccaaaaccaatgcagacgccagacccagacccagaccattttcagttttgggtccaaggttcgagtccagggtttgagtcttgggtctgggtccgtgtttggtgtttggggctgaggctgttggttttatggtactaaatcaggtacgtaagggaaaatttgtatatctaattatcattgtaccatattctcaatagatctccagatgtataaacattaaatcaaaatataaattacatgaaaggaatatatacctcttaatgactaccagggtattctcaaaacttctcgtaagttaaatccttttagataaattagaaacttataccgtagtctttcaaatcgatccaccatacacaaggaatagtgtcggctattaagataaactataaaatttgttatgagcaagaactatttgagagagaaaaataagtttacttttttcctctgaattttgaaaattgcaatgtaaaagcttcttctgatttctcaaatcaagcttctattaatagtagttaattttccgttaataaaatcatatttaattatttaaataaatatttataacaaaatttggttattgatatttcagatgagggaatctctcaactaactttgagggaatatcttaaccaacttaatattttaaccacttttcaaattcaaatatgtatctaattaaattaattaaataattaattaacccaaaaagataaagatactaaagggtagacgcctaccttgttaattaagacaaggatgatgtcttttatcttgacaacttttgtcttaacaatgattgtcataataaattttgtattaacaatttgtgtctttttcctattaaattaatttgaaaaaaattatttatttattaccaaaataaataattactattttgttaattcaaaatagatttttccgaacaacattatacaattctttatccctacccttgatagtattttaaggtagtgattcggggaccatgaacctataattctaagctctaataaacttgattatttattgagtctcattaaccaaataa

SEQ ID NO: 317807 - DNA, 1403 bp, Cannabis indica
tttaattaaataaaaaaaaaacagagagagaaggaagaagaaggaaggggtccctttgggttgagcttcgtggtactaacaaccaaaccaaccgccattttcttcagcttcaagcttccttttcaattggtaagcatctatgtcccattgtactcattgctagaaagaaaaaagaagaaagagaaagtgagataaataggagataatggatgatgatattggtagtaagagaagagttggaactaggagtagtgttggtgtggtttcaggttctgtttgggagagtaggatgaagcatgatgaggttagaggtgggattaaggtcttcattgctggtgaggaaggttttgaagatcagactaatgggaatactccttcatcaccatcagtatcagtatcatcaccgtctgggaataagttgaggaaaggtgttggaaatggcaatgtcggtggtgttggtggtgggaagaggaagatgtggaaatcggagaattttgatggttttgagaggagtccgattcagaataacaaagggaagagtgatgaacaacaggttaaggaggttagtggggatggagcaatcaagaggagttcgattcaggggaggaggcttagatctgaggggaatgttggtaataaggaattggtgaagagtccaattgggatgaggaagacgaggtctgaatcgttgagggaagctagggaatccggcgagggaattgagaggaattcggtgcctgcggctccgttgaggaaggccaaatcggtttcggtttcagttccggcgagggccagtgttggtggtggtgagtctgtgaatggaattggattggtgaaggtgaagagtgagacaaatgaggtgttggatgaatcaatggatgggtctgttgaggaaattgagaaaagcccaattgagaatgtgaaatctggatctgatgaaggttgtaaggagtttggtgtgtgcgaagaaaaagtcatttctagcaatgtggaattactgaaatctgctccaaaatgtgatgatgaacacaaggaggaggaagatgaggaggagcattatggagatgaagttgttgttgaaggagaagaggaaattgaggttgagaagaaaagtgttgaggaaattaaaaaaccagagccagtaccagaagaaccagagccagaatcaaagccaccagaaccagaaccagaaccaaagccaaaacccaacaagattgtctatggagaaaaggttgtgaatgaagtaaagaaggtccattttgaaagaagagatgttaagaagcttcatcaagcttatcaaaagcaaccagagcccatgtctttaaatgtgaaaaaacaacttcctcctgtaacaaaaagggccactgttcattcaagtttcgctaaatcttctgcatgtgagt

SEQ ID NO: 317808 - DNA, 458 bp, Cannabis indica
aaaaagttgtcactaaaattaacagtattttgtagtcactgtcattgctaaacacacttatagaagacacattcctaacaatatataaaacaatattttatatattcgtgcctttaaacaattctatgaaatttacttgaacaatataaaacaaattttatattgtaaaaaattacataccctagctgcaaatggaattagacaaattaattattttcttcgacaccttattaaatttttattttgtttgattttatttttggtcctttattaatacatatatcttgagaatgcataagtaactacttctatttattgatcaaaaataaaagggcatgttaataaagattaactaagatctaaataataacggtctatgtcaataatttattataataatggtctttgtgactctgaatgaaagttaatggtctttgtgactctatactatgattgat

SEQ ID NO: 317809 - DNA, 3131 bp, Cannabis indica
ttggggttttttcagcatatgattattttatgatgctttttccccttggtaactaagtccacccttttatattacaacatattaatataagatgatttaattcaccattttttttcatcccaaattcataaaccaaccaaaagactactgatctttacaaaactcatgagtcagttcatttcaactgcttggcaaagtctacatatttacaatggtcatttactaatataaatatacacagcttttataggaatgaacaagatattacacaagatattacaagatatagcagcaattatactggaacaactcatttagttatcatttccatgtatgaagctacttttgaaatgtaatcaggaatttgttcaaactatgaaatcataatctacacaaaatgtcaccagaaataaaattacaaaccaccccacaacacaaccaaaatctaaaagtctgataagggatttatataaatgatgttagaagctgcaataaggcattccataatctcaagaataagtattatttataaaaattatatgatatgagttctcaattttattattagaaaacaatgaatactagaatttacagtacaaggaggctatagactatagtaatacaaactcagacatctatttctctctagcaggagaagcttctccattactccaggctgtctcaccttaataagcaaaaacatagttgtaaataaaaaattaaaagaaaatgagaaaaatgtgaattaatcaaactatcatatgtaactgatcttgaagtactctttcaatgtgagtaacacgagggcagtgctcaaccttcacatttgaggaagtgatgagatcaattctatcatgtggtattcttaactggggacataatttgattgaaattttgctgagagttttgaagtcatcgatccaactttcgatttccactaaattataacagcgcaaaatatggagttgttgcaggctggttacttgtctaagccctcctttaagataatcatttatgtcagcaacattatccaatgtcacagagcggaggctgtgaagggacttccacatatttggatcagaattgggcatgtcaatgatatgtagtgtcctcaatttcgagagaggagtaactattgctgttgatgaaatattctgtggagctggaactggtgtcttcaatgtggagtcaagagcaactgtggaagaaactggttttggtcgagaaacttttttaaaagaaggtgattttggtttcatatttaatgactttgttcggcgagggcttctccgcgacttgctcttggtgagagtactagatggtgatgatgatgacacttccaattgagatgttagagctcttttctcttctgttgctgttgtcacagttcgtttgaatggcttccaacttgtgtttttgagcactagtaattcttctaaacatggaaacagaggcatggaaatgagacaaggacaatcctcaaccaccaatctagaaagacaactaaatgtagcattttcacatgaattatctttacaccatccctttagttttggcaaattagtaagcctcagctctttcaaggttgaaaacaatgttgtttttgttgatgtttcatccataatgtattccagattcatcaactcatctactaccaatacttgaagattagtcaactgatccagccgcggtaggcaatggcatctgttgcatctcgatattgataatttcactagatttttaagcaatggaagccaactcgaaaacttgctaccaccataagtagatattgacagctctctcaagtttggatgtggctcaagatcttctagtgcttcttcacaatcagcttcattaacagaagagttaatatcccaaatcaaaatcaaagataaaacatctttttccctttcatgtttgctgctgctgtcttatcatctttgggatttctcaaattttttattttgatctctcctctcaagtagtttagacaacttagttcgtcgagctttccttttggctttgaggggttgtccttactcagcccgaattctgacaatgttcgaagatttgatagttgacttagtcctcttggcatctgagttaaacaatgacatgacttgttttcgagatgtctcagattaaataacctcgtaatgcctctgggaagtgtttgaagattactgcaatggttgagtttcaaagtctgcagaaaatatagcccacaaatagactttggcaatgccttgatatcaccattttgagacagatccaacattttgagacagatccaaattacacaaaagcttcaactcactaatagaatcaggtaatttcttgatgcctgtgttatgcaaatccaacattcgaagccactcgaattttggaattacatcacaaatagactgacttgatccgccttcaattgcccgctgatattgccaaggcaaaaacagacttcgaatccttttcaagtcagaagatgggattgaaatctgccatgatgaatctaaatgaaaatcaaatgatacatgtcgaacaagtgttgcatcatcaattctatcttcctttaagattaaagtagcataagctttcccagctatttgtttagcaagatcatgcattaagttaggcattctgcatttttttatgtaacccaactcatcttgctcaatttcatgaaagaaacatcttccatgtaaatccacaaaatacttataacccaatctctcaagatcttgttgttcattattgtcctgatcttgatctgactctgtaataacaataaacccctgtgacatccacaaagttatgagtgtgtctacatcaatctcataatcttttgggaaaattgcacaataagcaaaacaatctttcaaagcaaatggtaaatgatcatagctcaactgaagaattgccaaagcattattttcagtctctattatcattgaaaactcatcaaaaaacaatttccactcttgttttgttttcttaatacgcaataagcttcctattgctgttatgaggaaagggattccgcggcatcttttcgcaatcccttctccaatctcaatcatttccgggtcagttagttcttcttcttctctcacagccactttttggaatagtaa

SEQ ID NO: 317810 - DNA, 1116 bp, Cannabis indica
tggtaaaatcagtttctttgatcttcagttgcaagtaaaagaaaaggctcggatcattgaatattttaatcggtggtttccatcttttacttggtactaaatttgcagggttgtttttgtggggtcgcacgccagtgaagagagtagaatttgaacctgctgttcatacttgcaatcttttggtatcaatcactagctcataattgacataattttttcctttttcttatcgcccattgctattcaagagaactggtatagattccataatctgcaatattttgatagtatttcaacaattcaatattttaacacagagacaacaatagtaaaacaacagtaagaaaaccatcgacgtttattctttttgtttcggtggtccagctatcatttgggtgcctaatttttatctatatccctaatttccaatataatgtaggtaattaatcaagaatgactctagaacaacgttagaaattttaaaattcaacgcaatttactaatcgactttttttctcgggaatgatgtatattaatctgcatttacttcaatcacgcacgtatataaatacaatttcagaagatacaaattatttttattattgaattcaagatctatgtttgggcaattatttttaattttttatttaaaagaattatgtgggtttaagtgtctagccttttttattcattgaattctgatcttgatgaagtttttgggtgtttatttgacgtcgattcattgtttttgttctatcttgccggaattaatgattattttttaagtattcttatgttgctgtggtggttctgtccgtgggtgtagaagatggaggtgtcatatgtgatttacgatgtgtacaatataaaaagaaaaaaaaaaaaaggccaggacagtatttttgtaaagtttgtcatgtgactatataaatgtaaaacttaccttaaaatctaatatttataaaaccccccaaaattgtatcactacactagagtaatagaattgttcttttaaatagtgattaattgattgaactcctaattattgagagaaagtgataccttactcaaattgaatatatatatatatatatgagaattgtaagatgcataaaa

SEQ ID NO: 317811 - DNA, 954 bp, Cannabis indica
atggctactggtcagaggtaaattttgacaagtcctcagtgttttttagcacaaacacctcctcttcaactcgacaagtcatatgtaatcgaatgggcatccaggaggcggttgagcatagcaaatatttggggttaccaagtacggtgggaagaaataaaaatgttatttttggttacctgaaggacaaagttcaaaagaggattcaaacatgggataacaagttcctttcaagagcgggcaaagaggttcttattaagtcagtggttcaagctcttcctgcttacaccatgaatgtttttctaattcctgttggaatttgtaatgacattgagcggtccataagtcaatttggtagagaacttcttcaaaaaaaatgtattcattggatgagatatgacaagctttcggctcataaagtcaatggtggattgggttttcgtgactttcgagattttaatcttgctttgcttgccaagcaagggtggagacttctcacagggggtaatagcctaatgagacagatttttaaagcaagatatttctcttcgggttcttatctcacggctacacttgggtcgaacccaagttacatttagcgaagtgtcttagaagcacaagatttagtttgggcaggagttaggaagttagttggtgatggctctacaacaagtgcacacgcacatatttatatatgggattcattcactttcttcaaaaacattatttgtactgctgatgtgatagtgtaataaatgatagagtagtaatttcacatcttttaaaagaggaaattaattatgagctggcataagtgacggtagaagaaaaaattagttatttttcattatattactgcttaaaaaaataactaagaaactatttcataataatcttttcagaaaaaaaaaaaaagaaaaaaaaaacaattttcattaaaattgattccaatcg

SEQ ID NO: 317812 - DNA, 949 bp, Cannabis indica
aatacatccattagatcggatcgaatcagatgactcgattcaattggattggatcggatgacaaaatctaacatctaataaataattgaattggatcagatagatccaaatccattgaatgtgatccaatgaacacccctagttatactattagcagaatagcatccacacgtgtacttagcatacacatatataatatgtaagcatatatatacataacatgtccactaaacattttaaaagtttttttttaacaacattttataattttaactcaaataatcactttaatacttgctatagcaagttttggctaccgttttatgtgttgttaggatattattgtcattcaacaaatttatttagagaaattttatttctaccttataaagttacagtacactctattttaataatttttattttatataaaatatatctttagtttatattaattttttaattttttcttccttcgcatattcttaaaaaaatataccaataatataaaattaaaatatattttaaatactaaagaaaaaattaaaacaaagaattatatgaaattttattagaaaaaattataaaaaaatatacataatttaaaaaaaaatgtgaaaacaaaattataataattattgatattaagaaaaagtaatgtgaaagagaaaatttagaaaaatattgaaattaatttgtaaaaattaattaaagttaatttatttaatattagggtaaacttatctataaaaaaaattcatttatttattttcatgtagttttcaagtactgagtttagttgggaggaatgaaaatataggaatgggaatgggaataggaataggaatagggatggaatggaataaaatttaaaatgcataaaaaaattgataaaaaagtcattaaattttttttcttgttacattggaatggtcattccttttttttt

SEQ ID NO: 317813 - DNA, 1961 bp, Cannabis indica
tctctctctctcttcttttaaaatttaaatataaattcacttcttggtggcttaggaatagaggagatcaatagatacaaatagagaacctcaattctcttttttcattcaatctgcacgcccaacatagtaaaattaatagcctgagtcttctgcttcatcagtttttcaagtgttcttcagttttcaagtaatttcttcaaaattttcgatttttatttttcgaaatttttttcttcttcccacttataaagctcaatttaaggattttggatcttgttggaaatccttaaacttcattggtaagccctcccaaaatcaaaaatacaattttcatgtgcgtcgtgtgagctaaactttttccttcttgcaaggtgcagtttgttttaactttcttggaaaaagttttcttgcgctgaattgagttgacattcagctatttgaagttgaggaaggtcaagtttagagtagacatgcttcacgtaagaagaattacaagaaaacctgaagaatatgtccgagacaaaggccaattaatttgtgaaaaactcacagtgccaaagtctaaagatctggacaaggctcgtggtggaaaagtcatggccattgagttactcaatgttgctattaaaagtgaggacccgagagatcgagcctttgaactaagaccacttgtttttagttctattactcaacaccaagttgaattggtaagagatgagtactcactacctgagactatcttcaaaaaactaaggacgggatgtcctagtggctctcaaaatccttgatatagttcttggtcaaggtttcatatgaatgtgggtgcattcttgcctcttcacccgtggtttgtgttgattgctaactactttggggttttcccttattagataaatttgaatggttagcagattttgtcgacattcttcatcttttatcgtgtgcgaaattgacctattctaactcctcacgagatcaacttcttatgcaatctgaaaagaagtccttctcgaaaaaagaatggtttgttcccaatcaagtaaggccaaaacttgtcacatgcaaacacaatagccaacatctccttctcagtagtggcataattcaattgagcatcagtcaaggttctattatcatagcaaatggtacaaaaaaattgtcaactcgttgacccaacacagctcaaatggcgtaattacttgcgtcacacataatctcgaatggtaactcccaatttgaagtggtgacaataggtgttgaaatcagtttctcctttagagtttgaaaagcttccaaacactccttcccaaactcaaaatgcactccattacaagcaagttggacaaaggttttgatatcttagagaagtccttgataaacctttggtagaagccaacatgacccaaaaaactttggagcccttttactgaaactcgaggaggtaagttctcaattctagacaccttggctttatcgacctcaatgccttcttctaaattttgtgccccaatactatctcctccttctgttggaaattattttaccaggatctagatttactaacaagtatgttggattaacaacctaatatgaattctaaaacaatgaaaataaacacatataaagttagaaaaccttacagtgggtgcagcggaataatatgactccttccgttcagatctctagcccttgattcctttctgtagcagagcatcaccaagatctgaacctggatcttcttttctccttctttgatgcagaaattccatagtcttccatactatgattgagataccacttgatgtgtgtgggcactactcatctcacaaggatttcgaaaattctctctcttttctctcttaatttcgtggctgatagcatgcaagagaagagacacaaaggttgctttatataggggagaagggagagcacaactttccaaataaaacagtttcatc

SEQ ID NO: 317814 - DNA, 920 bp, Cannabis indica
cttatgtaattattcctaaaatttttacctcactagcaattaattgcctaaaccaattttttagcagcaagaccctttaaactcgtgttttgttagctgttagtcatttctatccaaatttctctatttaaagttatgttggactattcacgtgtatactcttgtacacgcgttaaattttcattaatccatgtaatatacttatttaaaaaatcattaaaaaaaattaattaatctaacttaaaaaataatttcaatttaacgaattaagaagaatcggatttaaaatgttttaaaaaaacaaatatcatgaaggaattattatatggaaactttgaaagtaatgacctctctttttaggaagaatcaaattactaattagaaactatgaatggaatttctagtgatatggtaatccctagaaataatttggtgactaatattatcttctaagagttggaatacatgttgcattggtgggagagggtatcccaatcaaaatttagtggtaatgacctagaaagaatttactcagttagttcaagaaaagtctatgtcaataactgagtatacgataaagtttgataggctcgctaagttggcttcgggaattgtgccaactaattttaacaaaaaaaaaaaacgggtatttggtgagatccaataccaagatcacacatgatttgatcatcataactgaacttgctctaatttataatccagctttcaaggaggtttcgcactggaaaaataatttcatccaacatctggaatgaagtcaaaatagcaaacaacagaaactctaaggtggcgtttggttggaggtaatgaaatggaatggaaatgaaacaatttttattctattcctttgtttggttgcattttaaagtattgaaatggcattccaatggaatgctctt

SEQ ID NO: 317815 - DNA, 874 bp, Cannabis indica
atcaatatatgcactacaatgtgtgcatttaataggaaaaacatgctcataaaaagtaacatctcgagaatgaaaaattcgatgagtttcaagatcaagtaaagtgtaagctttcataccaacagggtagccaatgaatgcacaagctaaggatcttgggctaaatttatgccttgaactatcaagtgtagaagcataagcaaggtagctaaatatttgtacatggtcataagatggtaacctattatgcaacaactcaagagatgacttaagattaagtaagggaaatggtgtgtggttcattaagtacacagttgtatgggcaaaataactccaattgttaaaagataaatgagattagaaagcaagagcctgtgaaatttttaaaatatgttgatgtttgcactcaacaacgaagttttggtgagatatctcaacataaaaatgaaagggaacaatacactttagtagcaaaaaaagtgtgcaagttaagttcctttacattatcacatcaaatttccttaatggtgatagaaaattgatttagtacataagcataattttgtagaataatagtctgaacatcaaatttatatttaagcatatatactcaagtaaagcgggtgtggtcacaataagaaagtaacagtaatcttcaatggttattgtgtgaaaagaccccaaatatctatgggaactaagatatctatgatttcagaagttgattaagatttggctcaaccctcttgttcttgaacctttatctctatgcttctatgagaaattttacattattgaagtttattttgtagagttttaatgagtgccagttacaaataagggtgtgcagaaagtcattcaatccaattacaac

SEQ ID NO: 317816 - DNA, 2670 bp, Cannabis indica
taaatatatatatataaataaaaaaaaaaaaaaaaaaaaaaaactcaattcagtctaccaaaccaaataaagcatatcccacatcatgtatcaaaagatacgacactaacactcgccgactatataaagaaaactaaaatataaaattatataatgtatgcatataattgattttcactcgccgactatataaagaaaactaaaatataaaattatataatgtatgcatataattgattttatttttctttaattttttttcttttcgaaatgaataattatttttttaatttgtttactatttacactattatgacgaatttatataaattgacaatttgagatggcatgtatatccatgtacatttattaatgtagccacagcaacggataagattgaatgttctgaacagttttaaattttggaaaattcatataatttggactttactagttaagagtatagcagtatagatgagatttaaatacattcctgcatattattatttaattataaaataaaataaaaggttggttctaccatacatcccactaaaataggtatattggtacaatttttaactgtcttgcaaaaaatgtgttatagttatttaagatattttataaaattttgaaaaatttaaaataatttacaatataaattttaatgttcaaaccgtctatttcacaagcgtataaaataataatattaaaaatcatgtgtgcaaattgcaatagactttttaaaccctatctttagactggtatatcgaagtagttcttggtgctagacgttgatcgaatgaagtttttggtggttttgtgctgggccatttgatatgcaaggaatgacagagtatggcaaataaagttgtgggtgcggatagcatcgtttcattagcaaaacactatttttaacaatagagacttgctcaaaatttaggtaataaattattgtttattggctttataccaggagacgggactgagtaatgagtagctccaaacgataatagtattaagattaatgttgatgcggctatgtttaacgaggcctagagctatagtgttgggtatgtggctagaggcaaaaatgttatgttgttggaaggctgcacaaagttgtttcatggtttggtagcacctgaagttgcagaagcgatgggaattagagtagctttgagttggattaattaaagatcctcggtggacacacgtgattttagaaatagtctgtctttttgtggtacaagccattcgtagttctattgttttaattatcatgttcggtcgattggttaatgattgtaaggttttattatgctctttgagaaatgtttctattcattttgtaaaacgatcagtaaatatggatgctcatttctttgcaaaagtctctatattacaccctgattttcgtttcagtttggagagtatcccaactaatttgttacctcgtttggtaactaagttcattggttaataaagtgttgctttttcattcaaaaaaaaaatatttttggtgtgttaatttgtttttgaattttttaaaattttggaggatgttttaaataagtactacgtatataattataaaaaacagttggaatagattttttattagataccgaaacaaataaaagtacatcgatcaccctttttaagaagtgcattgtagaatttttttaaaaatatatattacaagaaaattaagtgccaacaatgtccctataatttttttaagggaatgtacctataattgtttagatgtataagagaattttttattctaattttttttcaagagaattttttatttaaaatattttttttatgattatgtacgtggtaattatttaaaaatatttttataaaattttttttgaaaaaaattataataatttaaatataactgaaaaataatgttcaaacaatttgttagaactatattgtaaattattcagatatcaaaaaacacaaacaaaatacatcagtgtatcaattttttagggacaccgaaacaccttattatatatattatttgtaatgaaaaatataaattataaattcttactagtctgtgtgttaagagaagtggtgtgcaacgacgtcgacgagccttacattcagggacagaagagaatttatcgagaaaactatcatcgagtggcggtagtgaacaagttgacttactcgagtacgagttaattttaatattaaagtctgatgagaatgagttgaacatggttactactgtactactacttgtagtactcatttgtgatgagctcacaaaactcacatctgactctgccactgatacaatctcatcatctaaattactatcaccacttgatctcctcaccaacctacatacattgtatataaaatgttaattttggaaaattaggagtcatttttgtatgggtcgggttcattaagtgggggtcttaggtacaggcctgtgcacgcctatacgggttacaagcccgtcgcaagccaattgagaggtattgggcaaaaaatataatttttttatatacatgaaaaaatttaaaaatataattgaacttttttcttaataaaatatcaaatataatatttcaataaataaaataaatatttctttttagaaaataattatattttttaataaataatagtaaacat

SEQ ID NO: 317817 - DNA, 2015 bp, Cannabis indica
aagccagtgaacggagatatcttcgacccgatgcagtccaaataactagtgaggtcattgagaagatttgagctcgtatgcttgcctcacaaagtagactgaaaagctacgctaattcgaagtgtagagatcctgagttctagattaggaactttgttttccttcgagtgtcaacaatgaaggggattcagagatttaggaagaaatgaaaaactaagtcctagatttattggtcccttagagatactggataggtaggtcaagtagcatatcggctaactttacccctattttattcagagttcacaacatgttccataatttaatacttttgtaacatgtatctaatacgatccatattctgagttatgaggacatcgagcttcagacaaacttatcatacgaggaacaacctatttagatcttggatagaaaaggaaaagtattgcagaataagaccattccactagttaaagtgttgtggataaacaccaatgttgaagaagcgacttgggaagtagagtcgtagatgcgagagcagtatcccatgttattcaggtaaatttcgaggataaattttttgtaaggaggggatagttgtaatacctcaaaaaatataattatattaatttggacatattttattaaatatgtaattatatgaatataagcgtcatattataatcttcttaagctaattatgagataattagtaatttttgagtaaatgaataattgagcgtaatttattaattacagagattttgttagaacatgtggctattatatatacctttttcaaataaaatattttcgtgttcagtgacaatggaaactcgatggattggccaaagatgtcacgacgataatagaataggttttattataattgtactggattgttttagtattcatgtattgttggtttagtcggggtagctagtaatgaccaaactaccccttggttataaattagcttaagtgttaatgtaggggtaaaatattcattttgttaagcttatttattttgttttattttatagtctagtaaaaccctagcataaagataggtttattatttgtttatttggttaattaatagatatagttagataattgagagataaaaataaaaaaaaaataagaaaacctagcacaaacctatcattctctctctcttctcttcagctcaaggaaaccaacgaagcccaatgtaatatcctaaaaaacttagttatgaataattaagatttattatatattatggattaagtagtaatgagtacgattatgatcctgttaactaaatttaacataaattataaattttagtataagtggataaataagcttaatttattaattaaagagatttattgaaatacgtggaaataatataagttatttgtgaaataaaaatattttcaggttcgacgatcttagagacccgattagaggccaaaatgtcacaatgattttaataagaaatattgatggatttattaagataagttgattttagaaataccgaggtattttggggtattcggagctgaccaaatatcccagaattaaagtgttgacttcacttttagcaaacgacaatgagtctattttataagcgataaacggatatataatagcagatatatgataaagaaataataagacacagggattttatagaggttctgcctcgagcagttcggtaatagcctaatcgtcgttacttgtattgacttaaggtcaaggagaaagattccttttcttatagctcttacaacagtatctttgaatatataattcttagataataatatagtcttagctcaactgcttttcgaccgatcccttgcccagtgactatgcatcactatttatagggataggaagcttgaggaggaagagtttcctctctcgttacaatgcgtataaacagaaagatcgtgggatcaatgctgaatgcaaggatcgtgggattgaggctgaatacactaatagtgggatcgtgtgta

SEQ ID NO: 317818 - DNA, 2245 bp, Cannabis indica
aaagtaaaaaataccgcctgacaatatttttataaaaaataacaaaagctagtgtaccatgtaaatttccctttattttattcatttcacttgttttttctaggaaatagaaaaacatagttaataaggaattttagtatttggttaagttttatatttttaaatcataaataattttaaatgaaaagaagaagaagagagaaatatgtaggataagagaaatggaaagagaaaaaagaagtatagaatcaaaagtaggaaagaagtagacatatataagattatccaagggaacatatgtaaaattatgctttaacgaatttcaataacaataaactatattgggaacccattcaattacattgacatcaatcatatcatatcaaagtttaattaacattaatattagtcttcttacttatcaaaaaaatatacatctttattggactcaaccccacccccaccccacatttataaatattttcactttatttatatataaattgcctcttaaaattgtacataaatataaacccctcaagccctgaaattttattataaggttatataatgtggacaagaaaattataattcaactaaaagaatgtgcatacaaatataattattagtataggagtgtaacctatttttaaaatattatagattatttgaaaaattattatttgtcatcaaagagttttaaaagaaaaaagaattgtgaaaaacaatattatttagcaacaatgaagattgtcatatcaccaaataatgtattcttttttgtaaaaactaatttaagtaagaaatgaacaacattattaatatatcatttagcacaatattaaaaggagatgtcaaattattcattacaaataatgatattcttagtaatagaccataaggtgtttaatactattattagtataattaaatattaattcttatataactgaagaaaataatttttaaaaaatatcactaactaatcataaaataatataagcattactaatatttaatagcaatgcagcatattattagtgccttgaatggctagaggttggagagaataaatctctctaattttttatatgttatctatataggtactatatcattgaaaaaaatagcattttattgtaaaaattattattattttgaaagaatagtgatatattaagatattattaaccattggattctcctgattgacctaatcctaatgtgatatgtaaacttttaaaagtaagtatatgcattcgtaaatgcctctcccacttctctctacctctatttcaatgcatatatctatgcttttaccaagattcttatctttttccctacctttattttgttggtttcaagggatataattaaactgttttttcagtttatatatattattacactttcactttctttaactttcaaaggatatatatagtatacaggtttcactttctttccttagtttaattatgtattttattttcaattaatagctactttaggaccagatttgtcaaactactcccttaactcaatattaattgattggtaataataattttctccattatagtgactagaagtaagtactaataaataaacttgaaaatggatctcatcatatgcaattatatgtcttccactaaaatcacaacaaacttattttgatgaaaaagaaaactctccacttttctattaattatataattgtgatttgtagataatgattataatgtaactatatataaaaaaataaaaaaaatagatcattacttgatttcatagccatattactcgatatttctagatgataaatttcgttttattaatacgaaataaagtaaatatcatcgacttgtacacgtaaattataaaactaaaattttaaagtttttatataaatttcggtctgtaatttttatttaaaaaaatattaaaattataaaaatacatttttttagaaaaaataacaaaaaattaatttcacaacaattataaatcaatcagctctaaaacaataaaaaatgacaactataatagaagtacaaagaaaactataaaacaattaaaaaaaacggttattatttttacaagatttatttcgtaaataaaaaatttcaaatagtaaaagtaaatttttttataaattaattttttttttgtttgacaatgaacataaagtaaattttttttatgttaacgaatttttataatttttttaagtttttggtgtatt

SEQ ID NO: 317819 - DNA, 1039 bp, Cannabis indica
attagaaataaactaaaaataacttcacaacaactataaataaattataaaacaactaaaaaataatttattattttaactgaagaagtatttttgaaaaataaaaaagttcaaagcataaaatgaaattttttctgtgttgatgtatttttctaattcttttctcaaatttttggtctattataaatttttcaatgtattattgttagtaataatcttaagttaaagataagatactaatgacaaaatgaaacatagtagaacctgaagaaattccaaatgccgcgacgaatgatttctaacgaggcaacgattgcgattaaggcatttggatgaagagaatcaacattaaattgcaacactgtctgcatccaagcaagtctcagcacaacattcactacctacattgtcaagtacccgaaattgattgaatgatcatattcataaccaaagaagctaatagccctttatctttatactattaggaccttaaggttccattccattttcttaccatggccacaaagtaaatacttttctgttgtagaattagcttgtccctcaaccaggggtttttcgaatctcgccttagaagaccccaatcgatgacaagatcccaatatgtgcttgctattgttgcaatcacagagctagatatagtcaggaatctcatcagccccttcttggaatcaaaaagtgttctcattgagactgctattatggttgagaagtattttagaccatttaagccttgcattccgtctttctcctcgagcaaccgtcgcatgcactgcaaaatatatagaacggttgcataagaattactaggcgtggcaattaaggtcagacacgataacacgactcgaaactcatacgaaataaagaggttcaggtcattatcggattgacacgactgacccgtctattaaacaggacatttttgagttaacatgcttaattcaaaaatgacacgataatgactcatgtaagagtatactctcttaaatttattatatttattacatgtaaattatatttt

SEQ ID NO: 317820 - DNA, 867 bp, Cannabis indica
atagttggtcagtactagctggtggtggttgaaatgttgttctacttatatcaaacattcaaagttatgcagaattaatagatagagtccatgccaattagttgaataacataatacattttcagagcaatttaaccatcagaatcataaaaatgagtcacccaccaccataaaaactacaaagcaaaaaatcttgactagtagaaggagtttcctttaatcactcgtggtttagcacactgaaaaattcagtactagtcagtactaatacaaaaccaagggcatgcagaatagtcatgactaattcataaactacagttaaatggacactaaccaagctattatgtgagaccccaaatagaagattaagctaaaacccaagcttagttgtgttaacttcaagtagatggttcaagagagtgatactgaaaatcttcctctcaagctaaccaaggtaacacataggcttgtctttgtgaatgcttgggcaagttgaagggagttagatgtagatgatcttacactcaaaagatgttatataaatggaagcattatagctgattctgaccatatatgtgtgtggataatgtgttcaggtacagcactagctttgtccactgctagagcttgttttagggggcattgcctcaccccagttgattggaaaccaatgattttgcatgttgaaaaatccttcgtccttcacacgtagaggatcttagtgatggtcattataaagggcaaaggctaatcctctttggagttaagcaaagaatgtcctcaggtgcctcactagcttcgactgcttcaccaatttgacaagtaacttgatggtaaagttttctggaaaactgttgctatgaagag

SEQ ID NO: 317821 - DNA, 908 bp, Cannabis indica
gcggtgtgggattgcacagcttacccggtgtttccccttacagatcacgggactattgactgtcacaatagtagtagtgtagggtttcggttagtttatagtgaatagaaagggacaagactactataccctttaatttggtctttggtaaggaagaccatatcttatataatgctccaccttaggtattttagataaaaaggatattccctaataacagggacccccatttaatctttaattgatcatcactcgaataatcttttaatttctttccccagaattagaaatattataggcattttctcctctttatagaaagagccacctcttataccaccactatcaacagtactactactactactacttatatacatatataatcataaaaatcaacaaatataaaagcatgcactacaactactactctcatcaactcgatcaactattacaaacagtacatataattactatattatattgaaaaaaaatattatgagactcaaacttacacaattgtataatgtgacatacatcttaattaattaaactataaatatttattctttataataaattttatttaaataaaagtcacgtacatggacttaacccacctatgactagagccggtgttaaatatataacattcagtggtaatataactatgcatgggaacaacgaatatgctatctccaacaacaaaatttattattatgatcactacacttaatatgtttggtacatatataccctatatactggtgctttggcattttgattttcaaatgagtaaaataattcgagaatgtgaatcttcaaatattttttttctttttttaacaaaaaaaaattataattgagttaaaatggaatattctacgccaataaaataagaaaatcag

SEQ ID NO: 317822 - DNA, 665 bp, Cannabis indica
aaaaatcacaaccaaacgtgacttgtgttttaaaaacttcaaaaactattttttgttctcatttctaaaaacaattttttaaaacaaaaaacagaaaacaataccaaacatgctcttagggatcccattttaaaactatctcgtttcaattttgttagtgtttctaatcattagctattattaatgaccctttaaaatcgacgagtattcttgactatagttgtcaattttaaacactaacttcattttattagcaacggtcatcaaaaaatattaatttcaggaccgatgagaataatgtattttgtactacagtgtaccattttgctctagaaaaagaattacattttgctttccttcttacacttatcctattatacttagtatttttttttattaacaagtaaatctcttctcttgattttttgctctcaaagaacatcattcttagctctctaaattatgtacacaaaagccactaacatgaaagagaggcttttctttcttaaacatagtcattttacttggagatatccatcctatcaatcgatgtatataccagcaacttgttttccagttcagccagccttttaattgaataaggcagtgcttactataacaacaatgaagggattatttcacaaatctataaaaataataaaaaa

SEQ ID NO: 317823 - DNA, 2515 bp, Cannabis indica
aaataaaaaacaaaagtgtattctataactttcattttcattgtaagttttcaactaagttgtgcccgagtggggttttgctctgtagcagttagactatttcttaaccgttctgctcccctgttcttcgtcttcttcgcctgtactaccatgatctccgataaccaccatcctcttccaccaaatgctcttcacgtcttccattccctccaactcaactgctactatgtatcttctatttattcccctgaccaaagcatcttctccttattcctccgttttttataccctcttactgattgttttttgtttatggaatctctaattggtgaaatgtcttcaaaaattattttatctgaaaaagaaagggctactcatgtcctcactgagtctgatcttcaagttgcacacactaaccctcagtttttccttgtagcccgatgtctctctaatgcttttaatccaaaaacttttatgactcgaatgggggagttttggtctaagaaatgtcgatttgaggttactgtttctgagatgcactctgaactttacttacttactcttggctgtgcaagtgataaatttcgacttttggaaggggagccttggcattacaacaactttctcatcattctacactcaccaactgttctacacaatgtctcaaaggaggatctcaacacagttcaattttgggtccaatgtcatcgccttccttttcttagcaagtcccgtgctcttgcttgtaagattggcgaatggattggtgaatatattgatgtctacgaagattcgctccatgagagttggggctcttttcttagagttcgtgttcggttggacattcaacaacctttaatgcgtggtaaactggtgaaactcccgcatattcatgacgaacattagttggaattttgttatgaaaatctcccaattttctacttccattgtggttgtttgggccatccttttaagagatgtgtgggcttccttgagatgtatgatgaaggcattgaacctgagttgccttatggtcttgaattattgggtgataaacttccaaaatctggttatgaaaggtatcagaataatttttctaaggctaatgcatacccgttcttaactcgcctaacccgtaaaactatcaactctgtctatcctaaacacatttcacagaagcacttttcccttggctctgctcctcacccgactctcctcactaatgctgaatcctcatcacagtccatgcctgagaaacacataaccaatactacccctgaacttccctttccatctccatccttttttcaaccttccttgcctatcaatgcaaatgggcctactgatgaacaacctgctattaattgcccaaagacatctgctcaaatcccagcagctatgacttctgtccactccacacccgtagccacatatccccctgctccatcaaccattaacctcactcccaaacactcacccttctctgctagcatccccaccactgatgccatagccatagcaacacttgctaaagggaaagctgtcttgattgatgaagatctctcggcccaggggtctccccaaagagtttataaaaggcatgtcgaacctgaaaatttgcgaagtgttctcaaaagatgcagaaacaatattcaatctgatattcatgctgaaggctctccatcacagttgttttcttcaccaacgcaagattcctctgagatgcagccttcttttccagcgggtgttgttgacaaacaaccccgcaagcaaccatgaatcttataagttggaatgctcgggggttgggtaacccgagggcattccgtcgcttgcgaatgttagttcctaagtacaaccctcagcttttgtttctcatggaaaccaaagctactgctggttctcttgttcattttaaacagtctttaaatttctgtaatgggttggaagtagctcgtgttggtttaaaaggggggattatgttattatggaaggaaaatgttgatgtatcactgctttcaatgaatacaaaccattttgattgctttgtgtcttatgatgatggcccaaaatggcacttctctgctgtatatggcttccctgaatctgttaacaaaaaatttacatgggaacttctcaataggcttgttgatgtttctccattggatccatggttactcataggtgatttaaatgaaatattctctcactctcataagaatggtggccctttacggcatgataaccaaatggctgcctttcgaatcactttggatagatgttttttgcaagattttccatttgagggtgatgagttcacatgggctaagaaccggaaaaatccaacagctttaaaggaaaggttggattggtgtcttattaataagaaatggactgatgctttcattcttccaaagcttacacaccttgattattttggttcggatcatcgcgctctcttggtcaaccttttttcctcagcacaaccgattctatccaaccaagacggtctcgt

SEQ ID NO: 317824 - DNA, 2074 bp, Cannabis indica
ttcaatttttgtcagacaaagagagagtcataagtctattgaatcaaaagccattatgttatttttatagagaggcaataaagttagggttagaactaaatgggctgatttaaaagatacaatgaaactgaatgctcactcatggtcgaactccctataaggcccatgagtttgatttttgctattatatagcttccttaataaaacaaatttatctttcttcaataatgccatttttctattctagttatataaatgctaactttatctatttaataattataattcatttttaaatatatttattaattagaccctccaaggtctcttaattaataaataaaacttgaattccctttttcttttcaaatacaccattcctaaataaaattcataaattagacatggtcttatttagaatcttaatcgattaaatatgtcaattaattgagactataaaataatattaactcaattagtgtggggaccatgagcctatggaaccaagctctcatgtatttctaaaatttaccgagtaaattctctatcttattagttccttgtgactctactatagattcagaatcgcactcttgactataaattatcgattgttttaatctaaacaattaaagatcctccatagatgatttacatcgagtatggacaaatttaccgttttaccgttcaatatattttatccttaaaatagttagatacttataaatgatatttcagtaaactaatataattactgaaatgagtgctctatcatttatcgtattaagccaagctctaaagaaaccatcatttcacttctaatagttatagaagttatatattccatatttatgattaatgctcccactcaattgcactaccgaattcccaagatgtaagtatgggctagtcctactggtaagctgataacaaacaagttaaagaacccatatagtacaattaagcaagaacttaaccatctcagaattgagatcaattgacgtaagattaactaagtgacattgatttagaaaagacataatagtgagtttatggtacttttccactgcaaatatttgtcatgtctgatgtatagtccatacatctgatacacatttactttgctaatatcctggaaagaacattccacttatacaagtgtaagtaaaccatatcattgattatcatgtcagtgtaaatctagtacactgataaattgtgggacttgatcatttgaagcatataaccatgattattttccactgtttaaacaacactataaccatgaataactatatttttgagtgtaatataatttatatattaaacatataatcatgaaagtactcatgtgaaccatgcaacattaaaattattttagatcttttattaattagtaaataagattaaattaaattgggttttatttagggcataaaatcccaacaaattcccacttgcactaatataaaaataaagttcatttcaattaatcttatcttctaatgtccaaaataagggtattatgtattattatctttgtaataggatctgacaggttgtattcagtatcaaccttctccaccatcacatcctccttagtcacaaaatccttgatagtgtgacattcctatctatatgtttactcctcttagggtattggattgtttactatttggaaactatatatgtgttatcaggaagtaacaatagtagttaatccatgattagaataatgctaaaaatgtatagaactttctataggctgaataattatctagtagcattctgggccactttgatattcaatctcactagtagagttagagactctagataggtttttacatttttccaaaaatcattgctccacccctagagtaatcaccatctccaatttagactttctagcattaaagaaaatcttgaaatctgagtcggtgcagcctaaatggttccgaaaagcatcaccttatagactaacatataggtcctgcttaatcttaatatttatttgattgtctttcaatattcctttcttggattatactgatacctactcataactcccact

SEQ ID NO: 317825 - DNA, 678 bp, Cannabis indica
tcttcatcttcttcttctttcttctcatctactttatattattttatattattttataacatatacaatgtaaatttcccttattgaattgtttgcagattttagatgtcatatattttcaacaattatctgtcagtacagattgtttatgtagatacttttatatacgtgacacgtttatattgttacatttaatattattatttaaaaaaatataaaaataatttcaaattttataatattttttatttttataattttatttaattttaaaatgaattttagaaatagtttctacataataatattagatgtaccttaaattaccttttataatgaggaaaagaaatataaaatgtgaaatcttttaagcaaaatatttttattttgggctaattaggatttttgcccctgaactttgacatgtaccaaatcatgccccctgaacttttaaggtcgttaaaaatgttctctgaactattgagattgttggatttaaggactttgtctaatttcattcaattttactatttcagtgattgtttatgtactaaattatgctccccagactttgatatctaccaaatcatgtccctcgaactttgacatgtactaaattatggcccatgaacttttatccatgttagacttttttactaaaattagataaaaatcctt

SEQ ID NO: 317826 - DNA, 3691 bp, Cannabis indica
ccaagcttgctcatccaactaacaaacccttaaaaccttcttaaatcactttaaataaacataatataaccacagaaaacatcatttaatcacagcagcaagaacagcaagctaaactacagccaccattaaaacccaagattgagtttaaaactccaaacttgaatacaatcaactaacaaccactagaaccagcttaattccacatatttaatcacaattaagcttaagaaaacaacataaaacattaacagcagccacaacctcaaaatcacctagcatgcaaaatttcatttccttaaacttcaagaaaatacaaaggaggtgcaagaactataccttggcttggatttactaatcaattagctgagaaagattgaagtacagaagaaaaatccaaccctagcagccccaagaaaatcgaaagagagagagcttgagagaaaatgcaagatttgcctaacttttctaatttttcataaaaatgagaaaatgagtgatttccttaacttaatacgttacttcagccaaaccaagcttaaaaatcagatttaaaactaaatattaaaccttcactaaagacaaaactcaataggcaaaaagaccataatgcccttgcccatacaaaagagtcacacaaatcacttagggtattttgggataactctaaattcccgacataccctgacattcccaatgtctaacaataccgccctgctatactaaaatactaagatgtgattctaccgagccatacgccgcgttccatgttgccgagcaccgaaatgcaaaattatgaaattttactatatgacatataaaatgcattctgaattcaaataaatcaacataaataattatttaaatatcaataaataattttcataattaaaccctaattatatgctaatttccaaatttaaactaagcggtctttacattagggtttagggttttgaggtttaggttgtgcgtttacgttttacagtttaggattttgggtttacggtttagggtaaaaggtttagggtttaggattttgagtttagggtttaggggtttagcttttagggtttaaggtttaaggggttttgggtttaggatttacgacttaaggaaggtatagggttcagggtttaggtgttaatagtttaggatatagggtttaggggttttgtgtttaggttttagggtgtaggggtatgaggtttaaggtttatagtttagcgtttagcgtttaggattaagcgtttaaggtttagggtttagggttttgggtttagggtttaaggttacggttttagggtctacagtttagggtttagggtttaggctttatagtttttttagggttaagggtatagggtttagagtttacagtttagagtgtagggtttcgggtatagggtttagcatatagggtttagggtttcaggttttgggtttttgggatagggtttagggttttactgtttagggtctgggattttttatttatgtttagcgtataagaattaggatttagggtttaaggtttcaggtctggggcttggggtttaaggttttgcatttacggtttagagttttttgttttgggtttagggttttggatttaaggtttggggtataaggtttagggtttatggtttagcacgtagggttttgggttttgaatttagggttggggtttcggggttagggtttagggctcagggtttctggtttagcgtttaggatttagggttttgcattttgagtttagggttttcggtaaagggtttagggtttagggttcagtgtgtatggtttagggtttagagttcagattttagggtttagggtttagggtttaaggtttagtgtttaggtttttggttaaaggtttagggtttaaagtttaggatttaggctttagggtttagggttagagtttagggaataaggtctagggtttaaggttttgtgtttagtgcttagggttttaagggtttagtgtttagggtttgaggtttcgggggtttagggttttatggattaggggtttactgtttacggtatagggtttagggtttagggttaagggtttagcggtttaggttttagggtttaggattacgcatatagggtttggggtttagggttttgggttatgggtttagagtttagggtttagggtttagggtttttggtttacggtttatggtttagaatttttttagggttaagggtttagtggtataggatttacgatttagggtatagggtttcaagtttagggtttcaggcttttttgggtgtaggctttaggtgtttagtttttagggtgtagggtttatggttttgtgtttaggattacgggttttaagatttagatttaggatttatggtttagggtattgagtttagggtttagggtttagggcttagggtttaggggttagggtttgggggtttagggtttagggtttaggatttaaggcttgaggtctaaggttttgagtttatgggcttagcctttacggtttagggtttagggtttacggttatggatataggaattatggcatagggtttagggtttatggtttagcttttaaggtttcgggttttgcatttttagttagtgtttaggggttagggtttaggctttaggctttagggttttgggttgagggtttacagtttaaggtttatgatttagggtttaggggttgggtctagggtatcgagtttatggtttagggtttagggtttagggctttgggttaagggttgagggggtttaaggttttagggtttaggatttagggcttaaggtttagggtttagagtttaggggtttagcctttagggtttagggattaggatatagggtttgtggtttaacttttagggttttgggattaagggtttagtgttcagggtttagggtttcgggtttaagctttagggttttgggtttaggtcttagggtctagggtttagtgtttattgtttagggtttagtgttagggtataggttttggcattggggattaggttttagggtttacagtttcaagtttagggtttaggggttagagctttagggtttagggtttagggggtttagggtttagcgctttacggattaggggtttacagtttagggtatagggtttaggggtttagtgtttagggttcaggggtttaggatttagggtttagggtttaggattaagcatatagggtttgggggtttagggttatgggtttagagtttagggtttaaggtttacggtttatgattttttagggttaagggtttagtggtttagatttacgatttacggtaaagggtttagagtttagggttttgggtttaggcttcaagcttttttgggtttagtgtatagggtttagcggtttcgtgtttagggtttagggtttagtggtttattgtttacaatatatcatatagggtttaggggtttaatttttagtgtttagggtttagggttttgttggaatatgttttaccaggatctagatttactatcatgtatgttatttaacatcctaaatgtgaatctttaaaacaatgtaaataaacacatataaagtttcataaaccttacagtgggtgcagcgaaacaattgtactatcatgttcccaaatgtactatcatgttccatatctatgtttagcgct

SEQ ID NO: 317827 - DNA, 1399 bp, Cannabis indica
tatcgttggctaaaagcgaggtcaaccgaatgatatattcacaagtctatgggattgttcaaagggaagcatgagtatgatccccttgatacctttgtagttcaaggtctgccacaacaaactcttaggcaattattcattagtttggtttttgttatagttgttatgtttttttattaattgcttaacttttgttgatatacttttttgttttttattgattccttgtttctatttattgcagtgattgtggtatattcatattcaagtactctaaatactttgctcatagtttgattgaagatattctaaatcttttggatgtgaagtttctatggaacaaagtttgtatcgagttgtttgtgcatggcatggcaaagcaagtaaattgatatatatcttcctctgaacatcctgggagggcgccagttaaggatgatgatgccgacgagtagatgttgatagtagtgctctttttagaaatttttatatgtaatgctaccaaaccttttatatgtaacatgttaactaacaaactctttttttgttacatcttttttgataggcaaactccttagagtttgtaatcttttagaagtttatggatattgtaaaggtactgtctagtttggtagtttttttttttttttttaaagacactctttagaatttgtaatcttttggaagtttatggatatatgtataggttatttcttgttgcagttttttgataagcaaactcttaagagtttgtaatcttttagaattttatggatatatgaatagtacctgtctggttagattttagttgctttgcttctttttcaatttaatagagttgttacttgtcatctagcaaaactattatgatattattttgcatggttttatataaaactttttagtttctatttttatattgattgtttttttaactattacagtttttagtaaaaaaattcaagttattatcttataagcttcttattttctaattttttgttgtgtttttatgaaaaaattggtttatctaactttactttaattttgtaaaaagtttatttgttagttttttgttatcttaacaaaggaatatttttaaagaaagaactaatgggaaaattatgactgaaataacaacataagttctccatttagcaacatgttagaattttaatagatattgagtccaatttttaaccttcgtagtttgttattatacttgaaatttcgtattttaatatttccatttttattatttaattaatacttaactaaatgcgaaataatgaaactagtactgaaatagtttttctgtagctactaaagacaactctgtaactctaaaagaaaccagaaaaacaaacagtgcagaaaagtaaaaacactcaaggttttt

SEQ ID NO: 317828 - DNA, 2335 bp, Cannabis indica
gttgagttgatttctttaagaatattacctgattccaaaaatgaaagcacagccgcactgatatcctcaccaatatactcctaattatcttgaaagaagttgcttgagtatccgtcaggtccacgtgacttgttcccaggtatactgaaaatagctttcttcacatcatcacttgtgaattgttgagtaagcattctgccatgatcagcagtgagtatggggcctctagccaatatgcttttctcaattttccttctattttccattctggtgccaagtaagctattataaaattccaggaaagcatctgctctcttagaaggttcatgaatcttgctcccatcaagcttttcaatggataaaattctattttgccgctgtctttgttttatacatgcatgaaatagggctgtattacaatctccactctgtaaccaagcagctttagctttctgttggaggaaggatgcataatccctttgagacttacttaacttctctctggcttctttctctcgggaatgcagctgaaaatcagaaggattttgatgaatctggtgctgcaaagtatctaaatccagcttgtttctagttacagcagcctgcaaatcatgaaagccctccttgttaatctctttcagcttgtgtttgagttgtttcatcttagagacaacttgaaacatttttgtgccagcaataggtctatcccaaacctctttcaaaccactctcatactttggatgtgatttccgcatctcaaagtatttgaatggcttccttccacttactacttctagatgaagagataagatcacaggagtatgatcaaagagcccttcgcttagaaaaactgcctctgctcgattatatttgtcaatccaagtttggttggcaagtactcgatcaatcttggaaaaaatcctctcatcaccatgttgtttattagaccaagtgaagaagtttccactagtcttaatgtcctccaactgacatgagtttacacaatgcaagaactcattatcggggtaaaatttgactctgtgccccactctttcttcctttgagaggatgtcattgaaatcccccattagaaaccagttatcagtagtgttcaagcccatcaaatctttccataacatccttctctcacccctgttattttaagcataaacaagggttaaaaaactgcaaaaaccttcaactgttgacaactttaaatgcataagttggctagtgcatttgaggatgtccacagtgaacctccaagggttccaagcaatagcaatcttaccaccttcatgccaagcaatattagaaggaaaacaccaattttgaaatacattcgagtacaaggtaccaagttttggagccttgactctagtctcaagaagcccaacaaaatcaaccttttgggaattaataaattgctttattaattgttgtttgtgttgattgttggctcctctcacattccaacatagaagtctatccattagagagagaggacctcccccctcctgtttcaaccaaatctgcataaatctcccctattttagcagcctcatcttgttcatcaagaacctgaaaaacattttgcacggatgtcactgttgattctgctggtactgaagtgttgttatcattctttttcctgttgctaacaacttttgtaaagccttcactatctacctgcttctcttgtctcctattgtctttctttattacccactgttgtacaccagcagtttttttcttgcagtcaacagcaagatgcccaacaccttgacaatgtgagcacaataccggtttccattcatatctaatcccaactgaagtaatccaaccaaattcattctcaaattctaccatatcgggcaagggctgatccatcaaaacctcaatgagcactctagcatatctcaacctttctctttcctttgtaacattatctaacataattggcttcccaatctgcccaactatcttgaacaatgatctttggccccaatacttcaactccaaatcttctaattgaatccaaataggcacactcttcacatcctctttcttgaagttcacatttggatcccattatttcattataaccggcctcctattaaaaaatataaagctcaataattaataatataataatttaaatttaaaagataatgttatattttgattaaaatatatctattatcaaacatatctaaccttataaattaaataatatttaaatttaacaaacggaacaacttttaaatttaaccataatttaaaaatataaataatttattttttaatttaaattttaaaatattaaaaatcaata

SEQ ID NO: 317829 - DNA, 2209 bp, Cannabis indica
tacactgggctcacatgctcaagagaacacatctttatggcaaatgaacactgggtgtcgttcaagaagccgcctccacggagaaaagataggtccaagagagaacccaataagttctgaaaatttcacaaggatattgggcacaccacggaagagtgtacccacctcagaatggaaattgaggacctgatccaaaggggttactttgggggctactggagagaagaaagacgtcccaaggtgagagggcgggaggagaaaaggcgagaacacccctacaaggcccttgaggtgataagagatgtcagaactatcaacgaaggacctagaataaaaggagacactcggaagggaagagataggcatgccagggaggccaaacaaccacctatgatgatgaacctggaacaaagaccgcctaagaattcaaaagaggagaggtactctataacgttcaccgaagaagatgcatgaggagttcactttccccacaatgactgcttgtgtttcctgtccaactggctaatgctagggtccatcgagtactcatagacaatagaagttcggttgacctactctaccggagcgccctagaataaatggggttgggcatgaaggatttgaagccatgtgcaacacccatatatgagttcataggggactcagtccatccctcaggaatgattgagcttcccctcaccatgggagagcagcctaaacaggtgactgtgatggccacgttcattatggtggaaagtctgatagcttttaacgcggtgcttgggagaccctcgttctacaacttgaagggaattgtgtccacttatcacctacctatgaagttcccaactcccagggagtcacgatcgtaaggggggagtagaaggaggtaagagagtgctacaatacttcccttagaatggccacgaaaccctgcgagtccatggccatggttggttgcgaaaaggaggcagaccaaaaaagaatcagggtagacctggacccaagggtgaaggaggaggaagttcatgttgaacccatcgaagaaactaaagaaggggtgatatccgagcatcctttgaaagtgcttaagattgggaaagaactttacgaggacctcaaacgcgagctaaagtaataccttgtagggatggcagttgtcttcgcttggggacacaaagatatagtggggataagtcccacagtgatgtctcaccacctaaacatagacccgctggcgagactagtaagagagaagaggtgggcccttaactcggtgcgatatgtggcgttgaaagaggaagtggacaaactcgaatgcaccgcttcatatgggaagccttctacccagtgttggtgtctgaccctgtcctggtccccaagccaaatgggaaatggagggtttgtgtggacttcactaacttgaataaagcatgcccaaaagatagcttcccactcccccgcatagaccaaacggtggatgcaacggccaagaacgaagtgctatgcttcatggatgcatactcgggctataatcagatccccatgaacccagcagatgaggaacacacatccttcataacggatagggaactctatttctatcgagttatgccatttggtgtcaagaatgccggggccacatatgagatatttttcaacaaaatctttgccagccagatcgggtgcaatatggaagtgtacgtggatgacatgttggtgaagtcaaaaaaggcaggggacttgattaaagacctagatgaaacattcaccaccttgaagaagtatcaaatgaagctcaatcccgctgtgtctttgggtctcatcgggaaagttcttaggcttcatggttaatgaaaggggaatagaggccaacccagaaaagatacaggccctaatagacatggagtcaccaaagaaccgcaaggaagtgcaatgtctaacggggagggtagcagcactcaaccggtttatctcgaccgacaagtgtttaccgttctttaacatactcaaaggaaacaagcaattcatctggggagaggaatgtgaagaagctttccataagctcaaagaacacctgggaaagccaccactgctaggaaaaccagaaaaaaggagaactattgttccttgggtaagagtgtgagagttgaaacactttgagaaaactcattagagaatcaatctcgattgtattgtacctattctt

SEQ ID NO: 317830 - DNA, 1173 bp, Cannabis indica
ttttctctttcctcttgatggtaacctgtgtttcttcttcctcttctactatccttagaacaatggtaactttaaacacttatcaatcgatcgatgcttatcctaaccccgaacgactgtaagtgtctaatccaagttcccaaaaccccaaggaaccccaacaccttagaccaacaacaaaaggatctggtaatcttaaatctgagatcccctactaaaactcctagatctgagatccccaacgctaggtggtctcagatatctctttccctttgttttttttttcttatttactatttatatatctcttgctcttttctctggaggtgaacaacatttggcgttctcgtcgttcactgccggagaataagtaggagattgcaacaaaaggggtcggaagctttggggttcttagataatcttttctttccctttcatttcattttttttccccaaattttgattatggtaaattttggaattttttcttggttacaatagagagaaaaagagaggagagatagagctctctaagtggtgatgatgatggatagagaagagagagaaatagagctcgagagtaacttggacaccaattgtttgctgtaaggttggatctagccataataggattcagaggttccaacggtacactttgttttcactatttttatatctatatattcaaagctctatatgtacattcctatagtagtgtgattcttatatgcgtcggcatctttggtctgttttgatctggttattttgttccttaaatgatttggaatctggttagggttttataatggtgagtgtggtagcacaatggtgaatgtggtatagtgataatggtggtggtggtgatcaactgataatgaaagaaaaagagagaagaggaagaatttttttttttgtaatttttaaattatttattttattttaaaattatttttataatatttaaaataattaaaattacgtggacttgtgtacacacagaatgtgactatggggggttttaccaccaaaaaattagtttatagggttaagtgtaacaaaatatatagttcaggtgttagtgttttaaccactttgaaaagcaataatagaattaactgtatttttgacaactcagcacacggttggtgacttgtccaactgtctcaaccatat

SEQ ID NO: 317831 - DNA, 959 bp, Cannabis indica
tcacaaaaaaattatattatcactaaaaatagctattttttatagtgattgattaatttttaagtccttattataagaatagataatattttcaaaaattattaaaaatatatatatatatatatatatgtatattttaaaagtatatattctttaattatgtcgcctctaggcgcaggcctagcctgccttagtctaaggccaaatctctacaagttctactactagaatttgcatccaataatgatgttgtgttctaattagggtttagacgccttaagatgtccttataacttataacaatttattctatatatataaaaaatatttatatattgttataagagtaagtaccattttgaaccccgtgttttacaaaaatattatcaattagaccatctgttttattaaatgacaaaatagatcctgtatttttcaaaattgtacaaatagaaccctaaaaagtaatttttttttttttttttaaaagtaaaaatttatattaatctgatctagagatgttgtgacaaaattggttacattttttgtatattttcgtgttagaacttatcttaaagttggttatattaaaaaataaaattgttaaaaattgagctcagagtcctattttttaacattttggaaaatatagggtctaaattttgtcatttaataaaacagagagtctaattaaaaacttttacaaaacacaggatctaaaatagtatttactctttttataaacttaaaacaacccaaactctatttatccattgactttgaaattaaccttcatttataaacacacaaaaacaatagtatttatctaccttatgtttagttttgagataaaaaaaaaaggagaagaaagaagaaattttagaagaatttgttcgcgttttgaacttggaagagaaatcagaaagagataattaaatagggtcttttttatttttaca

SEQ ID NO: 317832 - DNA, 688 bp, Cannabis indica
ttttttaaaaaaatatatatattggagttttgaaatctcataacaaaatatttgtagcataaaataataaaaggtgttgtctaaaggcataaatcaaaatattccagtaatggctcgtagattgtaaccttccaggcttatatgatctgatatgtacaatattcatcaaactctctactcattgatactgaaccttaactttgcttttacttacacatagaaacatgtttgtgagtcaatagagtcattaagaaaaatataaacatcaatttaacatgtatacttgacttataactaagcgtctatacacttaattaccataagtgtatgaaccacatctaatgtatatattaagatcccaacattcgtatacttagagtatgattagctataataacaacctaattccagcactagtcatactaatactggtagcatgaatctatactattcaatactgcctaacatgctaatatcaatatcttggtgcaactttatgtacacacatactactatctctaatatactagttaatgctatatttaacttagagttttccaagactttgtgttattatttttcacagattttgttgactttattagaatatttctaattaaggaaataaaataatattatttattatgataaatgaatattttatattcattgaatctggacagaatca

SEQ ID NO: 317833 - DNA, 702 bp, Cannabis indica
atacacctacaacaacatacctccaaacaaaaatcttaccagaaagtaagaggggatgactgtaaggtgtcaaatcctgcacaacataacacgtggaagtggtatctcaacaccacctctaaggagagttaccaataaagaagataaatagctattgaaaaaagtgcacaaaggctttacgatagttatgccggggggcaaagccaatagattttagacgggatcaaactgcagcatcggcctaaccttcgaaaggctggccgaccctggcctcaacaggctggccaaccatagagccatcaacttggccggccaacacctccacaagttggctgaccatagaatcaatgacttggccagtcatagcctcctctaaatgggcaagcaaggctccaatgtggctaccacctagtctcgccctcgccagcccgatccactagcagtctgctttcatacttctggtctatagtgacctagcggtaaacaatatcttacataggatccattgacaaaagagaaagaagaccaagccaactcaaagctgcatggcttcccataaagagttaccagacccttcaacaaatacataaaagaaagaaattctatgtaagagaattactccctgatgaatattccttaacagcaaaggtcctacagtaagcatgtttggaccaaactaaaaaggtctgcaccatgttacaa

SEQ ID NO: 317834 - DNA, 897 bp, Cannabis indica
tcactaaacccgtgtccctcaacctaacagcttactgtgatgccgaatgggcatcagatccagatgacaggagaagtacaactggttttgctatattttttggttctaatttgattgcctgaaggagcaagaaacaaccaacgatttctcgatcaagcacagaggctgattacagaagtgtagccaatgatactgctgaaataacatggctgcattacctattctctgaacttgggattcaaatgtcacaacctccaacaatttggtgtgacaacatgagcactgttctgctcactcagaatcccatcctacatgctagaaccaaacatatagaacttgacttgtattttgttagagaaaaagtgatgaacaaaatgattcaagtcaaccatgtcacagcttatgatcaactggctaatggtcttaccaaagctatttccagccagagatttcttgacctcagaaacaaactcaaaattgaagacctttcaattatgagttcgaggggagtgttggaataggcagttagttagttaacagttagttgtatctgttagtttgtttgtttcagttagttacaactgactgtgtatataaaccagtgtactcatctctttcaattaatgagatcttttcattcaatctttctctgtctttctttctctcattttttctttctgttctttcatggttactctgttttctgtctgaacctttgttcatggctagaagatttaacacagatgataaacaaaaattttagagaaaagaaccgaagaatgggcagagttaaaattcaggctctactatccgatcatacgacggctgaaatagccgattgtacgacggctgaaatcgacggctgaaaatcataatattcgatattataataatgaa

SEQ ID NO: 317835 - DNA, 529 bp, Cannabis indica
taaacaactgctaatttccaaattaactaagcgggctttacatgatactaatatatcattatgacaaaaattaggatcaaatagagcaaaagtttgtctatattacatagtgggcgtttatagttgggctaatattgtaaagtagatgcctaacaacacatgcactacttccaattacatgttgtatttcagtttctttacagtattctcacagttgactaaccataatcgatttttgaaaatgtcaagaaggggacccaatttcatttctcatattttataataagtagtttgatccaagaatgaattatgtaaattacaaagctagtagtaaattcatctcaagagattgcaaatatgaaaaattagtacaaaagttgaaacaagtgttgtaatgcaactaagaaaacacttaattgcaactgaaatatctacatacaaaattaccaatatattgtttacgcattgtccaattgttgtcttattatcattttttttttttgacaaagtgattaaaatcactcatgaa

SEQ ID NO: 317836 - DNA, 991 bp, Cannabis indica
aaatataagatttagaaataaaaatgagctaaaatggtgaaaaaatggtgaaatggaggtgatttttcatggtggttggtggagagggtttggggtttctctggtttgggggatttcgggttggctggtcgaatgaggaagacgatgggctgggctagggttataaacccttttggcattggttttattggaaataaccgatgccatagggtccacaccctatggcattggttatttccaaataaccgacgccataagtggtgtcaaaatccctcccaaaacttccccaccctatgtcctcgattatttaatattatgatgaaatatgtgcctctaaaggcttggttcgtagtagtattgggtcaggatccagatcctaatcttgggtctcgctctcattcaaattcggatcctatgtcccagtccgtgtccgtgtcaatgtcccggtttgggtttgggactgagaccggggtcggttcttgggtcccagtctaattttgagtttgggtccccagtcaaggtctgggtcctgcgtccttgtttgagtctccaatctcggtccaaaacctgggtctgggtctgggtccaagttcatgtcccaggtcccgatccatgtttttatttgggtctgaatcccagtccgggtctagctttgggtcctaattagattccagttcccaaagtcaaacctagactcaaactcggacccaggtctggggtatggctctaggtctgggtcagggtttgggtccgagtttgggtctaggtttgagtgctggtatggatcacatatccaaacactgattacgggtcaggtccaagcccgggtccagatctggatcacggtttcgggtcctagtttagtgccactttaggtcccaggtcccggtacgtgtcctaagttagggtctgggttcagggtaaggtcctaggtctcggtcctagttctgatgcccgtgtcccgggtctaggtctgttggaaattatttta

SEQ ID NO: 317837 - DNA, 678 bp, Cannabis indica
ggacaaacagggcccgacgcccccctcgatcccctactacttgcacagataaccctcaggtaaagaactctagacgtcgtaataatcgtgttcgcagggaacgaagaaccaatcctgaaggtctggacctaaactagcggacctcgagagacgaatctgcgaggtatcctaatcaggaaacacgggttgatgaagaccctgagcgacgtaatcctcgcagccggccttcaaaagacaatgacgcagaatccgcctcatcatcctcgcatggtcgcacacctagcagatacacaaggtctggttctgtggaggcgcagcagggaggagggtaccaagtccataggggcaatctgcatgatcaccgcaacgcggtttttaaggcacgctcccgcgccccgcgcgacgaggaaaccccccgtaatcccctcgtgggcgatcaaggcgtaaacactcgaactaacccgcctaacgcaccggaagcgactactagagttaatgtcccactgaacctcgccgcagtaatcacagctcctacagtcgcagtagtcccggcccctataaccgggggaattgatcgaagcatgcttttgcaagctctgaaaatgctcgagcagcagagaaagcccatataaaagctgcatgggacttctcctttactgcggaagtgcgacaggctca

SEQ ID NO: 317838 - DNA, 1491 bp, Cannabis indica
cacggatcactgaatatcttattctggatgtgccagcgaggcatcctgctgggtctatttttcctgagcagatgctccaagtggactccacgtgtcactattctcgtgatgccacaccagagtgcaaaatttgggatgacagctaggatgaaaagaagttgaaggttacctaatgaatatgacccacatgtggctcagttcattagagctaagctaactgtacctaagtttaaaaacctagataatgcgcgtggtgggaaggtgatggcaactaagctcctcaaagctgccattgagagtgatgatccaagagctcgagccttcaagctaaggcctcttatatttagcactcttactaagcatcaagctcaattaatttgggatgattattgtcttcttaaaacttttgtgcggaagccacgataagacggtcccaatggctcccaaaacacttgctgtagtgcctagtcgagattccacatgaatgtgggtgcttacttgcccttgcatccacggttcatatccatagctaatttctttggtgttttcccttacaaaataaatctaaatggctatagaatttttgccaccttcttcatattttaccgccttaggaactgccctattccaactcctcatgagatagactttctctacattttgaaaagaagtcaaccccgcaaagaaggcttttaccattcatatagcatatgaccaaaagcaattgtggcctttatcatcaagagtacttctatactcttgttctttcgtctagacacattaccttccaaaaggttggccctttcaaaagacatgctcctcttattgacatgaagaggagagttgatgccatattgttagagattgttgcatggtatagagatgggtgaactctgtttagtattaaaaatctttgaaaggtttggttgatcatgtcatgttagtgggtgtatgctaacactttctttgctgatgaatcttggacaatgccactcgagcaagatgaaaaggatgctcaaaatacaactgtcatcttctctcagacagtgacaaaagaagtgatttaattcaaaatgacataaaatattgagggagaatatatgtgttcatagaccaggatgatggagaagttacccccactcgaactgctcctgagaagtatggggaatcagcatgtggctgatgctccatgctatgcagttaactttgttgtttcatttctcttttgttgtacaaacctcctgtctttgttctttgtatacaatatgagcttcctggctgctatggcatcttgttcaaacttgaagagaaagattttggtgctgaaggaaattgagcctccggtaagggaagtggttcagggcatccctgctgcttctgctactttgaagaagaaggtcaaaaagaggggtagaactactaatgccgctcttcctattcaagactctagtagggagagatctaacactgctggtgctgatgaaagttctt

SEQ ID NO: 317839 - DNA, 1317 bp, Cannabis indica
ttagtgcgatggaacaaagttaagtacacatttttctcattcttcttgtgcttttccttaatggcagcaagtaaatcctttgtattttcattctgaggaatactatcatgaatggattcatccatgtgatacctcataagcatcaaacaacaacaatttggatgctcccaatcctcacaggacttcttgtccttttcagtggcatcatcaacgggtttaggtggtgcatccattctcaaggccaagtccactctcataagagtcaaatttagcatgagagattcatcctactacttgtggttagttccatttagcgtcaacatggtagaagttcttggaacacttaaagttgaatgagaaaaagagtaataaccattcagtgcatgttataacaaatcatgccatttgtgctcttttctcataaatgaatgataaaaaaaataataaataatcatcatgcatgtatgctagagttcttagacaaaacaacaaaatagaactcatacacaagtaagaacaatctattaaatattatgatcaaatacattaatttattatcgaaaggacagataaattgtgatgcataacatttaataaatttttttcaccatattaagcatccttagcgagcaattattatcgataggataaccaattacttataaggatcttcattaaattttggagaaagatacaaaatttaaataaattaatttgtaaatgtttctcatcaccaaataatttacatgcttattcttacggcaggaaagaaaataagcaataattgctgtcaataaataattagatttatgtacaaaaaattaaatataaatacaattaaaaataaaattcatatattaatcttgtgcataatattacagaaatgatagagtagtaaaatttgagtgaaaaaatggagaaaagggtccaaaaggacctatcccgctcccttacgcgcgtgctggcatttttttttcgtaaaacgacatgttgctttaccaagaacgacgagacccttagagacatgaatgacatgtcattcaggcgtacaattcgtccctgaccttgatgttgggttgtctgccctaaataaaactcatttcaatataatcagatttactaattaataaaggatcagaaataattttatgttgcatgattcacatgatttatttcatgattatacttaatgtataaattctattaagtctagtacatatacattttttcataattatagtgtgtcagcacaataaaatataatcataaattatatgttcaaaagtttaattctcatgatttgttagttcactagat

SEQ ID NO: 317840 - DNA, 1659 bp, Cannabis indica
ctttgcgatgagttttcttcgaacattatttgatagatacatgatgatcgtgtagaacaccatctcctccatttctcgctttttttcctcttgtttcttctcggctaaaagtttctcatctctaagaacctttgaaaccttctagtgtactagaattccttttaaaactttctctccgtagcgcaaagtctcatattccatggaatttctccaatttgaatctcgccattaatgacattcaaagtttcttcaagaattacagcaaaaagaaccttgattatgcgttcttaatcaaataccaagctctaatttgtgggaaaattacaactaaaggtgcagaattaaattaactaaactccaaaaaatcaaacaattaacaataataagattaacaaattacaaacaataatatgaataaaatagtgatgaacaaaatatggaaaattagaaacatgtaaagcagtaaaacaattaaattaacaacaagatatatactggttcaagtccgatagatcgatatgatctatggctctactctagtttcaagaacaacaccaaatccgctttattgattgagcaagaatatgtataatatagtcgagaaagattctctgttgagttctctcaaagtgcttcacatctcacactcttactcaagaatgttcttcatctaaaaaaaattttcttacagaatccaagcccaatttccctcttttctctgtatctctctctctcaatctcaacttgatcgatgttttgaaaaatgacgagtgtaggtggtatttataggccataggatcaagatcctaaagtcgatagttgcaagagttgaggttagttagttaggcaacagctaacttaaccaactcttatttgagcgagctctccatgtctgcatatgtctaagtacattcgggaacatatatgagcttctaggatcagggaccaaaggttgcttgctaaaggaactccaagataggatagagccagctggagtcggctatccgagactaccttccaagaagtacaactagctatccaaatctctattctgggggaaggctagatttcttgaagacccttcccgaaaggacaagaaagccttctaggaccagcaaaagcgagtccacaactttccaggaataacttttaaagacctttttatttggaggaactataccacaatatatatatatttgtaataacaaatataggaatagtacttcagatagagactcgaataggagcaattaagaaattaaagagacagaaattctaagtttcatgggaaatttcacaattggttagtagaagtaaaccaaattcttctaaagatattcaggaagaaaaaacaaatgacaagtattcagaactaaaacttattttcaatataatatgataacttataaatgacactacatgtaaatttaaacttattgaccatcttttgccaaaataattattgggacaccctacataatgtggtaggagagaaaaaatagtgtggtctatatgtgcccattattctttttattcttaccatttcagaccaaaaaacactagttccaataaatacgacacatataacgaaagaaaattacataatatctaacaaaatgcttaaaatacaaacttacccattataatggtgtaagattc

SEQ ID NO: 317841 - DNA, 582 bp, Cannabis indica
ggaaagaaatagaatggagcagaacatatatttgtgtaagttgttcatatattaaataaattaattgttggttcacaaaaatatgtaaggaaagaaaatgtaagcaaatgaagttgcttttaatttttatgttgaaatatagtgttctataaacaattttaattattatcaattttggaataatacaccaaattagagttttaaatttcgttcaaattttcattttcaaataatctttttcttttatgatcactttctttctcatagattttgaaatttagaatttactttatttattattttctttttcaagtgaaattttatatacttttagtatgttttaatgtgggctttaacaatttaagatttgtggaacaaaaacaattcaacaccaatccaataatctaaatttattattattattattattattattattattattattattattattattattataactcccatataaaatatttattattattattattattattattattattattattattattatatgttgaatgctcatttaaaagaaaaaaacaaatataattaaatatataaaaa

SEQ ID NO: 317842 - DNA, 2220 bp, Cannabis indica
ataaatgccagattcaaatactgaaacaaagttttggtattgcaggttgtttcacattgtggaagccttggtagttcttcttttgcatgcggttacgtccttgttgttgtcactcaagaggtaaataaaagagttcattgcaggttgttcttcatttccattctcttctgtattcttctcaggtgcccttttgttttggttttgctacaagtcaggctacaactgaccagaaattttaaataacaaaatataaaaacaaaattggtctttaatggatgacaaaaaataggttgaaggaactaattgacccaataataaatagaaaataatagcaagaaaaagaagaaggaaaatgtttggatggaatgcctctttatttacaattcaattaattttggcaccataccagtgttggtttttcttctttccatatcttgtaatatcttaagaaaatacacgacctgattgctaattgtgatatgtttcaggttccacatcttatggatcttattcttgccgagctacacaaagcttgcatctatacagttccaaagcacatagtatacacacaggtgatcaattgccatcattttgttaattatgaatttggttaatttgggatctttattgtttcgaaggtaggacagtatgttaggtcaaatatatttgccataatttgctacctaatcattaaagattatttaaaactggagtcagcatttgaatcaaaagaagcagattgcaagactcttggatttcgagaagacgaaggaaagattgagaatgttgaggaccatttaatacgattaaaatcatacatgaaactatacggtgctctggttcaggtaagacagtgtttactttcgcccaattattgataatttgaattctcacgcagctcaaatcaaatcagttctctgccatacttttttctgtttctctatatggaaaaaagctaagaattgttatttggttgttagactaaaattaacagctttcaaaacacgcatgggttgaaagaaggttgggcttggattgcaagattcttaaacactctccctgctaatagatatactgctgttgcattaagtgcattcctgcgagtaagtcatcgaaaaccaaaatgcattttcttttactctgaaacaaaacaaaataggaacaccctctaaaatttggtagcttgaacagatggcaggatatgctctcttcagaagatacaaatcccagttcagaaagattttgagcatcatctctgacaacttattgaatgctctaagatctcgggaaaatctggcatgggacacagtcattgcagaaattcagtcctacatagaagacaacaagtttcttgaagagtgagaaggaagaagcctggagacgtcgttgctatcgagtgtcgcggtgcctgaccaaaactcatatcaacacactgatccccaaaactcgtatcaacacagtgatccccgaaactcatactcttatcaacgcaatgatccccgaaacttgtactcaaatcaacgcaatgatcattattaatgaatgattattcgtgtgtatatatacgtttgcaaattgcatagtatttagtttttgttttttttgaacaaaaggaaacttttattcaaaaaagacaaaacaaatacaaagaccaaggcaggaggaacaaaccaccaacctgagctgttaccagctgtgtacaatgctcaaagcatattgatcttttttcttttttcttttaaaatgagctccaacaactctagcgttaacaatacatttgatttccttactaagggaagaaacattgttacaaacatcattaagaaggcaatcattcctgttctttcacagcatgtagagcacaactgagataacagcatttaggatcgttgctgcaagatcagcttttgttgatttaacttggtgaaagtcacaaaagaggctcggccaatttagcaaaccagaccagcattcaacacttgtaatcagcttttttgcaaagctacaatcaatgaatctgtgcttatgggatttagtagcagcatcacacaccacacataaaccagtagcaataggaaggaaccttagtatgtcacgagttagcaactgttcatttaaaatttgccaataaatgaacctatgtttaggaatgacaagtttgtgccagacattagttgcataggggaccttagcagccccttgttggaattattttaccag

SEQ ID NO: 317843 - DNA, 631 bp, Cannabis indica
attatggatttgggtaatttggatctttattgtttcaaaggtaggacagtatgctaggtcaaaaaaatttgccataatttgctacctaatcattaaagattatttaatactgcagtcagcattcgaatcaaaagaagcatatctgaagactcttggatttcgagaagacgaaggaaagattgagaatgttaaggactatttaatacgagtagaatcatacatgaaactatacggcgctctggttcaggtaaggcagtgtttattttcgcccaattattgataatttgaattgtcacgcagctcaaatcaaatcagttctctgccatacttttttctgtttcactatttggaaaaaagctaacaaatgttatttggttgttagactgaaataaacggctttcaaaacacgcatgggttgaaagaaggttgggcttggattgcaagattcttaaacactctccctgctaatagagatactgctgttgcactaaatgcattcctgcgtgtaagtcatcgaaaaccaaatacattttcttttactctgaaacaaaacaggaacacctctaaaatttgtaacttgaacagatggcaggatatgctctcttcaaaagaaacaaatcccagttcagaa

SEQ ID NO: 317844 - DNA, 795 bp, Cannabis indica
agagagagagagagtgtgtgtctagggcgtgtagaagagaggagaagagagaattagggcttcagatttagagtttagagcttagagagctagagacttagagcttagaggcttaggacttagggtttgagacttatgatttttgggtttgactaattccttttatatagtagagtttacatccctaatatcctttaaaaataagtaaataaaggtttatttacattattaattaataaataataaataggataattatctctcaaatatagggaagttgctaatattttcaccctaattttgtgggttgtaaatcaccacttaacttgttgtccacagatgaaggatgtgcaccaaaggcttgccaggaaaaggttggtcggccatgttcctgtcagggtctagccgactatgtgtctgccatggtctggccagcctcgcgcctgctaaggtctagtcgaccatgtgtcagctagggtctgcaggttacacatcaagtgcttcccagcctgcaagctgcacattaagtgcctgccagcctgcaggctgcacatcaagtgatgaccagcctttataggtgacggccaacctttgtaggtgacggtcagcctttgtagatgatgggcaacctttataggtgatggccagccattgtaggtgatggcaagcctttgtaaaactttccttgcgaagttcagacttccttagtaaaataggccatttcttggtctaacaatcacccttttggttggccagcttgtgctcaaaccctggtcggccatacaagcttctcct

SEQ ID NO: 317845 - DNA, 1328 bp, Cannabis indica
ataactaatcagattgtaaagggttttatttagggcacaaaacccaacacttgctgtgctgattcattgtgcgcagcaatgacaccaactatagcacggtggtctgagtgaaagtaatccaaatgagcgatgcgaggtaccagaaaacatcatcccaaagattattgatgaaacaccagtcaagacgctccttcaaagtgattgttaccgtgcgatttttaatctaagtgaatgcatcaccttcatatggtgtatcagtcaagtgacagtgatcaagagaagctcgaaagtctgccattagtcgttcattacgtaggggagccccttccttattcacatttgataataactcattgaagtcgccaattatgagccacgattggagaggagcagaatcaaccaacctatttaaaagggtccacgaagcagctttgtcttgtgcagcaggggcgccataaaaagccgtaaagtgaaaagttgggtcatcttgaaaggccataaagcagtagaaaaaggtatgaccatattgcaagagcttcacattcacattgtctttccataagagtattaatccacctcttagaccgatccttggagcctttaaaccattattaaagtgaagggtattacgaaaacgagtaattgaattagaactaagctttgtttccatgagaaacaagacatggggcgattgttgttgaacaagaaatcgtaaatgtctgaatgcgttcaggttccccaatcccagagcattccaacttaggattttcatggcgattggcggggctacgtagcaacctcccctgttgaagtgaaagtggctgtagaatctgtagtcacagaatcaacaaccacaagatcatcagcccctgaagaagatgatgacacaccattcataactcgactttgtttgagcattttcctcacattcatggtttcatttgggcgtttggggatacgatttggtgaaatattttcttgatctaaagcagcagtttcattggaacgtatagaggtataggcaattgtggatggtatagggctgtgaggttaggaaatagattgtgttgatgattgagtgttgtgtgatgatggataggtagcaaagacattgttggacataggatgagggagtgagttgtaatcaatatcatgcatgtaaacatttgaaaggtctgcaatgagattagtattattagtagtggaagtagcgattgtagcaaggggtcttgtatgaattgtaagagatggtgttgttggaaattatttcaccaggattttagatctactcacaagtatgtttattaacatcctaaataagaactttc

SEQ ID NO: 317846 - DNA, 1650 bp, Cannabis indica
aaagctagaactgctaaccttggtttgcatgtttgttagcgattctaagtgattaggggtgggccatccagtactagaaaaaaacatttggaacactttttttaactaaagaaacctaaaaggcaacacttatataagagttgtctcctaaactgttgctaaaaggtaggatcctatagcaacacttacaaagtgttgcctaatataatctttaatttttcaaaaaataaacattatgcaacacttgtattataagtgttaccattaataaaattattaataaacattgtaagttgctatatgttattttatttttatattgtggaatataaaaaaaaaataggtatatattatttaggttttcattatatttaaaatcttgtgcttatattatataaatatatatttaaaatattcgcattctagaaatctaacaaaataaactttgtagtgcattactataatttaaaataactaaagaaaataataataaaatgcacacacgaatattgttatatatctttatgtgaaaataaattgtattgcaataagtaaaataaaatgtgattacatgtagtagtttctacaagtacaattttagctaaatgtatatctaattacaagacttggataagaataaaaggtgttgatgttatcccaaagcttgaaattgtatcggtttgtagttaatcaaagctgtatttgttgatgtaccgactaaaaacaatgtgcataagaataacgtaaacattattaaaatgtacatatatgtatatagtataatcaatgttcagtgcctataaaaagagaactacaaatcatttcaatcacaagacaaagagtaaaatattaaatgaaaaaaatattgatgcaagcaaaacaattggaaagaataattactaattaaacaacgaaaaattagtattaaagaattatatataagtaattataatagtaaacaattatacttgggtaaacttcgatataaccagagatgtatattatctgctaagttatcaagaaggaaaatataatatctagcttattatgaagaattgaaagagaagaactatgaaataatagaactaaatgagagaagttgtatgaaataagtggtaagtttatattgagaacgtgtgaccatgaaatccttattaatattttcaaattaaaattttaaaattttattaggcgggtgcagttaaaacactactcaaaaatatatacatattattatataacttaaatctttttttttttgaactatcagacaatgcatttgtagaaagcgttgctttctattttatcttttaatatatacataacacttaaccaaagagtgttgtctaatgttcaatttaccatttgtttatatatttattttatttagaataagcctttagtaacgctttttctacaattgttactaatttcacaaaaagacaaaacaacaacactctcttttgaagtgtcactaattaagtgttgctaaatataatttttgtagtagtgatcccatagtcattagataggaaagggtttgtttaaacaaatactacttttctaagaaaatgactaagtctgaaaagaaagtagcaaataaaggagatatttttttcttgattccataagtgttctatcatcttattc

SEQ ID NO: 317847 - DNA, 1491 bp, Cannabis indica
aacaaaatacactcaactaaactaagtacattaatttgtgtcttctgtattcttgttctaatcaatgtaatgcatttctaaatttttacagacataatacctcagattgaaactccttatacccttgctctgatgcttcagagagtactttaatagctactggagtgtcatttaggtagccataataaacaggtccaaatcctccttttccaatgactttctcaaagttgttggtaatacttgtgatttcagagtaagtaaattgattttttttgcgctccaattctgacccaaaattgttcattgatttggtcttgtctgctcctatattattatatttgtataatttcaagaattcataatggcttcttatctctacatatacatatcatacactgttgaataaaatttagaatattacctttttttcttcttttaatcaatctccatcccataaagaaggcaactaagagggcagagagagatacaacaagtgctataataaaaacattattgtttttatgcttcttttgtttctggcaagaatttgaggagcagagatctgtgtttccagtaacactgaataaaaaacaaagcacaatgaaaccatatcaaaaatatttaatttaaatcaataggaatcatataatacacatatatatataccaaaaatatataatgtatatgtgttatcctgtaccttagtactagtttgccatttttggatcttcaatgaggttgactggaattgaaccagtgagatttatttcctctcaagtctctgaatcacataaacaaagtataagttataatcaaaagtactagcatggtgagtggccactcacaactcattattttatgtaataatgtaaaatctgaaaagcttacaaaaagcttaaggattgtagtttggaaagaaaatcaggtacagtgccagttaaactattgtttgataaatccctgaaatgatcgaccacgtacatttttagtaataaggagtcttaaatttaaattagtatcaatattataaagattaaagatagagcagagtcaggcatggacttacaggaattgtatcatagtaagatctgttatataagaaggtatcatcccagtcaatccacttgaagataagtttctaataacatggcacatttttgtaagtagttttgaattaatttgttatttgtaattgattagctgaagactttttaacttacaaggatatgattctaacttgatcttggccaatattgctgcaattaagaccattccatgtgtaaggagcacatggatccccttgccaatctttactaactccatattttgacttgatattcaacatagcaccaactattatgtaatttgtacataaaaagaatcgttacagttggtaaaatcataaaaatgttagaaacaattatgaaaagcatatatacataccatcttgttcatgtgtttgtgattgtgtgaaattcttaacaatataaa

SEQ ID NO: 317848 - DNA, 1682 bp, Cannabis indica
ctctctctctctctctcagttttacctgtgcaacgctggaatctagatcaagagtactgtgcttcgaccacgcccacccccaacgtactccaggttcgttctttccaagctagaaaaccttgatccccctgttctccatctctcaatatcactttctctctgttttcccttatacagtgatagtaccacaccaaaattatcctttgtcggtgccaatggtctagacggaccacaaaataagtttccttaaccctgagaagcccaacctcgaccctctttctcacccaaactctctttatctctcggtttcactctcactgaagccgaagttgtccagcttcgccctggccatatccggtcgtgaacgagctaaagaaacccgattttggtttctcctcatcaagatcttcaaggatttattggtcgatcctccatgcaccacttttgaccgagaactgccaccatagacggtggagccccaccgaccgagaccctcggccagctactgtgtttaacattatgagcttgagcttcgagtatcattttgagcctcgtaatggatttaaacacgtgggtatcatttatctactatttgctttaattatttgagttagattattggttctgaattaagaatttattataatcttggtgtttgagatatttcgggttgtataaacaaatttcttacacttaagtataattccatatttattattgacaaacgagatttatactcgtttattatgttagtttagaacatattttagagtcttttatgtcaatttagtttggtttcacggttattttcttttgttgcaagaaaatatgataaaaatataaaaaaaatggagaaacaagctaaatttgtagaaaagtgggcttaaatggagttatttttcatcttggtgaggttagtgatgtttgggagcaagatggagcaaagagacaaaaattggaaaaacttgtcagtctaggccatggcttcgaaatctggagccatggctccagaaaagacaaaatagcataaatgacctagggcctacgtctactgaagcaaaaatttgaaaaataaaaataaaaagatgactttctcaagtgaggttgcagctctggtaccccaagttgcgactcctaagcgtgttatttatcttttaaagttttaaatctcaatttttttagtatcttctggagaactttgttagtatatataaagtataaacacattatcattcgtgtttttagtacatttttagagctctaaactcaaaaattcttaattagcaactacttagtattttcatcttcttcttcttcttctctttctttaattttgtttatgttcttatttattatatgaatgcaatggttatgaacatgattttcatgcactaattttcttatctattttaatgtctatttaatgtcactttaatgtctattttactttttatgatgttctactgatttattcctctttattttaatctatatgatttatgcttaatgcttataaatacttgatcactatttgcatattttttatgatttcaattcgagatttgaaagatgagagttgaatatgctttagttatatagacataggttacatgacattaataattgtgagttgacagactcagtaagaaacgcatatagcatataattgttgggttttatgc

SEQ ID NO: 317849 - DNA, 4803 bp, Cannabis indica
tggccatgtaagcttttggtttgtagatacctcgcatagatctagtcaccatagaatgtgtccttggtatagttgaaactgctgtattagaaataggaacacctgggatagaatgctgcacagttgctgtagcatgagttgcattagtaagggctgctagaatgtgtgtggcttcaagatttaagtggacactgctttgattgccctgttgtagatgagaaggatgcatttgatgatctaaaccaggagcaacatcaaattgagtaacaacatgttctggtgaggcaattgggatagggttgctgatattactagaagcagtgggagcagcatttccgaatacagttctagcagtatcagcaccagaagcatatggagaagttgctgaagtaattggtgctgcagacctgaaaacttgttgaacaccagtagaaaattgcatagtaggacaagcagtagtttcagatatttctttagcaacagtaggagtattgtgagtagcaggaaataataattcattaaaagcaacattcctagctataaaaattctcccagcagcattttcattaacataaccttttatgtttgggtgaataaccaagaaacaaacattcttcagatctgtattcaagtttatgatgatgataaggtcttaaatgtggataacaagcacagccaaagggcttaagaatgtgataatcagggatttcatgaaatagacactcaaaaggactgagatggtgaagaaccggagtaggcattctattaatagagtgatttgcacattgaaatgcaaaccaccaataggaaagatcaagaccagcttgagcaagaagagttaggccagtttcagtgatatgcctagcctatgctttctttcaacactaccattttggtcatgggtatggggacatggttgttgaaaccgaatgccttggtcagctagaaatctctcaaaaggtctaaattctcaaccaccatcagcttggatagctttgatgggaagattaaatgtttttcaacaaggctcttaaatttgataaaagtttcaaaagcttgagatttgagtgaaagaggaaaaatccaagaaaacctactataatcatctatgaaaacaatataatatctatagttttctttagatggcatgtgagagggaccccacaaatcagtgtgcacaagagcaaggggttgagttgcttgagactgagataaaggaaaaggcaatctatgatttttgcctaattgacatgctttgcagaacttaagatctttaagagaacaagcaatattggcttttgtgaggatttttcttagagtattaggtgatgggtgtccaagtttggtgtgccaaacataaacatcagtaagagtttgtgtaagtaaaactgtagaattgtacacattgggatagacagaaaatgactctttattattttgttgattacaagtataggttgaagagtcaaccaaggtacaatcttgagtacaatttttattttgacacaaagtgaaatcggattgactagcagcagtagccaaatgcacctggagagccttttgatagagatttgagctatcatcccctaagagatagagaccatctttaattttgcccttgagtaagacagcccccgtttccttgtcctttacaaaacaacaagttttatgaaattccaagaaaaaattattatcattagtgagctttgaaacactaactaaatttttagtgatagtaggaatttgtaagacagaattaagatttaaaggacaagatttggatggaagagtggttgtaccaatgttagaaatactcaatttcttaccattagccacagcaacagtttcttggcaagaataagggatgacaaacttgagattatcagtagattgagcaatatgatttgttgcaccagtatccacataccagccttcatcatcaccaaaatcaagaactgtttgcgcaagaaaagcttgaggatcatagtcaatggtttgctcaacaatatttgcttggggctgagggtggggagctttgggagtgacccaatttctgtcaaaccgatagtgacaagtagctgctgtgtgtccaaacctcatacacacttgacacaaaggtctatttttgttgacaaatctgaatccatagccacagttaccagtttttccagcattttctgtttgttgaccctttccagcattgtgaaaatatctgttaccccgagttcttgatcctaaagtaagatttgcagccattttcattgagaggtccaaaaccgtggagtgtctttcaagtcttgattcatgggacatcaagagagcttgaacttcttccaaagacaggttttcacttcgagaagtaatgctagacaccacagaatgaaactcgggacaaagcccattaagcaagtgcaagattaaatcaaaatgatgaacaggatatccagcaatggccaaagaatcacacacagacttgattttgtcaacataatcagaaatggacagattacctttctgtagattggttagttgacatttaagttgaagtaatatttccttagattggctagcaaacttctgttcaagcgccttccaaacagagtgcgaagtggagtagcatgcaacagtggccaagattccctttgtcatttaagatcgaagccaagacagcaataattgatccttgcgacgccattgtagatacataggattgtcgtttccatttatgagtttagcagggggagctgaatcactgaagagcaattcatcaagatcatgactgatcaccgtgggtatgacctacgacttccatgaaagaaagtttgagcgatcaaacttcagagttagagaagcagtgagagaatttgagaaaggattccaattttgtgccatcgaggaggactgagccggcacaccaacatgatcgaaagctccagcttgggacgagtggtcaccggaggaagccattgacgttagtcaatggctctgataccatgaaaaattaaaaagggagagaaaacagagtatgtttatcatgaaagaatttggagaaaacttaatcaattgtattacagaagcaatcgtttatatatacagagattacaggcaaaaccaacttaacagaaaagtaacaaaaactgacaaaaaacaaactgaaactaactaactttaaccaacatcagttagttggttatcagggtgtgcagtctactcccattgcaagcaccgctataccatcggcccaatagtatctctttttgtctttcaaattccatttaggtgcgtttgtattttttctaaatgctttttctttcgttggggttttatttgagatcatgtgcctgcaattgtatttttcagaaattatcaaaagtttcaatattttttctttgttgatttaaattttgaaaggagcattgggtggcgatgtttcacaatgtttggatctccttctaataaaaatttgaactcaatgaaacatactctcatggatagcaaaattataagatgtatttttcattttttattatttctcaaatttcaaaagttgttatttgagtttcaatcatcgattttgagactttcttttttattgaaatgaaaatgttaaagattgttcatattgtgatggtgctcatgatttattatacgaaatgagattctcaattagcaaaacactaatcaaatactttttatgtaagccattggtattcctttcataatttaactagacattattagttacataggcttaattctcttttctttatttgtatcagaaaatggtttgtctatgtatattattttcaaaaattattaaattcttcattaacttagccatgtttggttgtttcttaatttgcaatggcataatagaagagggaaaaaggaagtattagaaaaaaaaacttggataatttgtcatttatttgtaaattgaaaaggataaacatactttttttattcattttctttaccaatttttttatggtatattctaattggtattctctattctgtattttttttcttcagttagagtacaaaattttagaagttggagacttctaatgcagtgtcataagttccacacgacaaattagaggaaatgagtgtctctccaaataaagcaataaactaaagtaatttatctaatcctatccattagcaattttcttccctatctctccattttggatttgaagttcaagtctagttccaattttaataaaattttatttcctaagttatttacaagcatgacattcattctaaaactgaagaaatcattgctaaatttatgataaggaacataatctaataaagttttgacttaagattacaatcctgattattaaatattttctaattggtgctgtcatgtatactacatatggtactagagaaatagtacttgagaatggaacaattggtggagatcttgtatttttcacattacattcttgaatgatccattattattttttccaagtagttatcttcatttaacatcttcttttgcttctaaatttgattttttttttcaaaaaaataaaaaagaaagaaaagaaaatcttttgtagttgagaacccaatactaataccgagacatggtgatatttatcatgaagaagaaagaattgaagaggatgatcgagataagtgaatgatattaagagttagtcccacattgctaatgtgtggaaataaattgtgatatataagataaaagggctactcctcccattgccaattggtttagggatggaacctcattcatcttattcctcaaattctaacaat

SEQ ID NO: 317850 - DNA, 2481 bp, Cannabis indica
atattattatttagaaattaaggtttcatttattcattaaattgagtaatgagtaatatagttgattgattacttcatgagtgacataatgtaagaactatattgtatgaactggataatattaatttatatatatgaacataaatgatatagaaagaatatacgattgggttcacacagcttggccgctactatgcatatatagggaaggaaatttcattataaatcaaaaccttaaaatatataattaacatacctaatcttgcacataaataaataataataataaaaaaaagtggtatccttaatacatgatctgtcttcacttaaagtctgaaagcgttgaaccatgagatcagtctaactaaattagcatatatctcttatatatatataatcattattatcatcaaaaaagccttaaatacagactcaggtcgtgtaatgatcaatcatcatatcacacataactaattatattagaaacaaggttattattatcattaattagaaatgataccatacatttctaaaactagtaataattcactaacactcttatgggtgattaatatggctttcttcatcattcatgtagtgaaagcttctcttcaggactcacatgttttttctctactacagaccaattggtgtgaagaccaacgaaccaagttgcactgccaatggcaaggtatcaattgtgaccattctggtcacattactcaaatcactttacatgatattaatgatgggatggcttcaatggagcaaagaatgttaaagaatctcaatttcacttgtcttccaaatttagctactcttgatctatcaaaagcaggagttgttgggattattccaggggagataggtactcttacaaagctcacccaccttgacctttccgacaatgttcttacaggtgagatacctctttctttaacaaacctttctcacttgaaagtacttgatctctcttacaatcaactcaacggttccattcctcaacaacttggcaacttgaatagtttggtgtccttaaacttaaccacaaatgccttaacaggtgcaattcctgagtccattggtcttttgatcaaccttactcatttaaatatgtggaacaatcaaatcaatggttccattccaatcagtataggaaagttagaaaacttgctccatctagatctaaaccccaactacctcagtggaccaattcccttggctttatttcgattaaccaaattaatccatctcgatatttcaaataacaaactcaatggttctatccctaaagctttgggtaatttaaccaatttgtcgtatttatctcttcatacaaaccaattaactggttccattccttcggaaatacgaaatttgacaaacctagaatatttggaccttcttggaaacaaattaactggttcaattcctcgagaaatcaaaaacttgagaaacttaaaaagcttgtacctgagtcaaaaccatttaaatggttctatccctacagaaatcgactccttgagaaacttaacaaatttggagctaagtctaaaccatttaactggttctctccctccacaaattggaaacttgagaagcctagtaacattggatcttaaacaaaacaaattcatcggttccatccccttagaattccaatttttaaggaatctaacatatttggaccttagttttaatgagatcacaggtccaattttcccttctttgattggtctatcaagtattcaaaatcttgccttgagttcaaatagaatcaatggttctataggtaaggatattgagaatctttcagaattggactctatggacgtgtcaaataacaatatatcagggatcataccgacccaatttgtcaacttatcatacttagactacttgaatctttcacacaataatttcagaggtccaatacaagatgcgcttctcaataaattatctacaccaacatctggacatgaattattgtctgacttatttattggaaataaggatttatgttgcgataccataagtgtcttcccaaactgcccaagatcttcccgaagtaaaaagaatattacaacagttaaaattcttctcatcatcatctcaatcatcttcttttttactgggtttgttgtgattttgaaacggtaccttaagacaagaaatgttcagcctgaagcaaaatcaagtaccagaaatggggatatattttcaatctggaattttgatggaaaaattgcatttgaagatatcatcaaagcaacggaagaatttgacatcaggtattgcatcggaacaggtgggtacggtagcgtgtatagagcacaactaccaagtgggaaagtaatcgcattaaagaagctccatggttcagagattgaaaagccagctttaaaagaaagttttctcaacgaagtagagactttgacaaaaatacgcacaaagcattgtgcaactccacggatattgttt

SEQ ID NO: 317851 - DNA, 3639 bp, Cannabis indica
tgatagtgtgtgtactgtgtgtatgcgcaatagggaggcacaattttaagtttttaattacatatcaataatgctaactctatatttgcataaccatgaaagtgtatcacaaatctgcaaaggggtaatggtatgaatatgaataattgtcgtttacccgtcaactttgtgctttccagtttgaatttttatctccatgcgacacatatctacacaaaaaaaaaagaatcaatgcttttattagtagtgcaaatcagctgctaaaatagcttgcaagggacatgccccttactgtaactatgaactaggaataaacaagcagcctcagccaaataattatttgcagatagtttgacaaaaacaagcaagccattgtttagactactaagtaacaccctacaatccaacacaagcaaaccgaaaagagagttcatttgcatcgagttgtaggtagctttgaaaagcactcgacagttagtctccaccaccacccatgcatatcgtgtctaatccaactttaaaggagagttcgtggattttattactatactttgtttggaaaatattgtgataaatcccctaataagatgtatcaacatatgatggtgttttaaccctaattttttttaatgattttgtgttttaattagcttacaaatatttggaaaattcaagttatttttagtatattatatttgtttctcaatttaatatatgtattataggagaagattttttggattcagtattgataatcaccaaaatattttcgttgcatacctgatttagtatcgaataactaacaaataatatttatagtcatcaaaatttatttttttcttcaactttagcaattttcgattaaaaaactagtgataagaaatgaatataatttcacttaagggtaattatgactttttaggtgaatataaggttatttttgtaataaattttgaaaggggtatataattatagaagggtaggggtcgcaatccagatcatgataaaacaacataatacaaactcaaaacaaattatagcgagtcaatgtcataaaaaaataagtgcaagttaaatttacgttgaacccaaatgacatgataattttttgagttgggttaggatcaaaccgatgacatgaagttaacacaattgatcttgtatgttttgcaatatattttcttttgtcgaaagaagatctacaattgatctacaattgctaagtgattctaactacatacccttattggaaggttaggatgaagactcataaaatcccaaaatgaaagagctttggaatctattctaacgggttggtcaccaccagttgaagaagatgatgaaggtaattagaatagtcaagtgagtaagatatattgtctagtaataacaataaatttttgcatgctatttttaattgtgttggtgaaggttttattaaattaatctcctcgtgtgaatttgtaagtgaagcttggctaattcttaaaactcactttgaaggaattacaaatgtaaagtgttcttggtttattatgttacaaagtagatttgatgatcttagaatgttcgattttgaaactgtttctaaattttataaaaaattgtcagacattgctaatgacctttttatcttgggtgaaaacttgatgaatctattttagttaggaaaatagttcgagttcttcctgacaggtttaatacatagattttagcgatggaggagactaaagactttagcacaatgaatgttgatgggattacttcgaatatttgagcttaatcaacaaatttgacaaaagaagaaacacaataaggtagaagaaaaaaaaattgattgccttaaaaatttctgagaatgttggtaatgatgacgagggtgataatgaattaaccatattaatatgatgtttttgtcattcttgaaagcggggagacaaaaagattttttttttaaattctcaaaaagtaattcatcttcaaaaaattttgtgcataacaataaaagagttattcaatatagagaatatgatggttttagctacatacaatctaaatgtgctaatgttttcaaaatgaataaaaatagtttgaatgcaactttgagtgaaagtgattatgaaactagtggtgataaattagttgctttaacctctgttcttcctagcatgtatcatttttttttttacagaaaaagagaaatcttgtttgcctaaacaacattattttggataataaaagttttgttggtgctattgaatttgaatttgatgaatttgaactcgaggaagattctttggctgaatcctataaggttatgtacgaaaagtggatacaagttttgtaacaccctaagattaggaaatcggattattagcaaaaccctaactagttaaatataaattagtgtggaattatattattatataatttaaattttttaattatactgataaatgacattttaagaccctattggtgagccagggttatttttgtaattttgacacaagaaggggtaaaattataatttatgtgaaatatcgtgcttatggactatattattatatagtatatttgttttgtcttttgcaggtgttttttgacaagtcggcgcggtatagtcacaatcgtgtattttgagccaaattgggttcggggtcatacatttttgggattttattttgacattatttagataattatgaaatctgaaatttatgttatttgtgtgtgaggtgaaatgacaattttgcccttgctgtatatatatgtggtttattggccctagggacattttggtcatttgaccatatttgatatattcaacaaagtggatttttgttaatgaaggaaaaacctattttttggtttctacagcccataaccaacccctctctctcctttctcaccttcctcaaagtttgatatttttggagttaagcttagaatttgaggtgttcttggtgtgttttgttgtttaagcttgagaaacttgtggtaagctcttattcctcctttatttgagtttgatttctaagtttaagggctaagtattgtaatgtaataattatttttgatgttcaagtgagatttaaatgcatgttggtagaattattattgatttgatgattcttttggtggtttaagttcatagggattatggaatagcttctattgttctttgtgttatgattttgtaaagttgagatgtgtgttggaaaattgagttatcttagaatgttttggggagcttaattgttgttttcaagcttgtgaagtggaagggtgatattggttttagtttaaagttgttgctagttttgatgcttgaagaccttgaattaaattgtatatattgatattgtttaaagtttaattttgggtgagttgtgtatttgaattgtgcatgttttggtttgagtttggggtgtttttggcatgaaagtcgaatgaattggaattgacatttctgggttctcaacctaggcgccacgacatgctctgggagcgctacgactcacccacttgaaattttgggtttttctacctagaagccgcgtcatgctttgtgagtgtctcgaaccgcctgggtatttttgggcagtttacttgttgaactttggttgttcataactt

SEQ ID NO: 317852 - DNA, 950 bp, Cannabis indica
tgagcaacacacaaacattacacaaatttgtctattctaaagacatactaagtcaatccatgaaccttaacattaaagttactaatatgagagagattatccaagaaaactagataataaaaccttaatatcagaatagataatcccctatttgagcaattttaggaccattaaacactatagccctcacggatttatgcattcacatggctaattttgggatctaactctaataccactttttaagactgtcgaacactatttatttccccattggtctaatattgtccgctttaggcctaagcccaaaaggcctcattccaatagagatagtgtccacccttatatacttaagatccttcctatttctaaccaatatggaactttgtacacccaagaagcaagacttatattattatgttcttaaaaatagtattttacttattggttagtttgggtaatacttagcaaatgaaaacagaaaacaaaatctataaagaaaactaaagagcagagattcaaacaatggcaatgtaaacacaagtgatgtattttaatcaacttgttgggatataaattatttgagacaatcaatgccacatcataatctgaatcaacatttctgatggtatcacctcatcaacattctcccacgaatatcatcgaaaggatttaagagagagagtgtgaatggcagtgcttcttgagcaatccgagtgaggagttctgacaataacacctatgttccaacataggctatgcaatcaagttttaattatgaaaattcaaaaatgcagtggttaattagtcaatagagtacaaatatattaaaattggaaagtttaaaagtacattcttctctaaaattattggtacgaatactaaaacaaaccaaattacaatccaacacgaagatttattgtttcataaattgaaggtgaaaaacatga

SEQ ID NO: 317853 - DNA, 1182 bp, Cannabis indica
atgaagatgtttcggtggacacagtggattttgacgatcggtggtgtctagttgggcggtttttaacggatcgtagtatcgactttgacgctatgcaacacaaaatggcttcgttatggcgaccagtccgtggtttatttgtcaaagagctagaaccgaatctcttcttgtttcaattttaccatgatatggacattgatcgtgttgtggaaggaagtccatggacctttgacagaatccccttgatttttgaaagacttaaacagggggaaaatcctcgttgtataactccagtcgaattgacttattgggtacaaatacatggcttgattgctggatttcgttcagaaacggtgctgaaggacctgggcaactacattggatcgtatgtcaaaatggatcagaataactttgctggagggtggagagactacctaaggataagagtacgaattcgtgttgatgcaccactaaagaagggacgtaagttacagatgaggaacgggccggagtgcaaggcgatgtttaaatatgaagacttatcaacgttttgttttgtctgtggattattaggccactccgaaaggttctgcgagaaggcttttgacacacctccacacttactggtgaaaccatatgatcttgagatgaaggcggcgccaaggagaagatcacataccattggtgctaaatggttgcgtccggaaatggctggaaaacagattggggagacctctgcaactccggcaacaagcagatcggaggttcgtatcattcccgctcaatcaggggcggaaataatgggaggaaatcgtggagtaattgatggagatgctgatattttggtccataattttgatttgaatggaggaggtaataaaggagatataattggaaagtcagctatggggaataatgaagaggcagatatggaaaatcagattgtgtttgagcaaaaaagaaggagagtatctatgggaattaatggggaattgccacaggagaatatgacaatggaacatgatatgtttgatgtatgtggcaatgagcacgtgatgggtgatgttaatatctcatccatgcaaaaaaacttaagtggggcgggctctggtttagaggcccgccaagagttatgaatattttcagctggaattgtcgtgggcttgggaacccatggacggt

SEQ ID NO: 317854 - DNA, 722 bp, Cannabis indica
aattttaaaaaattatttaagtttatattttttttaataatgtggtgtatttataagtttaaggggtgcaaatatcactcccctattatattatatgaaacccgatactaaattagaccaatagcgatattaacacgtaagagagtgcttgacaccactagtgccttttagcatttctcattataaaatgatgtactactaccatggtttcaaagtaaaccaaacctttaattattgtggtttggtttccaattatagtttaattgcttccccttaggatctcaattatcgtgctgagctgtctatatagcagttcttataaggaagtgtttttgtctttcactaaactaaaccaaaccaaactaaactgaaaaaaccgaaactagtgatatacatcattctttctttgaatttcaataccaactgtctcactcaactaatcaaataattcaatatgctccttttcttcttctcctttctttctatatattttgttgaaagtgagagcctactaacattcataagaagaagaagaagaagaagaagaagaagataaagctctgtctgaagcttgcaatggcggtgacacaaacaagaaatggaagtttggttttcgccattaatggccaaaggttcgagcttccaacggttgacccttcaactactttgcttcatttcttgcggactcagactcgtttcaagagtgttaagctcagttgtgg

SEQ ID NO: 317855 - DNA, 1203 bp, Cannabis indica
ctaaaattgaagagatcatccatctacttctgtatgtagatgacatgctcattgtgagaaaaaaaaaagtccaaattgacctatgaaagttggttaagagaagaatttgaaatgaagaacttagggaaggaagctaagattctaggcattaatatcataagggatagaggaaatggaaccttgaggctacattaaagaattacataaagaaagtcatagaaaattttttcatgataggtgccaaacaaactaagtaacctatgaccaattagtactatctaagcaaagatcagtgccctaaaacttcagcaaaaaagggaagctatgagtgaagtgccttattctagtgcagtaggatcaataatgtacttaatggtcaacactagactagatctagcctatgccattagtattctcagtaaacatatggcaaatctaggcaagcagcactgggaagcaatgaaatggttgtttagatacttgttataggatctactgaggtagaattaaactacaaaagaaggaacaactacataatgatcactggatacagtgataccgactaagtaggtgacagagacaataggaaatctacaccaacctatttctttactctatggggaaattatatcagttggaaagtttaactacaacctttggtagcattgtccaccacagaatctgagtatatagttgtgacagaagctattaaaaaggatatatggttaaaaagattaatataagaacttaagctacttaatgaaaaacctacaatctactctaatagtcaaagttgtatccacttatgtaaaaatccagtctttcatgacaggataaaatatttagaaattaagtgtcactttatacaagataaagtgacacaaggaattttacaaatagagaaggtcccaacagaagagaaaccatctgatattggtactaaggtgctacccctaacaaatttcaaatattgtatgaacttgttaggagttggtgatggtggatgaccatcaccagaatgagctaagactcttgatgaatgatgcactaagaaacaagtgacataggaggaatctaaggtagaaattgttaaaattagattcctatatctcacttaatataagtaaaaggctcgtgattcttactcaccagaaattaggggtgttcataaaaaccgaaaaaccgaaaccgaccatcaaaccg

SEQ ID NO: 317856 - DNA, 628 bp, Cannabis indica
acagaacgcatttttgtttttcaaaagcaaattttttaaaaacaaaaattttaactttttttttggtgattaaaaaattagaaaataaaagtgttaccaaacggcaccttaatctcccaatttcgcctataaatatattattggaagaacatttcaaaacacatctcttcacccactacacatctcttcattccataactctctactttgcaaaccatttcactcatatttctatcattttctttctactagttttacattttgaagagcatgtcaagtatgtcgtaatttttattttaatctagttatgagtttctaatatttttttcaatattattaagatgataatgaaacaaaatgtaactagacaatatttattttttaatgctaatttcctatttgtgctataaggtttatggatttttctatcaaaaatatgtctttttcatcttcaatatcatgtattttttattgttagagcatgtttctacttagttcttcattatgcaaaaatataatactctttgattaaatgtctttcattaaactgtttacatctaattcttaaaacataagtatcatattttgcctagatatagtttctttgattttgtgtagtttcattaaa

SEQ ID NO: 317857 - DNA, 2025 bp, Cannabis indica
aaattactcaacaccaaggagcataaatttttgtgaagaaaactcaagagaattttgaaaatatagatacaaattaataagttttttttgattcagtttgtcagacaaaagagactctaaaatgtcttatttcaatcaaaggccatcatgttctatttatacggattcattaaatttagggttagaactaaatgagtcgatttaaaagatccaatggcttaaaataatcctccattgtcgaaatccctatatggcccatgagttagattttttccaatattttgcttcttgatgaagcaaatttatctttcttaagtattgctattttgtcattctagttatttaaatactaatcttatctctttaaaaattataattaactatcaaataaaattactatttaaatatatttattaattagaccttccaaggtctcttaattaataaataaaccttaaattctcttttctctcaattatgcccttccttggtaaaattcacaaataaggtatagtcattaatttagaatcctattcgattaaataaatcaattaattgatactacaaaacaacagtatcccaattagtgtggtgaccatgggcatttgtaaccaagcacccaacaagtaaattctatatcttattaattcgtattgactccactatagattcgaaattgcactcctgattacatagaacgctatattcaccaagaatagatacactataaattatctgttattttaatcaaaataatcaaagatcctctatagatgatttacatcgagtaaggataaatttaccgttttttccttcaatgtattttattattaaaacactaagcttcttataaatgatattttaataaactaatataattactgaaataagaactcttccatttatgtctgttagctacaagctctaaggaaatcatcatttcacttcaaaattatagaagctatagatttcatatacatatgattagcgctcctacttaagtgcactaccatgttcttaatttgttgtaagaagtattgggccgatccaaatggtcaactataacgaacaagtaaaagaatataagtaatatatttaagtaagaacgtaatcatttaaggattaagatcttttgatctatgatcaactaagtgacattgacttagaaagatattatagtcgatttatgatatcttttccactgacaaaattggattggtccagtccgatgtatagcaaatacatctgatactagtatacttttttaatggccaggaaaggacattctactgtgataacatcactgtaactgtaaataactatacattcaggatttaattgaagttatatattaaaaaggatcatgtaaactacatgtaaacttaaatgatttctaatcttttatagagagtaaataaaataatttagggcataaaatcctaatattaaccctcaaggaagtattcgagcaaggggccttagaaatctagtcgggggacctgttcatccactgaacaaaggattgcttaggctgcccgaagctatattggtaggactctgcctatccttaatggggagcttcaggagcttgaggacgaggagctagtgtgtttggagtctagcagcctttaagactaaacatttgtaaatttcatatttgattttactaaaacttttgcattgagaggggctggctggcaagatgtgcaccactaggaggctggtcggtaagggttgtataaatgagaagttggccgaccgaaagggaaccacccaggggctggctagccaattcttcttctaattttaacttggcttttattttgatttcaggccatgctgaagttcagcctttactcatggtaaagccaatggctcttttcgatctcaccgagagaagctaaaggccatgcagaccaagcttcagacggagagggacgcacatgtctagttttagattttcctaaaaaatacccaagatttgaacaatggcctgaatgcttacttggtattaggaaccaagaa

SEQ ID NO: 317858 - DNA, 1334 bp, Cannabis indica
aaaagcatctggttttgataaaactggttttgatattcaaggtcaatccctaacatattcccacaggggttttgaaattcagggtcaatccctgccatattcccggctctaggtgaactgatcctgctttcagttgtttgtcctaattgccactggttgacggttggtttttctgtgtcacagctctatacaacagccatcgcaagctcgtatctgattacttcgcactacttctacgtaattgcttgaccggactaattgcccctagtccaattaatgctgggcgaccttctttaatatcccccttttgggcgtcatcgttcttttcctgtaatatgttatcctttcgagataaccagggcatcctttccttcaacaggagaagattgtggtccctagtcgcttgcgttgttgggtagatcgggctggttatagatattgtcctgcccctttatatattgctgcaagtgtcctcgcgcaatgaagccttctatctcatttctcaacttacgacattcttttgttgtatgcccaatatctccatggtattcacggtatctggttgggtcccttttgcgtctcgcatgcctcatgtgctttggtttgctgaaagtgaccttgtgttcatgcgcgaggtagattctctcctaagtttcattaagcttggtatagatagcaaacacgggtacatatttgtcgtgtttcttttgcttcttatctttgggcgaccccttagagttgtctttcctctttgacccagacgctcccgactcgaattcttcagcagaatcacatcccattttttttgccttgctctccgacttgatgcctcctgaacttatcatccaacttgtctatttgtaaatggatcgaatcctcttactttggacctagttgttggcgaagatcaggttttctcgttcaagtgttctcgtaggtctgagtggctatgacggctggcggatctcgttccacccatagaccgtattctgccttcttgatcattgttgcagtattctctccttctcacattgattgactatgggttatcgtgtgcctcgtggtagcacttgcctcttcatgcctcgtcttctcccttgggtatggctagtctcgttccccctatcaagatttgtgcgagctccttccctttgaacttgggaagcacgttggcgatttcttaacggtgacccatgtgccccaggttgtgtctcaagatttcccttatttctacgaggaatttccagttccctggttcctggttgatcattttgttggaaatatattttaccaggatctagatttactaccatgtatgtttcattaacatccta

SEQ ID NO: 317859 - DNA, 2231 bp, Cannabis indica
tactgagtttgtcgactcacaaacattgtttgcatgtataagtaagggcaaggctaaggttgagcagccgtgagagcgagttgatgaagattgtacatgtcgggacagttaggcctggagcgtacggtctttaggacaactaagcgtattttgtatagtcgctaggcgacaacttttgtactatgcactatgaaatctgtgtaaatattttgtaaacggaatcccaattgtatataggtatgttattttggtatttataaatagttaagtaaagttttaattattcacgattttcaataaactcattgattagcaatgagctgcgcagttaagttaaaaatcacattaacacgcctaaactagtagggtgttacatgataatttattgatcatgtgctctgcaacttcaaggctgcgaaaagttttgtggttgcgtccaccaaagcatttctacgacttcgttcaactttttccttaatggaggcaaggttagtagattcacccccgaagtgtggtattatacaaggggatcccctttccccctatctttttatctaggcagctgatatcctctcgtgtattttggagaacgtcctagattctagtatcattagaggaatcaagttgagcaggaatggtccccaactagcttgctcatctcttctttgtagatgatctaatccttgtgggtagggctacgatagaggaagctaaaggcatttagcaatgtctggagttctgcgattgatcgggccagcgtgtaaataaacttaaaacatctataatactagcgatgggatgaaacggggaatttagcaagcgcatgggctcaacatggccatgaataatattaattatctaaggtttccattgttttgtaatcacaataaagatgttgatttcaacttcattctggataacctagtcttgaaacttcatgggtaaaagttgaaatcattgtcttaggctggacgtgctactttgataaacttggtcgggctttccttacatgtctacgcgatgcaaaccacaaagttatccaagaaactagcatctaaaattgatgggatggtaagagatttttggtggggttgtgagccaggtaaccagggtatctatttaaaggcttgggatcagttatgccttcccaagtcttggggtgggcttggcttccgtaagactgtggaaatgaatcaggccttactagccaaataaggttgggctctccttattgaggagcaatcattatgctacaaggttttgaatgctaaatatctcaaaggtaaacctttttgaagtgttcatccaagaatgactcttggttttggaagaatattatgaagactaaagaaattcttatgaaaagagcttgtaaacttattttgaataggaaggatactaatatttggaaagatctatgggtttacatggtcggaatttctatcctcatcctgcaatcgctcagcctgagggtttggaaaaagtaacagatttactttttgacaatggaaattgggatgtgcccaaactccattacctttatggcctggaaacaaccaatagtattatcaaaggtggtagatcctgtggtcaaggtagagataaatggatatggaccaaagaattagacggtcaattctctactaagtctgcatatctagtgcaggccttgaatcgtgctcctacttgcaatgttgctcctggtctatggaataaactattgaattctaaaattttggagcgtcacaaagttcttttggtgaagtcctctcaaatgccttgcctacccggtccattcttgctaggcgaatacatgttgaggatgtttcgtgttctatttgtggggagggagagaaaacaatggagcatcttttcctctattgtaactttgcctttcacctatggagctcttccccatggggtgtgatgccagttatggactctggggcccgtgtgtgggattgggttaaatttttatgaagtctaaagtctagacgagtggaggtcaaagagttgttcctgtatgcttcgattgtggtggacaccatctgaaaaacccacaatgacaatgttcataataattatatttgtaacattaagcattgtattgactctatttctgtattacgcagattatggttcttgtccttttcttgcggcagtgacggttgagtcacctgtttagtctccgcctggaagattggctcaaaatcaactatgatgttaaagtt

SEQ ID NO: 317860 - DNA, 622 bp, Cannabis indica
aaaaaaaaatatttggaaaaaccctacatatcatttttctatttaatatgttcatttttagatataaaaaacatatgttttcttgttattgttaaaattacataaattatttggtggcttaagatacttattagctacctttttatatatgaaaaaaaaattgttaacaactcaagcttatttttggaatgtgattgattaacttatggtatatatgaaaaataaagtagtagttaatttttttaaaaaaaaatagaataatttataatatcaaacacaatattcaaactgtttatggcaagtgtacttatcttattttaagataataatgataagtaatgaaagttttgagtttgaaagcatcataaattcaatgatttttttagtgtcataagtacctaatttttataaatatgtaatattatttcaattttgtcagtacaaattccgcttgaatttattaagatagtttagaagtaattgattttattctaaacccaatgatttcggtattctatgggctcgtttggaacgccgtattaggtcgtattgtattgtattgtattatattgaattggattatatatcatatttttatataatactatattaaactttaatt

SEQ ID NO: 317861 - DNA, 1107 bp, Cannabis indica
acttttagattcccattcccacttctcccattaccgcataccaaacaaccctagaggtttggcccctttataacgataatgacctactttccttttaattgtattagttttatgaaagtatatcgagatcataagacctagttaggtgggtttctcaatatatctcgaaaaatgttacaaatattttagagtgttttttctttaaaagtacgtccaaagaagaccagctgaatagtgaattggcctcattatttaatataggaaaaattgaacacattagttacccaaaaaatggacatgcttaaatgtgaatcccatgattatcttattttattacattaaattaaatcccacgaaaatagggatactaatgggctagtattgtggaatcgattaagaaaagtatctctgaagatctttagcgactttctctaacggcctcccaggctgtgtggctcacatcgctcgacgagtggtgaagacttgagctcattcagagattttggtatcaagcctagttagtacatattgatgttaccctgcccagaggcaatctcccagccacgtggcaatttgtcagatgccacgtcactagtgtgaattttgggttaacaaacaccatttcatgtttctttgttttggtgaattgtactcaagaaaaatgatttaaatgatgatctttttttttatcagacccagaactctaaattgtaaattttcaattgtaattgctgctttaatgaggcttaataataattgggcactggttttgtgaaacttaattttttgggcaaaaaaatattacttaatgataaaattttgagacaataaaataataaatcatatttaatgatgtcactgtaaaaatttgtcctgaaaacgatatttaatagagattaacgatgtaatttgataaaaaaaaattagtgtggcataacttttcactataagttatcaatttgaggtgatttttttttgaaaaaaactatgatatttattaagagttagtctcacattgctaatgtgtggaaataaattgtgatatataagatgaatggactactcctcccattaccaattgattttgagatggaatctcattcatct

SEQ ID NO: 317862 - DNA, 517 bp, Cannabis indica
caaagtccatggccctttaccatatgaggagtagacctgatcggacagttgcccaaagacaaaggtagagtacaatatacggtggtcgcagtagattacgtcactgagtggacagaagccgagcccctggcaaccataacatctaagaaagtactggattttgtagtaaaaaaacgtcatatgccggtacgaaatttcgcacaagattgtctcggacaacggtaagcagttcgatagccaaatgttcacaaacttctcgacacatggaatcatcaagattttctccgtagtagcacaccctcaaacagatgggcaagttgcagttaacaagacactcaaagacaccatgaaaaaacaacttgaagaagctaaagagaactggccggaggaactgccataagtattgtggtcatacagaacaacagaaaggataaaaactaggcaaaaaccattttccttggcttatggttatgaagtaatgctgcctgtagagttagaacctgttgggttttgtgcc

SEQ ID NO: 317863 - DNA, 1343 bp, Cannabis indica
tagcttgtttttcattgcaatgtaactaataaattgctgtacttgctattatctgcgctttgattttaattctatttgtgtgcattaccttgaatcttattttgaccctaatctgtgaattactgcagcaattgagggagaaaagacgtgaaaaacgtgcgtctgagttggtacaacaggatgatgaggcaattgtaaaacttgaaaatgcagccattgaacgatcgaagtctgtggacactgcagttcttgggaaatacagcatttggaggagagagaatgagaacgagaatcctgattctacggtgcgcttgatgcgggaccaaattataatggcaagggtttatttaagcattgcacagatgaaggggaagctcgatttatatcaagaactacagactcggctcaaagagagccagcgtgccttaggagaagctagctctgattctgatttacatcaaaggtagctgtcgatcgtatactgttattttatgtctaagctcttcctttatttttgtatcaaccttacgtttgctggacttgaccttatctgttgtctccatgtgctttcagtgtacccatgaaactaagggcgatgggtcaagttctatcgaaagcaagagagcaactgtatgattgcaaattggtaacagggaagttgagagcaatgcttcaaactgcagatgaacaagtgaggagcttgaaaaagcagagcacatttctgagccagttagctgccaagaccattccaaatggaatccactgtttgtcaatgcgcctcaccatagattactacctccttcctttagagaagagaaagttccctaagagtgagaacttggaaaatccaaatctttatcactatgcactgttctccgacaatgtcttggcagcatcagtcgttgtcaactcaactgtcatgaatgccaaggtggcctaaattattttttacactgtactttattcagttgcatatagttttgctttctcaagattgaaaatttaagctacttttatcatttggtttttgggtttcgttcataatttggtactggtatttaatttctgagggtgtctggtgtctacttttggcaccatgtgtagtatcggagggttgaaatgattttcagctagtttttcttagaatataaatgtttggatctggtagaaggttattgtgcaattttctttttctctttccaacaagaaattagacaatagctagccaatgcattggattcttacacctgaattatcaacactttggtgcactcatatgattgtcactaatcatagactaattgtaaatatgtgcatagtgagaatatttcttattttttttt

SEQ ID NO: 317864 - DNA, 1661 bp, Cannabis indica
aaggacaaaaaataaatattgttatgacgagagaacttatctttgaggtcttttttcactcagcatgtcaccattatatagaaactaatttgttatgtccaactattagagcaaagtcttccaatgatagaaatatactagtcaattaaacctacaccatacataagatttgagagattaatcaaatttaataaatagatctcaactaaaattaactattttgccaaaaaagtaacaaactcaattattagctaacaaaattataaaaatgatgatataaaataaaagagaaaatttctcaaaattaataaatataaataaaagcaagatttaaaatttatctgtaaaaagttgtaattcactctttgaggttgtattcaatatcaaacaagtaaacaacatactgtaaaatagccaaataatatgacacaaaataatcaaataaaatggtacaaactagtcaaaaaaatatggcacagactataaaaaaaatatgaaacaagctaacagtaataataaaaataaatgtaatcaatcaatattaataaagcaatactaataaaagataattaattaaaaatattaaattaaattaaatagtagtaaacaaacataaataattataaaattctatcataaataaaactctctgattttaaaaagaaaaaatagctcttaagacaattaaataatgagaaaggaaatttgtcataaacaaaggcattataaatttatcataattaattctaaatcatgaaaaataaaacataaatttaacctaaaaaattggataattaattataattaaattattaaaagataccaaaagataacaccgaaaatatatataatgtttaattaaagaatctttacaaaataaaacaaatatatagtataactacttaaggaaaaataaactaatcagtgttaattcttcactgttagtgataatttttccaaaaaataaactaattagtattaataagtagaaaaggctaagaatagctcttattatctcatgtaataatttcaagatcatttactttccaacactgttgaaaaatattggtgagatcagagatactttcattccatgtatatgtttatctaaataattatatatctatataaagcaagatacatctcattcaccatgttatatgcccctctttcggtcattccgatgattcaaacttcttccaaacttttgacaaggaaaacacttgccaaaacagtacaacatcataaacaaaacaattttgtttaggataaatttaaagtgggacccaagaatctaggaaaatagaaaatacattactagctagtcagcatacccggaattcattctatataattgaatattatttcatgagttgatcatacaatatatcaaggaatcaaacttaataagattcattcaaatatttgatgaaagaaaaaagatccatgtctgaaagtctcactcttcatactgtttaaattcattaatacaagaaatatcacttttgtcagcatatttttgtgctgacaaaagtttagtattgtgcttataaattagaatttatttcttatgtgttagcaaaagggattggcaaatcaacattagtattagagctttttaccagcacaaaatgaaaagcgctgacaaaaataactttttc

SEQ ID NO: 317865 - DNA, 1910 bp, Cannabis indica
aaaaaatgagagaataataaagcataattttttttcattcaaaaaaaattatattaatgggttcattaatattgtggcttatagattggttaagcatgccctttccatattgtaactttatttcagtacaattttaacaccatcgtattattaacaaaaaataaataaaaagtcataatttagaaatttatagtgcgtttggaagagttatccatatttctggatgaacgacatgtggcgtattaagattcgcgtgttcagtggcccaagccttccaacatgcgaatgccagtccaaactaaaggcgggccccaacccttcacatttccatgagcctagcccctagtggtaagatcccccatctcttggaaggctgaaaaggcttccgagagatggagtgaagaatgccttctggagaattaaggagccgcatccagacgggaaagtccaagggatgcatctagaagccttcatacggtgacgtggctactctctaatgtctgggcccaccctgtcagatgttgtcccctctaccagagcatggtagtgcacgtaccgcaaggagatatgcccacttttttgtcaaacgacgatccactgacattctggtatactatagcaacgcccatgcatgacacttgtccagatcaaatgggtcccctattgtacggatgcctctgcctaaaaggtagtgcattatcgtgggccttaatgtcatttatttaatgtatttaccccaatagtagatccatttttgcacaaaaaccctagcgagtcacgggtatgctcgtacctaagtctaagcctacataaacccatttaacccttcgtgtaaaggggacagtaaaagaacacttcggtaaaatcctctctaagcttccttcttcactacagaggagaaaatactatagcaagaactagggttcttcaagctgtaaacaatcacttgtaatacatttaaagcctccaaggccaatacattgacttgtggattaggaatcattaatgcccgaaccacgtaaaaaatttctatgttatttacttaatcactatttaatttcttaaggctcttacttatttagtttctgaaaaatctcgataaatattttggtactttcattgagaattgaagaaagaattcaagctacctagcatctgcaatgaaggtggctataaggaaaattgttgtcgaaaaacctcttcctgctggccaagacatcctcatgaacgacattaatccaccccatgtgagggatggagaagcgtctgaaattgatggatagacgcctaaaacgaaccaacaacgagagcagttcattgagaaaaaccctaaagaataggaaggtggaaaagatgacgattaagaagaagatgatggagaaatcaaagatggctactacaaagatggatacgactacgaacaggatccagacctactccgagtgtccaatgagctacttgaagcttagcaaaaactagttgaaaactttagaaatatttgagatttgtttgttttgtattttcttgtcttcattacttgctaaatgtttacaaatttttgaattgtgtatgaatttatattgaacctatattgttttctgttattgatcatgtagttacaattttgaatttccattgttagtataacttgatttgttatttttaatggaacaattcctaatagattgtcatctgttagacaacataatagtattagatttcgacaaataagtattttgtaaatgcaaaatctagttgactcattctaacgatgacaacttagactagtatttacaaagctgaaacaataaagaatttataaaataagaataaccttgactctcacctactgggacatcattatattcttattttaatagatcttttttttagtttttctcttagctttt

SEQ ID NO: 317866 - DNA, 997 bp, Cannabis indica
acactcatatctcaatctctccattaaattccaatacactatttgctttttactcactcactttctctcactcacttcatcacatcttgctcttcttctcacatacacacacctctcacaaatacaaaaaaaaaaacatatttaaatagtctcagatcttgggcacaaagacactctaaaacttaaatcactaaggctctttaaacttggctactaagatacattttctcacaattaataattatttaaaattaaattacaacttaataaatacagataactaaattgatttgagtcaaactctaccacataatttatgcgagcatagtttatgcaaccaatatatcctatatatattttatatatatatatatatatatatatattcttaactgcttatatttgctcctctttcttcattagttgcctatattgtaactgatctataaataaaactctgaaaatgtagtttaatctatagtttctcatatacaaattccatatgcaaactacatttttgggcattcagaccatgaagcaaagaatatatatgtatttatttattttatgtattattgcataaagaaaacataatattatgcataactcaaaatcaaaaatcatagatgaaatcagaagtaaataagtattatcatcagtatattcttcaaaaccaattcttaacatcaatataactccatcccacatgagtaaatacttttatttttcctttttttaattgagtcatttgtcaattaattttagttaatgacaaatattagagatgaaaataatgaaatgagttttccatttctaaaagagaattaatgcttaatttgatatcttcttagtgtttgataaacatgtataaaactaggctaattagcaatttttccccctgaactttgacatatatcaaatcatgttccctgaacttttttagccgttaaaaattctccctaaactattgagattgttaaatttaaggacttttgtc

SEQ ID NO: 317867 - DNA, 567 bp, Cannabis indica
aaaattataaagtattttaaaataaatcaaatttcccttttaaaattaagtgtgataaaaatttaagtagacacattatcatttcatttgtcacattttacaaaacttaataaaaaaaccattttataattcaacaattatttttaacgcacaaaattattaaacagccaattataatgattggctaaaagtgtggtgggtcaaagtggctcatattggagtcagcctttgccatttcttaaaatatgtatatatatatgagaaccaatagtaaatcgaaacgtgtccaaggtcataaacaaagcaatgatgacgatgatgatgatgatgatgaccatgtcactaacctatgtcagcacacagatacacacaccctcactctgagagagaactttcgtctccctctctctttataatattctttcaattcaaacagtaaaaagagtagaaagagagagtgagataattgactccaaacaagggtttctttttcattcttgatcgtttctgggtcttcggtttttcttttcttggactctaaggtaaccttacttcacttattctctt

SEQ ID NO: 317868 - DNA, 850 bp, Cannabis indica
atcaacatacttgtgagttgatctaagatcctggtcgaataatttccaataataacatcacttggtctaaacaaatttttaatgactctacttgaaatgtacgaatgtgtaccacaagaattaatcggaatagtaaacataataccatcaatagaaatctcacctataacagtcgaagcacctgcctctgcatctacttgggtcaaggcaaacacctgagcaggaaccatagggtcttctttcctagctttagtcctttagcttctcttcaaatggcctatcactccacattagaaataggccctgttgcaacatttgcccatatgacgcctcccacaacgtgggcactcaggttattacaaaataaaaaataaagcaatgtacatcactaaaattattagagattagatttataccttaatggacattgagattcaacgatttctctaccaatatcgtgagctggagctacaaccaccacaatcactacctctaagatcagtttacactaaaaaactaaagaaaagattattaaactctcaggatatgttttttgatatgaaaaatgaaaaaaaaaaattctttaaaaaaaagataaaaacggatgaaaataaagaaatgggggatggaatgaggtggttggcgatagttttgtgaaggggctcctggttattttgtttggggggaagacgaagtgaggaggaggaagagttgattagggttatataattgtcgtcgattatttggtaataaccgacaccatatgggacacacatcagccaatgccatgtgtttttcattggttattacaaaataactgactacatatgtgttttcattaaaattcaac

SEQ ID NO: 317869 - DNA, 1166 bp, Cannabis indica
gtgggccatagagggaaaaaaaatttgggcccttatgttagaaaaaatgtggtatttttcaaaatcggtaataaaaatgtataattttaaaagaggaaaaaaaattttgggcccctgggctgggtgggccctaggcacaggcctagcccgcctatacccagggccgggcctgattgagggtgtgattttgatttctgttacgtagaaattattatatggatgttatatgattgatctgtgaatttataaatcaaataaacaaataaatgatcacatgaaccaaataacacactaaataagtaatgaaaaataaatctgtttctttattgataattgaatagaaaagatattacattgaaatagatttttatttagggcacaaagcccaacacccttttcccgcttcgagtctctttttcaaggtgtctttcaaagttttgttcacatccttaacttgtccatttgcttgaggacgagcgaccaatgcaaagctctttgtgattccatttttctcgcaaaaatcagaaatgagattacttttgaactgtgtgccattatttgacactaatttttggggtatactgaagtaacacacaatttttttcatagtaaaatccatggtctttttttctataactggggctaagggttcaactttagtccacttggtgaaatagtttgccgcgaccactacatattttacccctccttttccttgtggaagagatccaattaaatctatcccccaaacagtaaagggccatggtgaagtcattgatgtcaattcaatgggtggagtccgtggaatttcaaaaagctttggcacttgtcatatttctgtacattgttggaggagtcttggtttatagtgggcctaaaatatccttagcaaatcaccttcttggcaaggctttgtcccccagcgtggtccccacaaaacccttaatgtatttctttgaggatgatttttgactcttccattgtcacgcatttcaataaaggcatggaatagtctcttctatatagcccttccatctaatagggtgaaccttaagaccttgtataacaattttcttgctttctttttgtcattagggagggtcccactagttaatgttgggttttatgccctaaataaaaatccatttcaatgtaatctattttat

SEQ ID NO: 317870 - DNA, 1700 bp, Cannabis indica
aaaaaaaaaaaaaaggaagcacatcattattaatttgacgagttcttaataaagaaatgtgattaattcatagaaaatttataattactttgatgagttgtagcaatttaatatgttattgcctcatctctcaactcattgcaatttttatttgatgatgaaactggttaataaaattttaataacataataaacagaaactcaattcatgcactgtaaaagttttcaaacgtacgtacgtagtggttatcattattaattaaggcagtgtttcataggtggtcttaatctccatgttgaaaacattgactccggtatacatcccatcttccatctccgtgattttggaggttccgtcgtagaaactgtccttttgagcataagagaatggaacttcgcacgtaccctccgtcactacaagagtaattattgctctagtctgaggaggcactccaacaacgtagttagtcttagttgaggtttcgaaagttgtggctcttccccattgccctacagcagtaatctgatcacgcgacaattcaatcttgtccttattgactattagcggaattgaatagatttcaacggttggtttaacatctgaaactagcgaaatactgttgcgaagagcaattgatcttgttttattgtactcaaaagtcaatttcatagctctatgaacatcctcggggttgtctgccactgcctggctcttctcaatgacattgaggttataaattcggccctcctcgtggcggaaattgatgttgtagattttcttagacgtgacgcgctccaccaccatgaacttggttttatcgataatgttagtctcattagcataaagagctgttcttgaatgaccagaattttccacccaaaggaacgtgttatcacccatttggcgcaataccacgatgttgtcagcgactttgatgggaaggaatatcgaatacttgtcggcagagttattagagtccgctatgatgtacgtggcagtgcacctccagaacaacttggttgaaaggtttcttatgcgaacataaccatcgccgatggtggagatctcatgagctactgattgatcgacgatatcaacgtccttgagctccctcataaactggtcttgtttgttggtgacataccagcctacgccgctatgcgacttgaaggcgacagtatttttgggaaatatgacaagagattcccaatccaagattttgaaagtatcgaaatcatcaacctgggtgtcgcccgcataaagaccatcctcgtaagacttttcccacttggaaagacaagcataacgtttggtgacgtgttgaaatcggaaatattcttctccaccaatatcaaatttgataggcttgaacaaggtatttttccaatctgtttcgtcttcctcaaggggctggtcagccgaggccaagaaataccaggaataattggattgcatggtcaagtatttgttgttgtagcaataacgtatgtgaacccatcccggttttgtcttggctctttccaattcgaatttcaccaaaggtctcgtaacgtcctctcctcgaaaattcacatacgtttctgagaacccttttgtgatgctctcttccttgcttatctttgtcaagtactttccattgtgcttagatttgataaccacaaatcttggcaaatcaaacaattttttttctatataatta

SEQ ID NO: 317871 - DNA, 1017 bp, Cannabis indica
tgaatgttagggtggtttagttataaacatttaatataatttaaaataataaataaatagctaaatttaactggaatgatagtttagcaacatccttttttattgtagtgttcataagtttgaacttaatttgaactttataattgttttttctaataaataaaaaatatatacatgcacatagaaaaaaatgggcaataggattcaaaatatggtctctcatgtaaatttaaagcatcttaactaattattctatttaactactatgtatatatgaaaacaaaaattgtatgttaatatatttttaaatctcagagtgggctttagccctccctcaacactcctaagttttcttatgcactaatgtaataagaatcttcttaaatatatttatagatgtgagatgcaagtgcaattggactgttatgcatctctatttattttgatatttggagagatataacattccaattttatttatataaatatgtggaggaattttgactaacagtgcagaatcaaattaattaaattttaaacaattaaacaatttgcaatgacaaaattaaaaaattacaaacaataattagacgaaaacagaaatgattagagtaggaaaaattatagagcaataaaaacagaaaataaagaaaatgataccaagatatatattagttcaagtctatagatcaatgtgatttatggctctactctagtgctagaacataaccaaatcttctttattgattgagcaagaacatgtataattagggggtgtacgttggtcggtttagtcaggttataacatatttttattaaatcaatataaatatatgaatacaaatatttaatcgtaacccggccaattaaaagttaggaaaagttcaacctgcccaatgatttcgtcggtttggccaggttaacccgtccaaaccgttcttcactttttttataattattatttttagtttctcgtattcaaataattagatttaaaaaaataaaaatataatattt

SEQ ID NO: 317872 - DNA, 688 bp, Cannabis indica
acatttattgtgatgcatattttacattatgctatagtgatccaaatttaaattattttttgttatgtgacatatttacatgataatttggcacattattaaagtaaatttttaacaaattaagctatattttatattttcatcactctctgatgtaaacatgaaattactaaatgaaaaagattaaagagtatttcctataatatatcaaaactacttatatcttgtttgacttataatatatcactactaagaattttacccacatatataacatatatgtgtgggacaaactatttccctacacattatataaattatagacataaaaaagttgtagtaaataaatgttattaaacctataaatatgtatagataaatattatatcaggggaatatatatgctattacccacacctatgtaaaataaaattataattaatttatgtggctgaatgttgggattagatatgatgatgatgtgcatgagtatgatgtgtctgttagagtttatgccctgaaaagcctataaagacatttttaattataaataagacttaaacattttgatataagtatgaatgttgaattattaatatttaatattgaatatttgttggaaattattttaccaggatcttagatctactcacaagtatgtttattaacatcctaaataagaactttc

SEQ ID NO: 317873 - DNA, 1217 bp, Cannabis indica
ccaatttggtccaagtactcctgaagatgggtcccttgttgcgaggaaatctcttctaagtactatatctcttatttccaaccctctactgcagacttggctatcgaaatatcttttaaccctttgtttgtaagtcgtgttccttattttcgattcttcccttctctcatcttgtaagtcaagagattcttctagaagcaaatgattacggcgtttttcataatattgtgtgcgatgagaagcaatattaatctcgacaagaatcatggcttcacttccaaaagtaagaaagaaaggggtgtgccctatcgcgatccgatgtgaggtttggtatgaccaaagcacttaggggagctctttcggccagttcccttttgtcgttttgagtctctttttcagggtgtctttcaaagttttattcacatcttcgacttattcgttggcttaaggacaagcgacctatgcaaaactctttatgattccattttgttggaaaaaaatcgacaaggagatcactttcaaactgtgtgccattatctgacacaaatttttgcagtatacctaagcgacacacaatgtttttcacaataaaattcaaggtcttttttgctgtgattgtggctaatggttcaacttcagtatatttggtgaaataatccaccgcgaccactgcatattttacacctcattttccttgtggaagaactctaattagatctattctccaaacaacaaagggccatggtaaagtcattgatgtcaattccatgggtggggcccttggaattttggaaaagcattgacacttgtcacatttctgtacatagctaaaggagtcttggtttatagtgggcatatagtatccttggcgaatcaccttcttggcaaggctttgtccccctgcatggtccccacaaaacccttcatgtatttctttgaggatgatttgtgactcttccattatcacgcatttcaataagggcatggaatagcctcttctatatagtcttccatctaatagtgtcaaccttcggaccttgcataacaattttcttgcttcattttatcatcagggagggtctcactagttaagtattcaatgatgggtgtcatccatgactttgttggtatttcaatcatttcaatatcttcttcacttgggatgatacttcttttggctaaatgtgttggtttttctgccctaaataaaactcatt

SEQ ID NO: 317874 - DNA, 1177 bp, Cannabis indica
aattctaatagttatctttaagttttattaatattataatgtcaaaataagatcatttcaaaattttattaatgaaataagtaaatatcttatcttataattaaaattaataaaaatttaaaaataatcaaattacaaaaataaccataaaggcaagtttgtggaaaaatctatttttcaaattcaaagcccactaatatctaaaactcatttaaattaattaaaaaattaataaaaattaattttattttgataatatgattatattggaaaaataagattctacacaaaattttaccaaaatttgaatttttttcattgaataacgatttttaaaagttgaaatatcacaaaagaaaaaaagatggcataggggagtatgcaatgcatactccatcgggttcaagggagctgctgggcgtaaaaaaaagggtcccatgcagcctatgtgatcgaggaaactcggcatgttagggcttcaaacagctcgtgtccgaggaaccttgaataagaaccttgtctgatgctcggtcatgaccgagcggtaccttcacctatgcgcgtaggtgttgcttcccttagatattttatttttaaaattcaaaaaatcataactaaatcaataaaaataaaaattaagtttgtaatagcctgaattcattattttttcatctactttcaagaaacatacttctagtacgaaactaaaaatatatttcgtcaaaaatttttaattcaaaagcattcatcagatacgcacataaacctacgtgaacacatccaaatcatcacaatcattattttgaatccatatttcatgaaagtaaatcattaccatggctctaaggctagttcttggaaattttgttaccaagatctaggtttactaacatgtatgtttattatattctataatctaatacccgaaacatgaattcctaaaacaatgaaaataaacacatataaagttaagcaaaccttacattggtgatgatggaataatatgtctccttccacttagatctccttcaaccctaaaccctataaattcagaatacactcttaattatataaaacgctttatatgttccaagatatagatacgctattaattatctattattccaatccaaataatcaaagatcctctatagatgatttacatcgagtaggaaaa

SEQ ID NO: 317875 - DNA, 955 bp, Cannabis indica
ttaaaaaaaaaaaaattaaaaaaaataacatatgaggtaaataaaaaaaaaaagcttaatttttggcttttaaatattaaatcaaattttttaatcttcttataagtaattttgatatatataggatatgctaaccacttgaggctagatcaagtgaccataggtgggtgtgtgtgtcttagaggttctgggttcgagtcccaactaaaatatgattgtaatatataaacgcttaaataaaaaaagaaaaaaagatatgtatatggtaatcactttagttttgtccctatggtaagcatatttttatagccatagatatttctaatggtattaaattgatgagtctatataaatgattaatatgtaaaatatactagattattcataaaattaatttctttaataatactcttaaactaaataataattatttaaatagattactaagttattcttacctcctccaattaattaatctttttttctttctttttctctatttcattcagaaactcaaaccttcaaaaataccatatttctttcccattcttttgcttgggaaccatatttattcattaaatttttacatgttttttttttgtgctgattaattaattaattaagatgtaaattagtgaggtttgatgaaaagtattaatgatataagttaaagtttattacttttaaaaagttatggtatcttagtcccacttctaattattctcctttttttattttcttatttcgggataagagtattcactaattaattattcagaattaccctatatgttatcctgttttaattattttttaaatttacggtttggatttctaaagtagtttcttcgagtcttttaccaaaacaattaagacaataattatttattttgttgaactaattaagggactttttcatttttacacttctaagctgtttttttttttttttttt

SEQ ID NO: 317876 - DNA, 2399 bp, Cannabis indica
ccttatgtaattattcctttattcaattagtgtacttgaatatttcggttgggatcctttaatttgagaaattttcaaaaacaccattcttttatgttttacttataattttacggtttaaaatttttaattacaaaaatattcttataaaattgtaaaattacaaaaatatactttatttagcaaaaagtttttttaaaaaaaaactaaaaaataacgtgaaatcaacgccacgataactataaattaattataaaataacaaaaagaatatcatgacaactataatactactataaataaactataaaataattaaaaaaccaattcattattttcattgaaaatatatttttgtatataaaaaattcaaaaagtaaaaataaatttttttctacaatgtatttttgtaaatttttctaattttcttcttaagtaattttttccatctacatttggtcggttaattaaaaatatatattgctctaaatttatttcatgtatttataaattgtaattttttcttctttttggtattattttttgatatatactttcgtatgtgatggtctttgaagattattattattatttttttaaagaaaattcaaattttattaactttcaaattcagctaccaaagtaagaagcaaatgttaggacttaattaggattttaaagtatttttaattagttttaattgtgttttgtgtatttttacatttttgtatattaatattttcaggtttagcattggagaagaatagatcgaattcaagaaaaaatgtacaaaaaagattaattaaataaagttctgttgatagagcataggaagataattcaagaaagaaatccaaaaaatttagtgcgattgaagcttctaatgttgaagaattggaaagtgaggagtagcgcctcaacattgaagttcagtgctaggacactaaaacgcaaaaatttgacagcaaggtcatgtaaatcttggttcttctttgccaaaaattgagcttcaagtgtcgcaacactaccctgtagggttgcgacgcgctatgcgaaaatcatcaggagctttgcgtgcttggaagacacgggtcgcgacactacaagatagtgttgcgacccgactattttaaactgcgaaaaattagggtttttttttaatctttttttgctacataaaggccctttttcaacactttaaggagacgattaagggaataagaggcaaaaggcggctctgaagtcaacactacttttttttttcaaagagttctttcttttcctctatttttcttatgttcttaatcaattgttatgagatgttaacaatgactatgagtaggtagacttttaattagggttatttatggagattgcttgacactttattttagtttaatattattctctaacaaactcgcaagcgtcttcattagctgaccctttaataaaacaaaaaaagatattactcaactcgataagcattgttttatactcttgtataacaattccaaagaaagacaccatactcacaaaacttcctaacacttggacaaccgaaaggcaatcagtttctatctgcaaaaggtgccttggctgctttttaatccaactcaatgcttcatgaaaattaactcatagctttcgcagtaaacctgagaataacttggtatgaccctccaaaagaaaaccataatggtcacaaacaatgaaggcaaaaccataccgattatgttcttcgaatagagtcgcaactacattgatcttgatactgtcaatctgtaatttaattcaacacttagccacatcacacctctgaagaccagaccatgatgtcttaatttgagaatttgttagcgtgtcccattgatcaagattaacttctcgtagaagccactacagacgaagcttgcattagtttttttgccaaaccaagtcatttttggctccccaaatagcccaacacaatgtcacagctaaacatatttttttagcaatcaagttcttaaatattgccacacaccagtacataaaatttcctccaagagctaggttagtgttgattcctacacggtcccatataggttgaatctccttgcaagtcacaaaattatgttagatagacttatctgttattttatggcactaaattaggtacacaacaaaataataatcacctgattattgtaccatagtttcaaggatatccagatttatatatattaaatttaaaatataaattgcatgaaataaataaatacctcttcatgactatcagggtattcttgtgtttacaccaaaagtagtcctgatgacgtggatatcaatgtttgacatgtggcaagaaagaaaatatcttagagttgaatagtattaattactacgcaagtgcacgcaatc

SEQ ID NO: 317877 - DNA, 1187 bp, Cannabis indica
tatttttgcagaaattcacgtacgtagtaacccacatggcaattaacgaaatagcttaattgcaactaaaatttacatatataataactcatatagaaactaccgaaacaatgtaaattgtaaatttgaaaaaaatattaaaaaataatatatatggtatttttttaatttgattttggaagaggttcccaacttccaacatcatgttatataactacgcacctatattattaatttatacgattaaaaaggcaaaagagaagatagctattctttattacaatatccttattaagctcaattattttttcatttttttaaatcaaaataattgcaataaaaaagttcaataattattttgattgcatgcaatgatttgtaaaattgtgattgaaaaaaatggtatatatgtctacattattattaaaattcccgaacacaatgtttctatgttatataattttagtatttttttttttgtttttgataaatgtaattaatgtggaaattatcttacacaagttaacgtatagaaaacaatagtgtttgacattttttatagttatttaatttgagtgaaaatatgaggtatttaatcatcatgtcaaaatatagggttgagaatttgtataaagtattttcatggggtcaaaaccaaaagttaacacgacattttacttatttttcgcaacatctaagttgctcggcatgttgcgttaacttttggttttgatttgttaagaattttagtgacactttagcgtatgtcgccgggcatttgagatgttaaatatataaatctgaattattaagtcttgataaacaatgcattcatgttaactttaaagattttcctctgaatataatataattctgattgagactagctaggtcaagttaatttagatccaaatgcattaacattttcattataattaattaaaaacatacacactataattgcacccacgagctaggtttgtatttagggcttcaaaaaaaaatttcttttaaaaatacatatttttttttattgatttaaaatattataactttttttaataacaaccaatttttttacaaatacacaaaaacaacaaaaaaatttcaaaaatacgatttcacggaattttaaatatttttacgattttttttattttattaatagaaaatacggtctttttatg

SEQ ID NO: 317878 - DNA, 1039 bp, Cannabis indica
cacacatcctcttatggccacttaatctaggctcaattggttacacaatgagcttttatatctgcatagaaataatccttttgtgtgtgtaaaacttagattttttttctctcttatttgatatatcaaagggaaaattatgagtataatgattagacaagaaaaaagcaagagattattttataatattgataattattcttaaatatatatatacatattatataatgttagacattcatatctatgatatgaaacatgtataagatggctaaatttttgagcttcaatcccatgtaagttttgatctacaaaggaaattaattaacatgagtattaattgggctttcaagctctgtctactttctttagataaatttagtatatttacagaataagtagtaagtttgagaaccgagaccttccattaaggtttctaccataattaattgtcaaaatattttgaaaattaataaaaaatataattttaacaactaaaatcaaaattaaattaggtaactaaataataattgatcatatttaaaatattttaccaattaaactaaaatattagtattttaaataaaatcaattagaattaatataattaacaattctaagattaaaatatacttacatataatacttaatttgttgtttcaataaccacttgaggctagctcaagtggccatagaagagtgcgtgtgtgttggaggtcctgagttcgagttccaagttatgcagcgttgtaatatataaacgcttaaaataaaaaaaaaaaaaatttaattgttcgaattcaatcatagaggaaattaaatcttaaagaagttgtgcgcgagttataacttaaaatacattttttaaaggattagtcttaatgaacatataacatcatcatcatgacaatattatttattattttacttaaattggaaatagtatgagttgttaattaatagtatatctcagtcctgaataatataacaatcaatcatttttgtttttaaaaaaacttgatgatgatcataatattat

SEQ ID NO: 317879 - DNA, 911 bp, Cannabis indica
tttactcgcggggaaaagtcatttttgacagcgcttttcattttgtgttggcatagttctaataccaacgttaatttgctaatacaccagtagtaaattttattttaccgcgtaataccaaatttttgccatcacaaaatatggtgacaaaaatgacatttcttctcgtaatgtcattaattatttctctcaaaaatattgtaatggttaattagtcgttaatgaagtttgattttattcaaaaataaattaaataaataaaaagaaaaataaaaaaaaaaatgtaatgatattatatacgatttagtacctttgtatacactttaatcaaatttttattgtaacatgccctctcgtactgtctttatttccattaaaacatcattattaattaactattttgccttactgtaaaggtgcctgtaaatatactaaaatcgagctgataatgtatgtggtccaaacccaacaagatggtgtttatcaatgatcacgtacgatcattaatattatgcagctttatttttgttttctctctctcacaatcacattcaaatatttgaattgtgttgttgaaaaattttataatagagaatagagatatatcatgaatattcaatagattgttttgtattttgttaataattttatctataaatacaagacaccaatagtgcttaatcgataccaccacgaagtgaagatttactaatagatagcaaatttaatcactattaattattaaattaaaatatctaagtcagcataattaatttataacaccaatattattgtaaaattatatttttgaaccggctaatgaactactatactggagcgggtcatgaaaaagtacaaatctttttgtgttctttttattgatttatctgtaatgcttttatgggttataa

SEQ ID NO: 317880 - DNA, 1137 bp, Cannabis indica
ggcaagttttatggcacaacatgcttaagggaatttttctgacactagtgaagtaaaggccaaagaatattgcaaagcaattgcattgagaagtagtaaataatatgagaggccaggagtagagcagcgagtgacaaatgaggatcaagatcaataggcacatgcaccagtgttgaagaagactaggggtaagcaaattactgagaagtgaatatcatgaatgctctaatagaacaaacataggtttatgtgaaatgagagtattcacagagcttgtgtgatatttagattattacttaatgtaaattatatgttaatttataatatataatttaggaccttaatgatctgagaagagttgtagttatttttataatttgtcatcacttaaagaaagaaaattaataaattgcattaacaattgggtaactgaaacaacgagattcatatttctaatcttccatccattttgaacaacgttaaaagttgtctttaaattttctgttaaatttaattatttttcttgtcaagattatttcgattaaccaaatagaaatacaaatctagtttagtagtattcaatttcaattcaatgtggttcgaccttacttatgtgagtactacttgatatgtacacttacgtagtttaccattttgagtaataatatctaaaaattccatattcatatagagtatgtatgatcttgtaaggaatgataagagaattaagatcatacaatatggataaaataagtttatagtgtattaaagtatgatttctttaaaataaaattaccaagtacaatatactaagcaatgtagtctagtatgtatgattttaattcggatcacatatgtggatagacatttagtaaagatatcgtgcataatttgattatgcatgactcgaccaatatgaagtaacatcttttatcaatgtgtcgtttatcataaaaaagttattcatatcacaatgatgatcattagtagactagtcttaattctgagtattcatgaactcttatttttgttcattaagttatttgatttactccttaaattttctcaaataagatgattcttataacttttgttttgagaacctaataacatgagtggctggaaatatgctataca

SEQ ID NO: 317881 - DNA, 1244 bp, Cannabis indica
ctctttcattgttcttcaccatattcgaacccttagtgcaagagtgacatgcccacacatagcaaagcaagtactcaatcatagtgagtaagatggtggtaaccaaagccgaaggggagaaagagatcaagcctcagatcttgataatacacttcgatagaaaggaacaagtgttagagatctgagcagaaggagtcattatattccactgcaaccatgtaaggttttgtaaaagtcatatgtatttaatttctttattttcgagatactcatatgtaggatgttaattcaacatacttgttagtaaatctagatcctggtaaaatattcccaacacacactcccccacactcgcacacacggctcgcatgtgagccccttatgggctcgcatgcaagcccccacacccatcttgcacatatgcgacacgccacgcgtgcttttgcacttctgtgctatctttgcaggattcacggggtaactctcgtgatggtgcagacgcgtcttgacatttggagtactacttttgagaagtaggcatcaggcaagtatgctaacttggcgcattttcacgggtctttcttctcttaggtgaataattccaaaaattaaaggtgcagatttttggagttaacaatgctttttaagggttgacaaattatcccttaaactcaacaaagatgacatgcaaatttataagacttttggcattggtaaaagttgttttcatgtaatgataatggttacttcgagtaacctatcctcacaatctaattgttgtgttgtcaattaatcatggaacaatgataatagtgaatttgctctaggaaattgatgaggtgattgcatgcatacatgttggaagaatgtcacacactacccaaactcattgttatgtctaagagtaataatatgtgaactcacaaattatatactaatgtcacacgtgacacaagtcacttaaactaattatttttatttaagagaatcttacttataaaaatcaacttgctccttagtatttgtcatatttgtgcgtaatttatgtgtgcacatgtcattattctatgtcaaagagtgatgatatgtgcacacaattacacacaaatataacacacttatgttggcaagtcaattcaaccaattatttttatttcaacgcatctcactaatcaaaaataacttttaatataggtttgttacatttgtatgtagcttatgaatgctcgtcgataaggttattt

SEQ ID NO: 317882 - DNA, 2026 bp, Cannabis indica
acagtttcttaataccaacaaatcaatcatgtccttctcccccaacacttcagatgatgcaagaaattttttcagccaaactttgggaatgccaatctgtgaatgtcatgagacttacctcgatcttcttgcatattcaagtcataacaaaaaggagttatttagcaatgtcaaggaacgaatctggaaactcctacatgcttggaatgaaaaactattttctattggaggaaaagaagtactcttgaaagctgtggtacaatctattcctacatacgccatgagttgttttcgcttgccaacgagtttctgcaatcaaattgaatctatgatggccaatttttggtggggcactaacaaagatgggtccaagatacattggaaaagatggaaattactttgtaaatccaagtttgaaggcggaatgggcttccaagcttttgttgattttaatcaagcaatgcttgccaaacaagcatggaggttatttgacaatccgaactcactattaggccgacttttgaagcacatatactacccaagaaactcttttttggaagctcacaagggtcactcaccatctttaacgtggcaaggaatacactggggtcgagagctacttcttaagggtcttcgttacaagcttggtaatggttttcatgtcagaagtgggctagatccttggattccaggacatgatgagttcaagccgatttgctatactagtgatccatctacgcctgtatcgacatacattcttgatactatggaatggaatttgcctctatacatgaacactttgctcaaattgacattgaccgaatccttactatccctttgagtttttaccaatcaacggacaggcttatatggcatcataacacaaatggcttatacagtgttaaatctggcttccaccttgccacctcaatctcggagaaggaccaagaatcgtcttcggatgattacaaaacctggtggaaattcttttgggcactgcaaataccaccaaaagtgaaaatatttgcttggaaagtcattcaaaatgccctaccagttgccacggctttacacaaaaggaaggtcattgattcagctttatgttcacgttgtaaatatgcatgggaatcaattggacatgctttgttctcatgtaaatgtgccaaggctgtttggaaaagcactaagtttctaattgattatcaccatgctcaaggtatgtttaatggagattatctaatacacttggcatcaataatggaaaaagaggatgttgaagcactaatatgtgtaatgtggagcatttggaatgatagaaacaaagtatttcatggtggcacacaaagagatcccaattcaattgcatcttatgcattgaattacatagaacaatacagaagtgctaaaggcatttcctgcaaaaaattgcagtagcctaaaactcaccaagcagatcccacgggtcagattccacaccagcagggatttcaagaccagtaccacactgctgatcaatcacatgggatgcaaactcaaactacagtggttcctctcaggcgttttaacagtcaacaagttggagagaaccaaactgaccaggcccgacttaatgctcaccaacaccagcagactgcatctagaatgaggcaccaaccgatcatctcagctgcaaatgacaatgtccaacttcaacggcccttggatgatataatttggaagcctcctgctatgaacatgcttaaattgaatgttgatgctgcaacaaattccaagaatctgacattaggaatgggagcggtggtgcgcaactacaaaggagacgtcattgctgcactctccaaaaaagttcagggatgccttcgaagtgatgaaatggaagaaaatgcgctctttcatagtctaaattgggcttcacaataccaatcgttaatcactattgtggaaacagatgcattaagagttttctctgctttaaaatctaatcataatgacctgtcatgttttaatgatctaatcactgatgtac

SEQ ID NO: 317883 - DNA, 987 bp, Cannabis indica
ttgggaacacactataaatataaaggaaacatattctctgatcatcattctcgttgatcattatcgatcatctccatcataatcttgttgatgcacccttatatcatatcgaagtgtatcaaatttttgtctcacggccaaattaaacatagttctagcagtgttcttcaaagagaaagattgggatgtgaagtccttaaaagcaatgatccctttatttttcatagaaaaagcttgcaaacttactcgtttcccagtcttacagaacactgcgaatgtctcgcagttgttttctaaaaggatgtagtccccaaacccctcgaccgagtttaacatatcagtggctcgtcgaacaacctcgtctagggagtagatgcaagatccagtgctgcatgttcccgtgcggcggctgaggaggaatttcttggatgaaacaccgtactcgaatcgaaaaagtcgatggcctttatggaaacagtctaggcatgacttaacaacccctattctcttctttggattgtatccacagtcttcacacctataattactactcttcttgatttttttgatgtgatcatcatcatcatcatcatcattattacctcctgttcttgtgaaatgtataactctattttcccccacatatattcctgcactttaaatattaaatattaatttccttataacataattataaattaattattaattaattgttaccgatggtgggagtagatgtgtgcgtttctgaagctgtaaatgtgatctcctgcttggagtgaactctcatcaatggaaaataacttcatcactaataatttgcaacctcgtctagggaacaccctactcgaatcgaaaaagtcggttgataaggaggcaaaaatccttttgtccacgatttttttatatggtcaataaaagtgaactccaatttattacaatatgtcaattaataattaattgataattaagaaaagtcagtcagtc

SEQ ID NO: 317884 - DNA, 1588 bp, Cannabis indica
gttgtagtgcataccaatccttttgtttacacatcttcacttcggtgcaacaacaatacataatttacttttttttttatatatattatccctatacatacgtctacagatagggagtgagttttctaggaaagaaaacaatactaaattgagaggtgaaggagtaaggagaggtagaggggtatatatagtacttgtggatgtgattgttgagtgtagtcttgtcaaatattacaaaataataattaatataaccctaggtacggctaaaggtggtataaccccaagacaaatttgattttgtcaatcccttgaaaaacgtaatttgaacaaacccaaccccctattaacttttccttggaagacgtaattccaaccaacgaaattatcgattttgttgtggtttggttgattgtggttagaaaaaatttctcttttattaatattattattaaaaaactgaaataatgagctactcacatattctcactttaataattttaaaatatattaattcagtgcttgtacgttttttttttttttttgtccaattacttttttatttattatttgtatatgactcatgacatatatagtaaaaatatattttttgttaataataataataaacttgtcaaacattctctttttttttttaaattttttttttttaaaaaattaatttttagttctttttcttttttttttttattttttttttttttatttattaatttttttattaaggcagccattacttttttaattaaaaaaataatcatatatacgcacatactactataccatgtaacctctatttaattttcatcttattagccaaaataactaccccatgacaatgaggtacagattaatgctcctataataaaaatattatcctatattggaactcaaagattttattggtgatcatgaagatcttctaattaattgttaaaaatatattgtgttttgatgagttatccttttttgttaggttttgatgaattatcttaattaagtactacacatgcatgagatgagaatgaatatctatattcaattatgatctgctagaaaaaaacggtatattaattattcatgattataattctctagctttgtatatactgtatacaatgcatataagatcagttaaacttttaaaatgaatggtatgcaaacaaggtcaggtgcatgcaaactcttaattataaaataaacgtagaaaagcaataagtatcggtgccgtttccgtttggtaacacttttgttttctaattttttaatcacaaaatgaaaagtaaaatttttgtttttaaaaattttatttttgaaaaataaaaatgcgttctgtaaccacttttgtttttcaattttaaaaacataaaacaaaagtgtgttctgtaaagtttatttttatatttaattttttattttatttaagtcgggtctaggtccggggtcgaattcgaatctgagtcagaggtcggggtcagcacaagggccgtgggagaagatttgggtccggttcgtgtcggagtccaaaatattgattaagaaaaaaactgtttaaaaaatattgaaa

SEQ ID NO: 317885 - DNA, 776 bp, Cannabis indica
tttgcacattttttgtaattatgttgtttttgttgtacatttatgaaaaaagccatatcttttaaatgaataagactctagtatttataggtttagtgtaagactcaatatgactaatagtccagctcattaaaatacacactaagcccagcccatacaattatatcttaggactaagttacccttggtctcctaacataattaaatcgaataggacgcctaacattactgcggtgccaaacattcaccttgtcctcaaggtgaaactctagaaattggttattgattgtaaggctacatatttgggcccaaaaacccggcccactcgctcaacctggcccacccgtacccggaaaacctagaaaaattgggttttaaatttcaagggttgggttcaggtgaaacttgggtgcatttcaggccgagtgcgaatttgattaaatatgttataccgggtttgggtgaaatccgtacctgtacctgttgtccctgattttgcccaatatacgtggaccaactagataaggagacatggatcaagcaacttataatccaaactatttgctaagtcgttaggtaatgaagcagcatccaggacatatctcccgaagaaggcatatggaaccccatatgctcccggaagcccaagtaacgttaaggcatctccgcgatgtgtcacatttcccctgagcaatcaagtcgcatttaatgccgcatggaaggaagcgtgttgggactgctacacgcaataaagtctgacggcacaacctccaacc

SEQ ID NO: 317886 - DNA, 1991 bp, Cannabis indica
ttctcaaactttgaatgcaattccaaacatggtcactgatgaaataaatgaagagctcactaaacctttttttgctgctgaagtataaagtgctttacattctatggcacctgataagagccctggtattgacgaaatgtcctcaatgttttaccaacaaaattggtcaattgtgggtgaagcagtcacaaacgcagtcctaagtgtcctcaatgatggtactgataaaacgagtttgaacaaaacaattataaccctcataccaaagattaaaaatcctcaaagggttcaagactatcgaccgatcaacctttgcaatgtcatttccaagcttgtaactaaggtccttgttggtcgctttaagaatgtcctccctattgttatatctgaaacgcaaagtgctttcttacccaatcggttgatcatggacaacattcttgtggcctttgaacttgtccatgccatcaaaaataaaactgcgagtcgttgtggtattgctactttaaagctagatatgagtaaggcttttgatcgagtcgaatggcatttcatcaaggaggtcatgacaaagatgggtttttctaccaaatggattgacttgattatgggttgccttaccacaaacactttcacgtttctgctgaatggtgaagtcacgggctctcttattccaactaggggtctccgacaaggctgccctatgtccccataccttttcctaattttttcggaacggttatcacgcttgcttcatcatgaacaatcagagggacatctccatggcttcaaactcaccaggcatgctccatcaatatcacacctgctttttgcggacgacaacctccttttttgccaagccaatgaaagctcttgccttgtcatcaatcgagtcctagatatctatcatcgggcttcaggtcaagtcctcaacctagagaaatcagttatgtctttctcacccaatactacttttgttgcccaagtttttttccataggactttgtctatgcctatttgtgaatgccatgagaagtatctggagatgttcaacggtatcaaggaaaaaatatgggggcttatgcatacatggaatgagaagatcttctttgccagaggtagggaagttctcctcaaagcggtagtccaatccattcctacgtatgctatgagttgttttcgcttgcctatgtatttttgcaaccaagttgagtctatgatggcaaatttttggtggggactgaatgagaatgggtccaaaattcattggcgttcttggaaacttttatgctaaaggaaagatagcggtggtatgggttttttcgttcttttgtacacttcaatcaagctctacttgcaaaacaagcttggagactccatgcccaaccggatacacttcttgcaaagcttctcaaaattcgttactaccctcacaactctttcctagaagccaatcttggacactccccatctcttacttggcaaggtatccattggggcaagcaacttctttcatcgggtttaagatggaaaataggtgaggggtgccgtgttttatgtggttttgacccttggatcccagggaactctaccttcctcgctttccactatgaaggaccagctgatggtggagtctctaacctcattaaagaaaatagagaatgggatataggctttctgcagcaatggttctcacagccggatgttgatcgcattctaacaattcctttcacttttttcaggaataatgacactttagcttggcatcaccactcatcaggaatttaaactgttcagacaggttatcatttagcttcctctcttgcagatgttgatgatttttcgagctctttgtcacaaaggtcatggtggaaatttttttgggcacttcagctgccccagaaaattaaaatatttccttggcgtgtcttcaatgatgcccttcctgttgccactgctctggtgaaaaggaaaattatcaccgattccacatg

SEQ ID NO: 317887 - DNA, 2636 bp, Cannabis indica
aattttgagtgtaattattatttcttgttatacacgaaaagaaaaaaaaaaaagattaatgtattatttatataaataaataaattatagaaatgtttttattttcatttaataaattattcttttaatgaaagtaaacttaactttaaatctatcaacaactaaacaaacaatatttaaatatttaaattctaaaaattatacaaaattttttattttgagtagtaaaattatctatacgaattttttttttaacaatatccttttaggattaggtattctgattttcatctataaataatacgtacttttaatcaatatgcaaaaccctaagagtactttcaagaaagtaaataaattctctttctccaaaatttagtagtgagatttaattattaatttaaattataaaaatagaaataatgaatactacttacatgactattagtctagatttgccaaataatctttcagcacaaaatttttatgcccaactaaacagcaagttcttaatttttcaactaaatttttgtcatgcattgttaccttctcgacacattattcgaagtgtacatgaaacaacattattcaatcatactttctatttctctgatcctttcaactttactagagctattctagttagaatcggtgtgacagattcaatagtgatatcttattttgcaaccgaaatagtaactagactcatcaataatctcaacaatcctccctttgcggcttctaaatacgttactatcaatctttttattgttgccgttagtagtctacaacaagaacaagaatcaaatattattgatgctacttttagggaggcacttgatgctattccaaatgttcccgcaacacaagaatccataaaaaaacttaaagaattgaatgaggatgataataatctattagtctctgtgggtaccgacaatagttgcaccatttgccaagaaaatttgttgttcgaaggtttgaaaatcgtagagatgccatgttctcatctttttcacaagaattgtattgtttcttggctaaaaattaatcatttgtgccctttatgtcgctactcgatgcctactaccaacgaagttgctgctgctgaaaattaatactgatatcaatacacaaacactactactttgtcgtgatttgtattattcacaatattaatgttaacatgtttttgtttcttttttaatttagttttaagatgcttcgatgatcataattattattatgaacattttttttagtattgattgatataatataattcttttattgttcttgatgtgagttcatttttttaataaagtttaacttcattaaattaaatcatccgtagcaatgaataagtaaaaggtgtgtaaagaatcctcactaaaaacacgatcaatttccacaaatgaagcttgtacaaaggcatgtgcaaaattattaacatatcattttacaaaaaaaagttaaataaagactgaacataaaccatcaattaaaatcttacaatcatttaagacatagccataaaaagaactaatcttgtattctttgtaatgagataaaaaaatgtaaccttgttcgatgttaattaataaaatagcacaaaaagatgtaaagtataagataaagaaaattattttctctcaaagaaatatatatttatttttggttgggatgtataataggcataggttgtttgacattaattatttcttcacttagtttttgtactaaatatatttctttcactgaggccatctctattaatactttaaaaacatatatataatagtttttcttacaaaatgctccaacaaagaaataaaactcatcttattttgatggacggtgactcgctaataatagtagacactataaaccatgacatttttgttagtttttactaattaaataattcattattcaactaaatatttttattatagtaataaaataataatataataataattatagtttttagtgttttgattgtaagaaaaaaaaattagtgttaaaatagtatatttttagtattgatttaacactaaatttgagttttaacattgcagcctgagttattcatagttttttttttagaaattttttttttcgttgtttgatatcttttttgaaccatcgttgtttgatagttaagttaaaattgggagtgaaaatattttgacatttttaccttttttttaacttccatttttacctttaacttcacattattatttattaatatattaatctttatgcatgcgttacgtactcattttttgaaaattacatttctcttttattttttttattaatatattatatataaaaaaaaattaattcatacccttttctatgttttgttttctttatttctttctatattattatcaaataaatttttaagagttaaaataaaataaaaataaaattagttttattacaaaataaaaaataaataaaaatagtagatgtcaaagtagttatgagtataaaataataacattttaaattaaaaaaattactaattaatttaaattaatagaagcattatatttttttagttataaataattagacttttagttgaaagtgttgttaaattttattatatatatatatat

SEQ ID NO: 317888 - DNA, 585 bp, Cannabis indica
aatgaacccctatagaactagtaattgactttgctagtgcgtgggtcacaccatttgcatcacgcgtcacaacaagaaccaccaccaacagcagctaaaagagaaataatctcttcaacaattggtttaaacataataatagtatcaagacaattaatccaagagctaactacagaagagtctgtatccactctcacccacttgaaccccaacctggctgcccacaaaagacccgtacgtatagcaaggagctccgccaccaccacttgaaactacccaactccaccaacagcccatgctgcccaaaccacactctcgactcctcgattaaccccaccaaaccccataaatccccggtcggagtgactgccgcatcaatcgacgatacaaattcacccaacacaggcgggaccaccgtcctcagcaagcctctcgtcccccctcctcgtctgcccctgccccaacccagcagaaccgactcccacaccagaaaaaccagcagcacattcccccaaaacccgacttccagcactcatgcccaccctctgaaactcctccaaaacttccttagctaactcaataatc

SEQ ID NO: 317889 - DNA, 751 bp, Cannabis indica
tcacatgggatgacaaagagctttcattgctcagtttgtaagctcaataagggaagtcactgttagtgacctagctgaaactaagcaaagatcagataaatttgtcaatgaatttattactagatggaaaagtgttcgactttaatgtccagaaaaattgtctgagctatctgcagttcaattatgtagacaaaatctcattcccgagatagcagtttacttatgctccacagaacctgaaacattcagtaagcttttttccaaagcaagtaatgttgaggtgcaaatagctcgtcaaaatgatatgccatatgtatcaatggctacctttgtaaaatatgacaaaggcaaagaaaaatctaaaatattattaaaacagtcaattgaaaaagagactgtgaaggatttgttcattgatgaagatgatgtcgaacaaatattggatgaattattggctacaaaagctataaatctctcgaagcctaagaaagcaaaagagggcgataatactgaccaaaccaattattgtcggtaccatcgaagcgacactcattcaactacaaaacgttgtgccctcaaaagtatcattgaaaagacggtccaacacgaggagatccaaagagagtctcaatttcaaaaagaaaattgtgacaatgtctttttaactaatgacaagtcttccttttaaaggagaagaaaggttgttactcattgcaacctaaaaaaaagtgttacataaagcaaaagcaca

SEQ ID NO: 317890 - DNA, 1509 bp, Cannabis indica
aaacagattgtatggaattgaataaagaaaaaaaaagaaattatataatcacatcaatccataaaataagctcaagtggttcacataataatccctaagagaacttagctactaaaagacattctaaaacaaaagaaatctaattaaagatataaaagatagagttgaagagatagaacattgttggagtccttcaccggtgccttctgctccttactctctttctacacttagaattcatctcaatttttgaatggtgtcgaaaactagtcatcaactccctttttacagcacaaattttgagttgccccaaaaaacaccaaggccgcgaccttataagccaggttctccttttttcgatcttcgctaattctttgattccaatttccatttttttacagtgaacaaaggtaaggtcgcgaccttgcttaccaagctgcggccttgtaggccatgttttcttttttttttctttgattttccaccttaattataaatttgactattattgacttttggtcgtgaatttaagagctaaaaatttcattttgagccattttaagaaatagaaaattaatccaagctaaaaaaagttttctttcttcattatattttctcatttttgctcaaaaaggcttgcagaacaccaaaattgaagatctccaaatatttttcctaaaaaaacaataaaaattaaaactaagaataaatctacaattaaataataaaaacactaaaacacatcctaaattagactataaaagtgcataaaaataaatctaacaaattcgcccaaacttaacctttacttaccctcgagtaaagaccaagtttaactaacgaataagaaaacaacatacacaagtaaaccaccattgtcatatacactacattgactcttctctaaaatcttaactgtaatctttaaccagatttttagttcacccgccccaaagttcaactttaaagttcaacgggaaataaataatataactcacaaatgatcacaataatttaaactccgccatatatgctcaactcataccaaacaaaactacaacccaaattttcaatatgtttgcatcatttaactttctccactaatgtcaacaagaaatgatttgaaattaaaaggttataatgtgaggcttaatgttccgcatttttatgacacccacatagccaatagttttaggagccgttgggaaatagtataaaagacagttataaaccgttgggaaaagccaattttgtagtagtgactataccataagctttttaaattccaagcacctcacttttattacagaactatcccattcccgtacttactgccatacactagagatatttatattgttacaatccacactattatttttttattcacttttttttagatcttaaattttgatgacaaggattgcaacatattaaaaacattatctctcattatttttaagctttctcaaaacacaatacccacattataattttcccccaaactta

SEQ ID NO: 317891 - DNA, 654 bp, Cannabis indica
agggcacaaacgggacaacgtcgaagtctctctcttttcaatcgaataaaaggttactagaatggtgtccattttagatgagctgactactctattcaatgaatgatatctttgactctacctaaacggaacactatattagtttgttggaaaccttataaagtaattgaatatattttaattttggtatttttgcaaacatatttgctttacttgttattttctaaatatgtgtatgaatttatttgaaccaagtaatttatttttatttattgatatttgtagtgttaaaatgaactacccacaccccaaccctcatttattatatgcctttgcaaatgaactctctagtgcgaagatgtcccctggtcaaagcatcattttgcacgtacttttgatgaacttaaatttctagaaagcaaatttgttgggaatttttctatcaaaagaataatgggtttagttcattctaaacagtctttgacctaagtataaccaatttgttatatcttacatgatcagaaactttaactcgtctgacatggataagctagaagctgaaatgcatgcttatgaacggacattgtcacttgcaaggagggctcgctccagagttgcaaaaaagggcaagaggaaagttgaagatattgagga

SEQ ID NO: 317892 - DNA, 2240 bp, Cannabis indica
gtgttcggtctcgagacatctgggttttctttttgtagtcgttgtgcaacctgactagtgtattttaaaatattttataaatgtttaataacgggatcccggcttttgtaaatcattaaataaaagtttataaagtttcatagtctaaagtttaaatttgacacaatttttgagaaaaaattctttgattagcaaagatagcattgcaattgaaaaatcactgtagcgttccttagtattagggcattacaggtattagagtcgccaggttttgcctaccgaagatcgccaagacatgtacaatcatcatcagaaaaagctcagctcatggttcagtaagcctttagttgtttagtaatatatgtgataagcaaagcatgttaggaagcatagtagtttataattgtttatattaatgcattcccttaaaatccataagtgtgatagtaagattgtatattgggtcgttgcctgaccagattgacatacaaattgacaggtttttccaatagaatggacacctggtgcaatatggagagtcataacaatgtggtcagggcgagtaacggttggagagaatggaatctaagttgttcccataactgaggtgaaagacattggagggctattggcgggagtgatgattatctgccacaagctcgttggagggagcaaaacctcgcagagatagaagttataattcaacaacatgaagaagaaattcagaggttgaaacaacaaagatctcctgtagtacctttaccttatatatcaaaagttttgaatccggtactatcagaggagcagaatatggctagtaaccaaatggaacaattacaagggggatatcggatgcaagaatctccagcacttcaggatgattcagaggtgaaggacaccttttggacagggagcactaaagaatttgttttaaagcgacatgaagttatgacagaaggtcgagttactgctccccttatttccatttatggtggaggtagtaggggctccgtggttgagcagaaggggaaacctacatcgacagtggtgggtttaagacgaaacaagcggctccgagggaatcaaggcagaggtggacgccaagggtattcttaccttaaatgcccacgttgcaaaaaacaccatctagtagaatgcaaccagaaggcatgcttccagtgtggcgtgattgggcattttaagaaagattgtccttaggctagaaaaatggcaatatgagttaaatttaccgatattcctaagtggaatataggatgtgagtagctaatagaggtatccatctaatttatttggagaatggaatcttttgattaaaagtgatctagtattagtataagtgggaaaatttatgagtgttgtctagaaccctaggtgaattaaaggtgattatgtggatggatctattcactaccggggggcatgagtcaagctgtgataatcagacctcgtgatttgcgaaggaaagaccaggagcagtacagtcccacattgcttgggggaaaggtggtatgtagtgattctaagattatgtaggcgtgggactacatagggttgaggacttgaattgattgcttatgactgcctatgttagcaagaagcatcttgctttggtagccaccatgaagggaactccacggttaagtgtccttgacttggggtgatttcatttacgaagtgtccccatgaagcgtgcgaaccaaaacaaagcacgttaaaacacttggattggtctctcgggtcgtcattcgaggaagcagttagagtgacacactcatgtgtaagggccatcattttgtgactataagggcctcacagaggcttgaaaaggggacattactagggtaacgtataaaagaacatcagaaaaaagtagtggtatcactaaggtaaagaagattacctagattacttattgtgatacgataacgatagaaaatgcttttataattaactggatagtcaatatgttatataaggagaccgttgaaattttgggaaaagatttccttattaagcaatgatgggagggcatactcacccaggatggggaaaagcttataaattaagatgcaatttgatggacatgtattcgagtgattggtgaatgtaaaatcaaaaagtaggttgtttattaaacaatgaactacatcattaagggtaaaatgagttttagagtgattaaccaagtatgaagatagtgatgattgcaagaaagcaat

SEQ ID NO: 317893 - DNA, 2124 bp, Cannabis indica
ataggaggtgggttataggtaatgtatttctcgcaacacgcacaccagctagctcaccatcctttttagcacgaaggataagtttggataaaacttcgctgcaaatgataaaaagaaagggtcatagtgaatctccttgtcggagtccacaattaggattgaagggagacacatgagcaccattaagtaaaatcgagtagctaaccgaagataaacactgcatgatcagtttgcaaacaaagctgctgaaaccatttactttaagaactctcaaaaggaaatcccattccaacttatcgtacgccttgttcatgtccgtctttacggcaataactccaacttttcgcttcttagatttcatagagtgaagcacttcttgggccaacaaggaacattcagggatccgtcgtcctaggataaaagccgattaaaaaaggcaaaataagctgatccaacacaccttttaaccggtctataagaatacaagagataatcttgtacccaaaattacataagctaaattggtctgaactgttcaaaaatgggcagcattcaagatcattggagtaagacatataaaagtgtgatttaactgcctgtccaggaccccagaggagaaaaaaatctttgaccatcttacaaacaacatcaccaactatataccagtatcttcaaaagaaaaacttgagaacccatctagtctagtggacttaagagggtgaagtttaaaaactacttatttgatctcgctagaaacagggatcctacaaaagttgtcattctcaactttcgtcaccttgtcataaaaaagagtctccaactcaagatcaatgcatggcttagaagaagtgaataaggcttgaaattgttcttggaagtaaccccagatcttgtcacgacgtctcatcccgatacctgaagaattgcacacaatcccgatgaagttgcgtcttctccgaataatagtcaagccaggaaagaatttcgagttacaatcaccaaaacgaagccaattttcacgagacttctgtctccaaattctatccattatgccttcaatatcaagaatttccagctataattcaacttctagggccaccaaagaaatggagataagtagattttgaatatgtcctagctgactacggaccaatttccatttctttagctccatatggctacttccaattttaggtgtggatctctatttataagcccatatgtcctagctatctacttttgggcccttgtttgcataagtggatagcttttcagtatgatcgtctatcgttcatgtgctttcattgtgggattattaggcatgataagaaatggtgtaaggagagtctgaggatggttcaaggagataggggtcgaaggggtttggcctttggaaagtggttggaagtgggtagtggggttcttgatgggtttaagagggaagaaacattaaggaatgaggggattgagccaagtgcactgggaggagaagatatgggacttaattaactaacaagagggttgtacaacacctttggggttctctatggtgggagacgaacatcaaagtcgaagggtcccacacctcttgtctctcttcaaacttatggatacctagtgtacgttggaagcttctcctagttttaaaggtttgcaactagggggaatgtcaaggggtttggtatgttggaagagcatgagtctttaagtaaaaaacacagtggagaggcaggacatggatatggacggggtgatagatcacaaagccaccagtttgtggagaattgagaaaggagaggggatggtaggtggggttacaaggataaaaagcaagttggaagaaaggcactttactggctgtggcaaaaggactggagtgaatgaaagtagcttggaggcaaggggcttgtttacacgaatagtggccttgatgacatggacattaatgtttgacacgtggaaaggaagatgacatctcagagttgagtggtcccgagtcatagcaggtcaacctaggaggggtccctagccttgcgcgcatgttgactttgggaactttggaatggaagtttgaactttaataacttgaatacaactcactatcttttagtattatgtactatg

SEQ ID NO: 317894 - DNA, 1190 bp, Cannabis indica
agttataatttctcaattttaaaaatttattaaactcaacaagaattatatatgctacatttgaaatttattatttatgtgatttttgctcaaaaactatggaaatgcaatatctttgccattagagtcacatgagtaagatttagaatccttattttgtgggatgaccataagtggtatttggaatatcgaaattgggcggtgctacggtattagacaattttacccctaagctcttagattttttaagggtgaagtaaaggaaaaattgtaattttgcctattaaaaagggttttggttttagtgaattgtgtagaataccctcattatcctgatgatttgagtaaatagattaagaaaaaggaaatgaaaggttttatctcattttttgcaaaataaaaaaaagttccaccaaactttttccttttctatatcattctactgaagcaaaccaaggagatttaaccattttgttcatcagtttcttcatcatccaactaagatttcagctatagtttgagtaggaattgagaaatttatcaaaggtaatcctagttttctttcttcttcgaatttcatgatttaaacttggttctatataatgattttggaagtatagttttatttgaggttaaactatgttagaaactagtttaaagcttgaatttagtaattaaaggctggtttttataagttgtagcaagatttgaggaagtttgagttttttaaactcatgctttggtcatccatggtaaatttgattgcatgttattttagatgcttttggattgttgtttatctttagaataccccaaaaaattgtactggagattttggtagcttttagttaggttgggagctagttcttggggctaaaaattggaaattttttagcccttgttgcgagtaggagcttctggaattggagactttctggatagggagagcttccaaaatgggggatcttcagaaatgagagagctttcagaatggggaagcttccagaactggggagcttctgttggattttgtgccctaaataaaactcatttcaatataatcagatttactaataaagatcagaaatcacattttatgttgcatggttcacatgatttatttcatgattatatttaatgtataaattctattaagtccagaacatatgtatttgttaatgattatagtg

SEQ ID NO: 317895 - DNA, 1250 bp, Cannabis indica
aaacgatgcttcgggacaataagcttgtgccacaaaattttgtgataactcatcttttcagcagttataagagataggtaaaattattttgctttgaactttccccacagaaccggcagccaataactcttctttgtcaatggtattcctcaatcttaccaatttcttgaagtactaattggtatctccttcgggataggtccagaaatcatggttctttaaatacactattgatccaacgaacccaaaggcaatcctgtttagtagagatagcctatatgtatttggctataagagcaatcttctattatttcccttccctaaaaccaattcctccatgttttttcggcaagcaaacctggctccaagaagtgaagtacagcttactcttattcccaaatttaccccataagaaatcacgacacaatttgtcaatttcagtcgtaacttcttacggaagaataaaaatgttcatccaataatttctaatgcccaagagaacataatggactagcagaactcttccaacaaatgacaagtgacgactagaccaaccatggagctttttttatattttgtccactatttcaccacaatctgaagaataaaatgttcatctgttttttttttttccacatagactaaaattaattaatttatggtgacgtttggttggatgtaataaaacaaaatgaagtacaatgctaaagtctcaaagaacatagcgaaaaataccattattacaacaaaaaaggacaaaaccaaccaaacacaacaatagtaacgacttgcacaaaaaaaaaggttcttatctacccagacaaaatgacccaaacattgcacgccactatgttgtgataaatccaacacgtaagtatacgtatcgttttaacaagtaatactcaggtaagtgagatcgttcccacgaggactataattaagtaccaatcaattaaattcttgtttccatttggcaatcgaataaataaattttgaactaaataaactaagaaaaattaaataaaacaaacaaataaaatgtttaacaatagatgtgaaattagggatatgatttcaattactttgattatctaattgttaacactaattaaccattcttcttcctcctatgtgatgacagattataaattaacctaaactcttttcagatcataaaagtcctaaattgcatgtcaactactacatctctgatctagaacaacatacaattcacattaagcaataatcta

SEQ ID NO: 317896 - DNA, 1186 bp, Cannabis indica
taaaatattaaatatgaagaaaacattataaaaattgtttggtgtagtggtaaaaggtcttactttaaaataagaggttatgggatcaattcccaactcctattttataatttttattaaaaaaatatttaatgtgtagttatgagggattgaactttggatctcttaagtttttttaaaaactttaccattacactaagcactaaatctattattttattatagttaaactatatatagaggctccaaaatttaatttcgccttaagccccatataccttaggactggccctggttttgagcaagcaatttgttataatttgaacttcttaatggggcatttggtatggtgttagatatggtgggaatgagaatgtcaactcatatttaataaattaaaagttaatgacccaaaaatttatgtttccaagtagattttattttttatgtttatttgatggcagtgttaattaccttctgacaaacacataaatttgtgtaattaccttcaagtaaactcaattccaattttctcttaacatttgaaacacatccttaacctatgttgcctctaacttaagctaccatctctaaatcaagtcacctatcaaacacacaataatagatttataaagaacttacttggaaaaattctagaccagcttatcgaaaatctataagcatccattcccatctccttaaggtattgtatatcttcctgttcaaagttattgaaaattgatattttttttattttatagtaattaattatataaggatatgtacttgattataatttatattaattattttaaaaaaaatatatatatgtgtacttacattataacggtggtactgatccacagcaacatcagcattagtacgatcacttatcatgccttaaatgggaacaaaagaataagtcattgtgaagaattatataagagtaataaaatctatatctaaagattgtacgcaaaatgattgatataaagtgtagaaataatttagaaatagtggatatgtaaatatagacaatcaaataataaattatttctacttatgtatggttgagtcacttgagtgtatagtataaaaatttatttattccacaaaataaaagtatgagattttattttaaagttaacttaatttgtatttattgaactttttaaatattttgaaa

SEQ ID NO: 317897 - DNA, 969 bp, Cannabis indica
aaaaaaaaaaaaaagaatttagccgctaaagcttcatttacaaaccgaataaataaggtaagagatcggttatgaatgtacgagaatcttaccataaaagaaaaaatattttgtcaactacaatatatattataaaaaatagttaattaagtataaaatataagaattcacgagagatgtggctttgaggttgtcaaggtaaattaaataataatgctataataaaaaaagagtcgtttttgagcgtggctcccacacaaagattccttcatccacacgaaactgaagaatccccgagagacatcttttcataatgattcaaaaatctactctatcaataatacgtcgtcgtttaactcagctcaaatcaaaaccattgctttctctgtttgtggttagtttgtgaccgaatctgagctgtcttttgcttattcatttatttttgtattcgagagaaaggttgtacgtggctttcatataatccttgcctttattactttttaaaaaatttctattatattacattgagtgagctataaatcatagttagttttgttatttagctaatatatctattcaattatcaaccacgtatatatcaaagaatttgcaatagtagtaattttttttttgttggaaactgcaatagtagtatttttaaagatgtttaaaattttaatattatctaaaaatataatatatattttttttcatattatttttaatatttttattttaaaaatatttgattgatatgacatcctttaaaaatattattctaaaaatattatttattttaattataaattatatcctgaggaccagcttaaaatgttgtataaaaatttaaaattaaatcctttacaaaaaaaagaaaaatatatgtacattaaaactacaattctattattttttttaaagatgttaaatttttttttataaatttttatttatgtatttataaaaaaa

SEQ ID NO: 317898 - DNA, 854 bp, Cannabis indica
aacattgtctaagcttactcaaaattatagaggcattgtctctcctgagagacaactttcattggaattagaaagcagatgtatctttggtatgccagacagagatgattcaggtgatcaaatcaggtgaaattgttgaggtttgacgcctttgaaccgattctactaactattttaacagttttagctcccacctcagccacttaactatctttcacagttaagttagttactcctctagtcgttaagtgtacctaatacaacactatataatactagtcataatgtagtgtgtcaagaaatagagatgaaaaatagtgagttggagggttgtaaatagactctttcatgtgttttattgaatggtctcaagtgaagattagttaaggactgagactccattgaaaagagaagaggatttcgatacaaattttgtaactctattctcgcatcaataaagaagattcaacaaatgttgaaggttgttttctcacgcggattattaagctcaagatcacagtgatctttattgccttttccatgtaagcatttgtgttcaagttttagtttgactttgaattttgtttcaattttatgtttatcattctgtgatctggtttgtcgttcatgatgttgtgttttgattcttgtttggagtttaagactctacagtgttgctcattatttacccaaatatactatactgtagagttagtattatttggaacaggtattttctgtctgttgctagagttgcagatttaccaattcaattatagtacgtgttgcccctggttttgcccaatatatgtggaccaaccagacaaggacacgcggacacaaagggtttagca

SEQ ID NO: 317899 - DNA, 1981 bp, Cannabis indica
atttttttttttttgaaagaaatcatatgttatttaatcatctttgaattagactaacatataatcaccattaagtaataatctcaatgtgactaagattatgcaaatactttcgtttcacatcaaaacttagtttatctaattttagcattttcaattttcatttttcagattttgaattgggatcataaagcatgcaaaaggtgatcaatcttaaacatataattaacacaaatatagataaattcacaatcacaaaaggagaaataataattatcattaaccaaaaataatgtcaatcaacattcatcatctccccaaataggagtttagttcataatctctagtcaaatccataattaaaattgaaacaaaaaataacatagaaaaattaagagagaagaaaagaactggttgaagcaatcgatccggatcgccacaagccgctcttgaagtcttctcctttgtttctagggctccaattcagaataatgatcaaaaatcatgaactcctctttaaatgaaccaagttttctctttaaaattcataaaattacgaaactgcccatacagtcatcaaatcggctttgtcgcgacaaagcttatttcccaccgcaatagttggagcattctcaaccttgaaaaatttctgccaagtcccgttgcggcgaagcttattccccgtcgtggcgaagaatactgcctgtcgcgacgagcttcagcagaaaagaattttgtacatttttttacctcaaccttttcatttcttctcctctactcttgtgaatacttcctttaaatattcggggacctgaaacaaaagaatcaagcataaaatagctttaaaacttgatagaaaagtcaaaaactacctaaaaatgtcacccgaaactaagactaaaattagcttaacaaggagagagaaaaaataataaaagaaagtgacatatagaagtaaaattataatatttggaatgcattttctttttcttatctatgattatatatatattcctaacgtactgattaaagttatttataaatttacgatgcagacatttataaacagtgcaagaattttgttgaacctggatagcttattgtttaacaaaagggtatgttttctcaaattatgaactgttaaagtcagcgaacaacatgagacaataataaaattataacttcctcaaacaacacacccaaagagctagagcattaaattgcatcactgaatactacacaccaacccattaacatatcaagaatggtccctaaaacatttacaaaacaaaataagataaaaaaaaaaaatcccctagcgatgatattaaaacctaataaaataaattcttaatagtaaagataacaactctcaaacaaataatatttaaaataatttatcggtaaaatctctgtaacaattgacccttcctaaaattgacctacagattaacaatacataaaactctattaccacacaatttaatgaaaaatagttaatgtgaaaaagatggtaaaataatcgatattataatgtcaagacttgaaatacttatatgccagatctaaaaattcgtttataaaaggcatgagtacaaaatgaaatacttctcgtacacattgaccatattacaaatttatcttaaataattaggggcaagtcataaaaaaaaagtacaaaagccatagaagtaggggtggcaaaacgggtttcgacacgacacacgaacacaaacacgacacgaattttacgggttagggtcgggaaaattacatgcgggtcgaaaacgggtcgacacgacttggcacgaaataaaaacgggtcaaacacgacacgacccgcttaacacgaatgtgacacgtttgacacgatttttttaaatataataaaataaaaaattaataataataatataattatataaaaatatatatttaatgattcaatgttaagttaaaaaattttaaatttaattttctt

SEQ ID NO: 317900 - DNA, 637 bp, Cannabis indica
agtatgaaacgcaactttacgagggttgttgatattttagtaatgccaagtagtcttcagtccactgaattattttgacgggcacgagaatggagtggtgatgtagatgtttgttcctataatgctatattttccaaaccaagcaagcaaaaaattagaacgggctagttgtgaaggtgctagaagccaagtgaagtaagtccacacaagttagagaggcatgattaggtataaatgtagaaaattttgttaatttgcatacctactggatagttgaacaactgaaaattaaagagcacgtacttgggtctcatactagcggttgtaacgacaacagcttggtgaagacaaagacttccttttgtgcaaattatatggctagttgtaagaatatcattgtaagattgccaaagaaagtgttagattttaggagaagttgttgagtccacatcatcttccactatttttgggttgctatcatgttcaagggtgtcgggtcaagtttgtggattaagttgtgtgctttgtgatacccgagttaatagtgtaagctctgtgtggggtaagggactagtaatgggtgtcagatgtagggaaggtggttagcgggatggtgataatgttgggttttgtgccc

SEQ ID NO: 317901 - DNA, 841 bp, Cannabis indica
ttaattttttctccatccttcccaccttacacctaataccaaacaatacagaatgtgaagaacttcaaatttgggatgtgaaacaacaaatttcaagatattcatttgaggccgtaatgatttcaagatttaaataattaaattgtgtatgctatacactctaaatgaaaggttctacaattctaaacatgcagatttttgtttttcacaaaaaagaaataccaaaattaaagattatatatattatatctccacttgaaatcgggatgcataattatgcttcaaccaagttttaatcaaactttattgcaaaaccattgtgaagcatcattttaacaatattttggcgaaaaatcaaatttttattatgtcattgttaagaaatgttaatcatcattttttaaaactataaatttacatgctacaatcataaaagtatggttaagcaacgcaaaaatatatttaagtgtcacaaaagcatcgtcaagtatcgcaaaagtattgctaagttgatttttttttacaattaaaaaaataatgtaataaaagcaaagggaggaaaagtatagttaaatttttacataaaaatttttgtgatgcttaatcatatatttttttttctcatttacacttttcgttaactcatttgttttcatatgcgtttattttttattttttattgaatttttaaaaatagaaaaatttacataattgaccacaagttttgaaaaaaaaattacaacatgaacttttcttttatttttatgttttgaatgttttttatttacaaaaacatcttcagtaaaaacaataaataatttcttttggttgttttatagtt

SEQ ID NO: 317902 - DNA, 1290 bp, Cannabis indica
caaagttcggggagtaaaaatattaatttttgacggtaaaataaacggaacctaacagaagggacataattatgtagctattatattttaaagagaattttgaacaagtcatagattttaggaggcaaaatcacatagtaccgaaagtttaagagacaaaaatgttaatgattctaaaaattatggatgcattttgataaaataaataaataaataaaattaagaatgtattacaatacaatggtattataatatactccaatcgaaaattaagagggtatttaaatatataaaatttctgaaattttctattataaaaaaaaaacttttttcatgtatatactaaaatggcaaaattattacacaaatatattgggcagaccctaaaacatttatatagtccagcaataaaaatttacaaaaatacttcttgctctaaccattcaacctcacgaatcaccttctccaacaacgacagctttcaacaaacaaaccagtaggccaactaaaaaaaaatcaagccagacgaagaatcaccataaatttcttgagaagaagaccgtaagaaatctaaacacatacaatttcgaatttatgcaaaattgggcaaaaaacctagtttgaaacttaaattcaaccctgatcaatccaaatcaggtataaactggaaaaaaaatatttcaatacactagctaatgtttctcctattgcattaatgttgtttttcaaattttcaatggtagatttattcatatcaactcacaaataacgaagaaaattttcattcatctagaaccacgtacatatagaaacattgttctagtagtttttaaattcatgcgtagttgcattgcaattgcattaacattttactaacgctttgaaactagacatatcaatgattataaactatcaactagagttgtacaagaacttttataaacagcccaacctgattaacccgccaaaccagaccgaaaaaatcaataaaaaatataaaccgaaataatccaacaaaattctaaaccgccaatcagttacttgggcgggttgaaaatagacccaacccgcccaattaaaccgactaaaccgatttaacctgattttagtttttatatatataacattacattaatataataatcatttaaaaaacattaatataatatatatatatatatatatatatattatacaaaaggccaaattaacaaataaaccctaaaatcctatttcttcacaatcaagccacatctagtcgaaaaattcataaataagacatagtctatt

SEQ ID NO: 317903 - DNA, 892 bp, Cannabis indica
ctatataataatatagttctattaagcacttaattaaattaattttatcattttacccttctcgagtcataattactaaaatgccccttgctcaccaacggggtcttaccataatataaatcatactaattcacatatattgaactatataacaatataattcctcaattattcataattatctaattatgattttactaatccatttcttaacctagggaattacaacatggcagagcaatggggccaactttggtcgtgccaaattttcaacctcgggaaaattcctgcccaactccaagcaattttgaaaaattaaatacaaaattggcactactttttagtgcctaaaaaggccatatcttgcctaactcacattttaatttaaaaaagaaaaacaaaaaaatgtgtggcacgactttatatgtgtcggccttaaatctttaacttctaggcacgccaatatttcagcccaaagtgcatagtgcctatatctaatatttcttgtagtgtggagacaagcatactaaaaagtttatgaagaaagaagtgttgggattttatgccctaaaaaaaatatatttcaatctaatctgatttgttatcaacagaagattagaagtcatttatgtttacatgtagttttcatgtttatggtttaatgtgtacaaaatctgttaagtccagcacatatagttattcacaattacagtgatgtcaacacagtgtaatgtaattgtaattatatgtttcaaatgataatgtccatgattcatcaatgcacttgatttacactaatgtgataatcagcgataaagtatacgtacaccttggataagtgttatgttctttccagaacattggcaaattatgctagtttcggatgtatgga

SEQ ID NO: 317904 - DNA, 1144 bp, Cannabis indica
acttttgcaaaacacaggatccaaaatagtatttacccatcaaaataaataattttctacaccatataaaatttggtgataaaacaatcattaagaattaataatagctaaattttcaaaaaaaagatatattaattgcttataatatatcaataataaaaaataaagtgtccaccatagtatattatttttgtaacaaacaatcaagttttataatttttagaacaacaaagaataaaagatgtgaaagtaagaatattagtggagactacatcattaagatagatgaaaataagaaagtgattatgtttaacaggacgagaagaaacccaaaaaaatttctatgatttacagattttaaaaaattatcagaaattatttttaataattttttaactgcataataatcattaaattaataataattattaaagggagtcaaaaaaaaaaataatcaaaattaaattctaataactctggaaaaaaatcgtcgaaaacgaagtccgaaaactatcatactttccctcactctccgtcagccgtgagtgggcttcatcccagccagttgttttcaacctctagtcggtgctccaggtgggttgcacgacccagttctctggcagtcaggtctggacaaattacgaccaaaaaacgcgacgaaaacattagaaaattgaagagttttttttggaatatgatttctaatcaatctatgagatcaatttagagtaaaaacagctaaaaatgataaatctaattgaagctcaatctaaaaactaagaactaaaataatccaattattgtaattatatctcatccaattcaaaaaataaatcttgtaaaaacattgtaaaacaattattaatgagatatgcataatcaatgttaatcaataatcaatataataaaaaaaaaactccaaatttgatttcataattaaaatacataaactctaagagtttaatcgtaaaattcttccaacttactcaataattttaagcatataacatattaatagaaagaaaatttaacaagaaataaaacccctaaagttttaagattaaacaacgaaaaattttaacataaaataataacaaaattaatatgtaattaaaaaaaattaacatatacatattaattatta

SEQ ID NO: 317905 - DNA, 738 bp, Cannabis indica
gcaagttaagaatataatttcttttgttatgccaaagaatgtaaagaaagaagaagttgaatggtttgagaagttgtaaataatagtggaaattgtatagaatcatatgacatctcttgatggtcattagttgtataaattgtttgtgtgaaatgaaagtctgattcatcaaaaaaaaaatctcatttttcttctttagatcatgcataatatggtaagttctctacttgttccttgtaagaattatatggtgatttttttttggattaatgttttaattattttttgtatatctctatttcgatgtaggttattgaatttgagtttgataatatatctccttttttaattatttctatggatgaagaattatatgatgagttttctgtagatttattaattattttgttttgatctctctacttagcattagttgttttctccttaattcttctattttttagttgttaaattttaaattgtatatgttttttttattaaatatatttaagttataaaatgaaatttttacaccaaaaatacaaattacacactttattacatataaatctaaaaacggtaaaagcaactttttacctttcctctaaatttaatcaaccatctatcaactctcaatcactttcctctctttttttcttttgttttcctttaattttttatttcttttctagtttttttttttttttgtaaataacaagtaacctccattgttgtacc

SEQ ID NO: 317906 - DNA, 1358 bp, Cannabis indica
aaaaagatttaaatttaaaaatgataaatattttagcatttatttaattggaccctatgcgagattgggccctatgcaagattgggccctgtgcaattgcacagcttgcacagggtcatagccggccttgataacaactaagcaaaccaactaactaattgaatctaactaacaacttttgaaaaatttctcaaaatatctatatttttattttgttatatatattttctcacaaaaaatattatatacataaatgccaaaaaaaaattatctgggaagaaagaaaaataaacctttctcatggctaggaaatatttgagagaaaaaaaaataacaatagcaatctctattaacaataatgttggttgacgtctacttggtatgtgtaaatttgtcaattgttttgttaatcactatttttcatataaattattcaatttatgtttgaaaatatctcattttttttcttttgaatcatgcatgatatggtaagttctctatattttttctctgtaagaattatatggtgaattttgtttagattaatgtgttaattattttttgtgatatctatttcggtgttggttattgaatttgagtttgataatatatctcattttttaattgtttctttggatgaagaattatatgatgagttttttgtagatttgttaattattttgttttagatctttaatttgtgcatatattattcaatttaggtttggcaacatttcttctttcttctttagatcatgaataatatgagaagttttctattatttgttatctataagaattatatggtgaattttttaatagatttgttagtttttctttttagatctttatttcagtggagattaagattatagaatatgacgtttgatagtatcttttttttttattaggatcaagaattatacgatttatatgatgagttttctatatacttagggtcgattgcgtatacattattcaattttaagtacggtaaattttctattatatgttctttagattaataatatagtaaattttatatagatttataattttttttagatttattgagaattatatgtacttttataagtatatcagtgtaaataataattagaagaacaaaaatattcactcacaccttacttttaaaaatttcaatgataacgtttaaaaatattatcaaactatatatacaatttaaaaatgtagttatttttttattgtaattaaaaataactaatttatatataaatatatttatttattcttatttttaattctctttatttttttactattttatttaactttttaaatttttaccaaaataataataataataataaaacaat

SEQ ID NO: 317907 - DNA, 705 bp, Cannabis indica
acaatagagttgtaatatatcttaattttcttctattgttataaaatttctaacatttacaatgatgagatgactctatttataaaaggagccatgtggtggacctaattagcaaaatccatcgagtaaatataaattgtttactgtatgacccatggagtaggtccaaaatgagtggtaggtagaggaggctgacttgtccattattgatgtggcaggcgattgaatgagctgcctatgggcgcatgggataagtacgtgtcagagtagtggttgtgtaaatctcattgtttattctcctttataagaaacttgttttgtcgttggtacagtaaatttagaaactaaaatacttttcttattttcttgctgacaagtgggggccatacccaataaggtttgtccaagaattcctagcctctaggatcttgcttaataaaaaatttattatatcaacgataggtttgcaaatcatccatttcaccaaaaaaagaagcgaacatgctagccaccaaaaacatgcaaaaagataaaagagctgcatgaatagtaccatcccataaaacatagtcacatacaaaaacaagcaagcatatgagaagtgacatacacattcttaaataaaagtacatacaaacaagttaagaaaggggaaatattctcctaaagctagcatttcttactcaaaaggaagtactaaaaagt

SEQ ID NO: 317908 - DNA, 497 bp, Cannabis indica
taagagccattcattccgtgggtgtaagggcccaatggaggtttgaagcgggaacgttacattgtcgcaagctcattgccacttgggtctgggcattggttgctgagagccctgacttccccactagcgatttctttgagcagttcgataaggtcggtctcgttgctgtgttaccgcctgggatttatactttgcaggtactcttgccctttagttggaatacaagattgatcattttttaaaaaaatgaaaataacattattattgtgtttatatttatggattttatggagaattgcattttggattcaatttgtgggttggggtaatttatatatggattatttgggttggaattagattttttgggttcaattttcgggttgggtttgatttctggttttgggggggagggggggggtgtttgatttttgggaagaaacaaagaagaagaaagatgaagaagaaaaagaaaaaaaaaattaattattttttct

SEQ ID NO: 317909 - DNA, 2055 bp, Cannabis indica
acatttataaaatatatacttggaattaatatacagataatcaaatagagcttagaacgagctttccaacgatatatataactctcgaatcagagtccggatcacaaagttatcaatattcgaagtttgcatttgaatctatccagaaacaagagggcgggccgcagcactccccacatggggccgtggcacctgggaccaaatcacaggctaccaactggaggctggtcgtggcacccataaagctaggccacgacccctgggttcaaaacccaaaaaaaacacaaaccaacaatgaaaaacatggccatttcacatgcaattcactccaaacctaaaccaaagcttaaaaccaatcatcaatacataacctatcaacatagggagttaaaactcaaattcatgtatcaatatccaacaatataaccatcaaaattcatattaaacaacataaaattcaaagctccaacttgagcataatttcatataatcctacatccaacacttacattattaagccaaaaactcatgcctcaaataattaatttcatagctcaataacagaataaaaacactagtaaaatccttttaaattctttccaaacctaatttaacataaactcaaaagatccaagtacaaacatgctcatatcaacaagaaaataccaacatacatctcaagattatctcaacctatttcatgcttctcaacaatagaaatctcaacaagaattcaaataaaattagcaagaagactacctcaaatcaaagcaagaagcaagcctcactccaacacaaatcttcaagcaattcacgaccaaaatcaaaagttgaaaaagagagtttgagagaaagagggggtcatttttggtttaagggaaatgcagaaataaaatcttattttccttcaaatttcttttcttttgttgtaaataaaacgaaggtcaaaatgaccaatttgcccctagggccataaagcatacacataaacattcaagggcattaaggtcattccatacacaaataaattaaaataattttcaaattatccactcataaataaaatgccaataattcaatctaaaattgtattttcggctgcccaaaataaccggttgtgactatactgtgctaacttatcagaacacgcttgaaaaaaagaaaacacatgcatactatataataatatagtccataagcacgtaaataaattaaattcacaattttacccttctcgggtcaaaattactaaaatgcccctggctcaccaacggggtcttaacatattatatctcatattaattcacatataataaattatataataatataattccataaaaatacacaattaagtagttagtgtttttctaatccattctcttaatcctagagtattacagtttagctcctacttactttgagcattagatctctatccatgattcgttgcgagtggagtcttccgtctatgtcacaaaatttattttacgtgtcacatcactttgttagaaatttggacaactgaatatattaaagattaaattaaaataaaatttagtaaaatttatttttatttcacatcagtaaaataactgagaaaattaatagaatattaaataatactaatatttttaataattatctaacattttaaaggaatatttaacattgatataggatataattttttaatggcaaatttcaaatacaaaatagtttttataacaaattaacaactgcagttgtaccaaattttactgtacacccactcatttccgaaagcaaatgtagcaccaactagtaaacaaaagaaatttttacatcaaaaatacaaaatgcaatatttattacaccaataccactacacggttatatcaacttttttactcttcttctttattttattactattttaccacatgcacactcattcaaagcatcggttcacgtgctgacctatgacccctatcaatcaaccatccatcatttctccctttttttctttcttttttccatttatttgcaattgtttttaaatagtaacctccatag

SEQ ID NO: 317910 - DNA, 1465 bp, Cannabis indica
accaacattttccactccaagtatgatattattgctttaggcataaggccttcaaagttttcgtacttgggaaacctttccaaaaaagcctcgtaactaataaagatactgtcccattcctatatatccatgatccttttcatttctagccaatgtgggactttgtcgcattcccaaaaattggaactttaggacatttttagaataataatacatcagatacaacccaaggcacatcaacacaacaagtggagatagaacctgatttgaatcaggtggaaccagacgtagaagacactagctaggtggaactaggaacatgaaatacaggtcagatggaacaaggacaaccataacctggtatggtttaggtggaactagtagttcagatagaacctgactcatgataggtggaaggaaaccttgagaattatcagctaaccagagatagaaagaagagaatccccaagccaaattagaaatttagtttcaaagtttggtaagaagtaatggcatatgatttcttaagtgccatggagacaaaatgcactaaaccaaaaaatcctatgacattgctataaaatgcaaagatgcaaagagatggaacaagactatgagtgaagaaatgcgatatctaatgaagaataagacttggattgttattaagagacatgatgggaagaacataatagcttgtaagtggttattcaaactcaaggaaggaattaaagaagatgacccgatgagatacaaggccagacttgtagctaaggagttcacacaaagagaagggatagacttcactgagatattctcccctattgtgaagtacaagaccatcaaaataatgctagccttagctactcaatttgatctagaaatagagcagatgaatgtaaccactgcatttctaaatggaaagttagaagaagaaatcttcatggagcaatctaaagggttcatcaagaagggagaggaagacatggtgtttatactacaaaattcactatatgggttaaatcaatcacccatacagtggaacaaatgatttcataattttacgatgaaacaaggattcaaaaagagctattttgatacatgtctttatacaaaggggatcaaattacatcatctatatacttgctcttatatgtagatgacatgctaattaatattagcaaagaaaaggctaaggttgaaaacttgaagaacttactaaaatatgagtttgagatgaaagacctagagagtgctactaagatcctaggagtgacattaaaagaaacagagaaaagggaaagctaacacttacattacaaaatccttggagaagttctccatgacagatgcaaaagtcacaaagcaacccattacaagtcacaccaatttttcaaagctcaatgctgttaggctattttttagcatacgttttgggtcactttttatagttgttttccttctttat

SEQ ID NO: 317911 - DNA, 1459 bp, Cannabis indica
aacagaggtatcctactcacgattttagaactacgcaccagtagtatttgcgttaaagatttggtggcattacctatatggcgagaaaatgtgaggtatacactatcacaagagctgaaatactctttacccagaaggacttgaatataagacagaggcgttggctagagttggtgaagcattatgattgtgagatcctttatcacactggtaaggccaacgtggttgctgatgccttaagtagaaagcgtcagagtcaattgagcactgtgaagaaaatctcccaacaactagaatatgagatgacccgagccaagattgagttagttgtgggacaattggctaatattactctacaatccactctattagactgaattaaagaagcacaaatgcaaaattcagaattagtaagaacccgtgctagtgttttggcttggaaagctagtgacttcttggtagatgaaatgggaatgttgaggttcgggaatcgcgtgtgtgtgcccatggatgagagtatcaagaaagagatcattaatgagtctcacacgactccttattcagttcatctagggttaacaaagatgtatcaagacctgaaagccatattctggtggccaggcatgaagaacgacattgatgagtatgttgctaaatgttttacctgtcagcaagtaaaggctgaacatcagtggtctgtagggttactgcagccattgaacataccagagtggaaatgggaagacattgctatggactttgtggtaggtatgcctagaaccacggaacagttttactctgtgtgggtcatagtggacgggtttacaaagtcagcgcactttttacctgctctgacgaatctctccattgactagtatgctgagttatatctcagagaaattgtacgtctccatggtgtcccaaagtccattattttggatagagattcgaagtttacattgagattctaaaaaagtctccatgagctatgggtactcagttagagttcagcacaacatttcatcctcagacggatgggcaatccgagaggactattcagattttagaagacatgatacgggcatgtttgcttgacgttgagggatcatgggtaaattaccttccattgatcgtgttctcttataacaacagttaccaggcaacaatcgggatggctccttatgagcttttatatggaagaaaatgtagatcacatttcactgggatgaaatgggtgaaagaaagttctttggacccgaagctgttcagagaataagtgaggcacttgataatattagagcacaaatgctcacagcacagagtagacagaagagttatgctgatcaaaagcgacgggatattgatttccaggtcggagacatggtatttctcttaatatctctgatgaaaggcattaaacgctttgggaagaaaggaaagcttagcccgaggttcattg

SEQ ID NO: 317912 - DNA, 1726 bp, Cannabis indica
gtatcgcgatcaaagaaaccatttagcttacggatgttccatccgccactcgtcagaaataactcggccacctttgaatccctatgcggagcctgcccaatcggcttaggaatgaaaccttttaggtgagtaatccaagggtcagaccagatgttcgtctcctttccatcagccacacgcttacaagcaccctttcgaataatagtcctggattttgtcacatttttccaaaaccatgagtctgaggccttcggttcacaatcaagaaatgacttacccttcaggtatttggtcatctcatgttcacacaattagtttttgcctattttttggttggattaatagataagctttataccttacacgctttcatgcattgtccttatattgtaaagttacaaaaatcatatacaaagtttaggagtgaagcctattacaaaacttaatttacatatatcataaaataataagtgtaatttgtgttataaatatttattgttgtaaataaatatttaagtttaatttttaattgtaataataattaaaattttaattttaattcttctataagtatttaacggtcaagtgtcaagtttatttgtccaagccattaaatttaatcaacttaacattcctttaaagaagatatagttgtgatatgaatcatgtgcatgtattgactcttgttacattttattaattttatatactaaaataactacaactaacctcaatttttatgctgtgtaagtacatatagtaatttcaacttttgtgatttcattaaaaataaaaaattataaaattataaagtttgacatgtttgttaaatgaggaatgctaattacaacttcttagtcaaccttcatgtccgaaatcacataccgaaatatttttcttcatagcgggcctgtaaatttttcaaaaagtctgaatagtttacagtaccgaaaacaaaatttctgatattctagtttaccacacgcgttcaaaacgtattttcgacactgtaaactattcaaaaatttttaaaaatttacgaggatgatgttgtaagcataacgaacacatttgaaaaaaaattccgacatgtgttttcgggcgtggaagttgactaagagattgtaacatgagattaacggtagcactcttctggttaaatattacacttttaaaacttaaattcataattctctcataaaattaggtgtaattataaagtgtataattataaattaatactctattttaaataattaatattttttaggtgatttaatcatcaagactcctgttaaaaagtagtgtttcatatgttaaatcaatataattttaacaaatcaagtaacttaatttatattaaatatgctaactattattaacttagttaaaattttaaatttttaataaataaaaaattaatcgacgtgtcaaacttaattaaattgatttaacacagtatgagacatatctttttttaacaggagatcttaatttgactaaaagcatctccaaccataacattagattaggaggaggtttcaatggttacatttttattgtaaccatcatggttacattttttttagccattggatcactattaaatgattgtgattaatttagaaattaaataaaaaaaataaaaaatgacctataacctgatattaacctgttaatttatttccttttaaaactttaattagggttaattatactttaaaat

SEQ ID NO: 317913 - DNA, 1078 bp, Cannabis indica
aggttgaactttttctaatttttaattgggcgagttacgattaaatatttgcaacctgatatttatattgggttaataaaaatatgctataacccgaccaaactgaccgacatacaccccttgcaatcaagacttaagattcgaaggcgcttaaggatatcttaaggaaacttacgagttgagtggatataatcgaatggctcctcctggagttatagttggaactggacaggtcaacatttttttctcacctccggggctaagcagagtgtagctcgatcgggcccagggtttcgaagatgaactattcacaggcattaaatgcaaaatggaaaaaacgtctatggacgaatatgaaaagacatgtcagacacattgaacatattctttggcgattacacgttaatcgataatattagtgatgactacataatgaactgtcacatcaatcaatgaaaaataaaagtttgtctcaccaaaaccatatgtaacctactatatatgcaggcaagcataccctattttcataatttgtaaactgtgcaaagccaaggtgaatacgtgggacatagaagtctttaatctctcgaaaaaagttataaaaccacattcagaatggggatcgaaaaaaataaaagtagagtattctctgtaaagaaacacctccatattaaatatcagtcactcgtagactaagacttattaatgtcctaaccacgtaaaaaatatttgtatttactctcttctaattattttcacaactttaactacttacttgctaaaaatctcggtcaacacaaaaagtaatatattcttattaatgtaatttaatatcagacttcacacattttgtttaaataaaaattatgataactcactagttacaacgtgtattaaatatcttaagatatctaataacaatacttaataatatcaaaaactttttctgaaaaaacaaaatcttttatttatagtatgtgcacttatttaaagaaattataattaatttatatatataaatttataagttatattttgaaggctaattatgatttttgccccttgaactttgacatgt

SEQ ID NO: 317914 - DNA, 1426 bp, Cannabis indica
aatcacgtaatacgcctatgctagttagggtgttacatatctgcattgtagagcctcccctattcccaggaatgaaagccatctattcgtgcaggatcaaagttaagtgttccctcgaagaatatggatctttccccggaggattagaggcgtatcgaaatacattgggccaagatataatttcgttccttggaggctctactcgcacatgtcagactacggacctagtgaccaggctttttttggtacgacatcagaggttttcccccacaacacactatcgtacgaagcatgtgtgtcccatcatacttgatcgaatgatccaacggctagggataagggaaattcaaataggaaagatcctaggacgacacgtgtatgatgcccaacctatacaatctgacacccttaaataccacatggagaagaggccacctaccaaactaacggttggatctcgcccaaagatgatcaatccaagccaacgcatagagagaagttggcctataaatatccctataaaacacgagataggacaagacactttttgtaagaatatttctgaaaaaaacctgtaatacaaaaaataacatgatatagagaaactcctcgcaaattcctatcaagcttccccttcttcaagaggaaccctaggaaaattgagtttcagtccattgtacactaacttgtaaaaatagttatcaaccgatgagcctaataaaatatactcgtggactaaggatcaataaaacctaaaccacgtgaaaatctcatattgattatttattttgttgttcctttcttaagctctaaaatgtttggttgccaaaaaatctcggtaaacattttgatgctttcattgagagttgaagaaagataagaatatgtgcggtgtctaccgtcacaaatctgaagaaggaaggctacttgatttcccagccgaggtcggcctaaggccaggggtgtgttggtcaaatacgtcgtcaaaaatggaggcctatacccctgtccagatgaagaaagtacaagtgatgaacgcatatggtcttgaaatgctcgtagttcccgtgcacgtttataaaagctcaaatctggctagccaactccttgaggaaatggttaaccgtcggtctcctcaaaccaaagtcccctgctgtctaatggggtatgaccacgctgacacggggcggtgcaagaggtgttggggccaggcaaagaagctaagacccatgcaattacgattaataactaccgaatgaccattagatataacgactttatccatctcatgactctggtctcttgacctttgatcttggctctagtgctgatgctagggccagatccattaccgacaatgttggaaatattttaccaggatctagattaacttacaagtattttgaattaacatcctaaatatgaa

SEQ ID NO: 317915 - DNA, 492 bp, Cannabis indica
tttttaatcacaatatttattgtgactaaaactaaatcagtgacaacttgtagctaaatactatattttagtcacaagtaactttttattgtgactaaaacttacattaattagttacaaaattaaaattatgttgtgactaaaaaattatcacaaaaaaataattattttttatagtgattgctaattttttcttctcatcgaatctagttctagttcaggattgtgtttatgaatattgtgttatattcggggtcattagcgagatctatattttttttttctttttcttcttatagctacttcgatttaaaatcgacggtaatgaataagaaaaatatattgatattttgtcacttagcaatagagcatataatttgatgtgtctatttataaccgctataattaaattagcactactacaaaaaccccctttagaggcagtttttaagtcctttcaacgtcggttttcgcgaaattcgctaccgacgc

SEQ ID NO: 317916 - DNA, 1588 bp, Cannabis indica
cataaaacccaacatttataagcacttatgtgggtaaggggattccctttacccacctagagttttgtactaaagcatgttgtaaggataggtactacaacatgaagatctgaccatctattggtaagaaacttccccatcatatggtggacgactgtagtgaaggattccacgtagacgaggacatgcatcactaaaagatttctccttgaaaagttattgcctagatataagctgtcggacaaaaaggaggtttcaaaggcacgtacacgcactaccaaggtctgacgcaggggacaagatctgattctgtgtaagagggcgaataaccatcgcttcgggtttcaggtatgatgcttgtgaatgaactcggggaccaacaagctaaggccttcttggatcacactagcatcaggtaattcctgttccttcagttgtagaaggatagtaagactcctggatctctatccttactcctaaatattgggaacctttgagcggcttccaaaatataatagtttctttcgtgtctttaagtggtaattgcatactgatcacggaatgttcagggtggcacccttccgtgattgccacgtataaggcatctgagagcacgcataacatttaccctcaagctcgtaggattcttgagtggtgggagcttccaaccttctcttagatgcttgagttagtactatgatgtgcaagcaacatcttgaaatgcggatgctatctttcgtgttatataggatagttgaaaggttaacatctcttattggtgatgtacaactattattttgttaagatgtggtgtccattctgcaagttcatagggcttaccgccaagcctaggcgcattcctcatggaaagtgaaaggcggtaggacttgaaaagacgactagtttatggtgcattgggtttgtttccatgaaatgatgagtaatgaatgcctcattcactctcacaaggtgcattaaatgcaaactgttcgagtccccagccgttagatggagcaactttgatcagtagatctgcctgtctaattcaaaatatgttgtcgttgccactcatataaatggaaaagcttgacaaagaagctcatttttcccttctcatttcaaattacaagccttaccatacagaacctctccagaaatccttgacctaaaagaacactcgtcttcttaatacacttctcgaactaaaaaccacattttttcctgttgctaacttcttgtgatcgtgcgtaggttgcgaatgtttcctttcatttaaaacgagaatctttttccaatcttgtcaccagattttccaatagcgaagctcatacagaagaagaattctccgttacggcgagtcgtgatcgaaccatcaagcggcccataggacctcgaccaaccatatgcaaccaacgatcctccattaaaccttttgcaagtatttcttctacccaaactattatttcttggtttgatttagaaatgtggtctcgagtttgtagaaacgtacaactttgcatgcgtaagatttaggtatgaatattagggttgctatttgtaaaatggattcgcacggaccttgggggaa

SEQ ID NO: 317917 - DNA, 575 bp, Cannabis indica
aaattaattaaacaacggtatattctaaaattaattaggtagtgttaaatgtggtattttttacagtattacgccactcagcgtaaatttctcttttttttttgagagagggtgaattctatatttagttacgctttcacaaattataaattattatttttagtttgttgtctttattttattaaattactttgatactaaaaatctcaatttttttttttaaattaagttagaattaaattaatttaagttaaacaagtttttttgaacttcatacatttcatttgggtttgatctaatactttcactatttctatattaaattcaagatttttacatttgcgagttaataaatttaaaacatactatttttggtctaacaaaaaacaaaaacaaattataggtatatatcattttggaccctgtgttttgtaaaagttaccaattaaaccctctgttttattaaatgacaaaatgaactctatattttctaaaatggtaaaaatatgaccctaaactgattttttgtcaaaataaaatttaataataatctgatttaaatgtgttatgacaaa

SEQ ID NO: 317918 - DNA, 1002 bp, Cannabis indica
aacatagaaaaaaataagcataaaaattagtatacgtgtctcgcacgtagctttttgctagtattatatatatacataaatacataattatatgactagatactatttttgtgcaatgtgtagatgggcagtggttaaggatgagactgtgttcacaaaaatgaatgaatacatgaatatgaacactgtgggagtttcacacgaatctcaactaagaactctacaacttatgaaagtaattactcaagggaaaaaagaggaagatgaagaagagacgatgtttgattttggatataaaaccatgaaaaatcgttgggaaaaattgaatgagattatatcaatctcaaaatgcttttctctccaagaattagaatctgatcaatactgtaatttcttccataaaattagggggccttcaccaggtaagactcgacactttgactacatcataaaatatcttaatagagtaaatgatactacgcaggaagggtcagcttctaagttgaggcgggttaggcccacacttagggctcatccaacctggagcttaaataaaaaaaagttctattaaaaatatatacgtatatatattttaataatttttaaaaatatcatttatttttatacgagacctaacaaatttattttccatgagacctaatataatttatgactggtattacaacattgatatgaattatttatgtgtatttttttgatagaataatgatatatgcactgataaattatatatatatatatatatattaaggtgatatatgtattttaaaatagtattagtttaaataaatgtaattagttaaaaaaaaaaataaggtcactatattaatagcataagctttgaaatttactaaattcattcattcatagtggttgcataagcctaaattaaaaagggaaatttgagttttttatgcttagaaaatcaaaaaatttgatttctaaaccaataattaaaaccctaaaaaaactatacctttt

SEQ ID NO: 317919 - DNA, 778 bp, Cannabis indica
atgttaatgaaacatacttagtagtaaatctagatcctggtaaaatatttccaacagtttaccctcgagaaaaccagtgtgtttgaagtatttggctttaagaatagtggcaagaagagaattgggttagaaaaaacacgccatgccttcatagcaatcatggcttggttatgagaaaacagagacctaaaacccagaccaccaaaaaattttaaagtacaaagggtacgttaggtttaccaatgaattttagatcattttcccatcgatccccaccaaaactgagccattaaaattttaattttatgacaaatcgaaacagggggtttgaagcaggacatagtataagatggaatgacttggataacagcttttaagagcacctctttaccggccctggaaaacagtttttcactccaaacagggagctgggaactaacccgctggaggagaaaatcatagctggattttttttttatctaccaaagcattgaggaacccctagatatttgctaataaaaggctttgactccaatcctaaggtcttaaaaaaaatatgcagaaacagaggggggagtgtttggggaaaaaagaatggaagacttagcgtaattcactctttgactaatagcaggattataaatggtaagggcctctttaagggcattacaagaagcaagagaagcagtggtgaaaagaagagtgtcattggcaaaaagtgttggaatatttattttaccaggatcttagatctactcacaagtatgttgtttaaaca

SEQ ID NO: 317920 - DNA, 557 bp, Cannabis indica
acaatttagaggttattcttatttataagtggcccaaattgggacttgatttttttataacaaattagaggttattcttgaatagagtattcttaaatagaggttctactgtatatataagtggcaaatgattccctcccgcactttacttggtgcgaaagaagtcacgcactatatatttgtccactagtgatagtttgaagaaaaagtcacccactaagggatagtttgagtatttgattgggaactatcatgggaaaaataattggagtttgtgttaattttacgatgtatccctctaaataaaagagtcacggatgtaacataatgtttgaactttgtttccggcgtattaaatttttttaaatttttcaaaattttgtaggagatcttaaataattataatgtacacgaccataaaaaatactagtctaaaagacaccataagagataggagttcatcagtgcaccaaaaaaaatgtgcgttgtaaaattttccaaaattaaattttttaattttataaatacaattaataataaacataaattaaatatta

SEQ ID NO: 317921 - DNA, 1589 bp, Cannabis indica
ttttttaatctttctctattttaaatctgcaaaaataaaagataacaagcgtaaaattgctccaaacacgagtaaaaataaattaaaaatatactaaaattaatctaaatttaatactaaaaacaacctaacacaagtcccttgttggagtcacaagatctgggtcttgagtcaaaatcagggtttagcttcttttttattttctttcccctgtatacttacgagtattcttcttcattttctttttatttattttttgttcttcttccaacaccatcattattaagaccactaccaccgaaattaaagaacaaaaagagttttgagcttgacgacaaatctgaattgaaatataaaggggatcgagattgattatggcaaacgtgcacatcaaatttgaaactcgtgcacactttttcttctcattgcgcaaatctacaccccatgtctgcttataatatatttagggctcatttggtaattcttataaagtcgtattgtattaaataataaggaatactatacttaaatcaaactttttattgtattaattattacaatcataaattttaatacaaaatcaactgtattatttattacattataaatgatctgtattagcttgtattataatatttaaaccctagacccaaacccagacctcggccccaaaccccagacgtagacttcagactcggaccccaaacacggacccatacccaacctcgttcccggatccagatgccgaaccctagtctcgaatctggatccgaaccccgacccagccccgacctagacctggacgcgaacccaaccccactcccaacttcaactctgaccccagaccccaaaccagaccccagacacgaacatgaacctcgaacctgaacccaacccttgcactcctagactagctaggccccaaactcggaccctgatgcgaccccaaagcccagactcaaactcgaaccccaaaccccggttcatggatcggggtcgtggtgggggtcaagtttatgtaaatatgtttacacaacctattaataaaatttaatatatactaaacattgtactgtattaaataatactactacaatttaatacaatctaacacaaaaataacacggtgtaccaaatgagttcttaaaaattaaattacactggacaatccatgttagcgtttaagattaagaattaatgaacaccttaaatttgcaaaattagagtggagattgggaggtatttcccactaaaattttaaatatatagacagttgttaaatagtgtaaagtttagaaggtgtatagccaccactgaccctatgataatttaattccaacaatgttatagtgttagaaatttacaatgtgcccatacaaatgtatgaaaacttaattattattaacactacaaaaatacttatcaggttacacacatattgattcgataaacaatataaaaaaacattattaactaattattataaagtgacgcgtccatagtattgggcacatgctttaaggcttaaagtgtgaaatagccaatgtttattggttttaatatatataaaaccttatacttcttaccat

SEQ ID NO: 317922 - DNA, 1160 bp, Cannabis indica
tttaagcgtttatatattacatcagtataatttgggactcgaacctaggacctccaatacacacgcactttctatggtcacttgagctagtctcaagtctgagtggttccatatacatacatacacacactaatactgtattaattaaggagtaaaatactaaattattttatcagtatggttgatggttcagagtacatttatgttggaaaaaataaaattaaatatatgatgtaatataaaaattaatggtcgaaaaaattattgaatttgagtgatatattttgaaaaattgagtaaaagagagtggtctaacatgtttatgacacttgtacggatcgtattacaaagaaaaaggcgtagcttatttatttgtttatttatttatatagacgaaagaagagaattattattattattatgaaagtgaatccacattccacacgcgcaggtattccaattccaattccaattgtgagagtaagaagagattttatatagcattgaatcaggtgcggatgggttgtttaagagaaagaagaaaatgggtcccactctcaccccaaaaaacttagtgtatattagagagagagagagagagagagagcacatgtgatcacatgattttcttgaacctaacaacacccatgtgcctctccacaaaccccacccccacttccaattccatctccttcctacgatctacatcaacacccttcgcatgcttgccacctgtcacatctcttgaccccacctagagccccacaaaacatcaaataaataatctccctctttatattttcagcttttaataaacaacaacaacaacaacaactattgacccccaaccccatgctatgtatctatatagttaactatttatcttattatatgcacttgtgatttactacttctactactttgtaatttagaaagaaaaaaactagatgtgtacaagtaaatttaaagcacttcattaattaagtaggtacatgattttgttttgtgattgtattttcacgaaatatgtattctgtgatgtacgataaccgttgaatgagatagttatttgatctgagggctgaaattgatctagaggtaattaagattaaaaaatagtaacataccctgacactcatctaatgtaccctgagactcat

SEQ ID NO: 317923 - DNA, 754 bp, Cannabis indica
atttattttcaaatttattaattaaataaaaacaaacggaaagacaaagtattatctgaacaaagacatcaccattgtatgcttaagatattggtggcaccacattcactgtgttaagacatattataagatatggtggccccactagatttatttttgggttaattaataaattaatttaaaagatgaatatttatttaaatttgaataagaaagttagttatagatgtttaagttggttgagatatttcctcaaattagttgaggaattttccccaagtggttgagagattctctcagttggttattaaatatttaattcaaacctaaatatcaaataaatatttataacaaaaatttaattatatatttattcaaataattaaatataatttaatttaaatatttatctaaataaactttttattagttttaatttatatatacaataaacttaaaaacagatacatatcatttttagaaagcgtaaaaagaattaatctaataaaatctttttccatcatcacttccaagatttcttgctcatgtgctaagaataaacaagaacagaatataaaatatatatcctaatagcccacactatttcttgtgtgtggtggaagattcagaagactatgtgttgtgatattttgcacacgcaagtgcacgtatcgtaataagtagtaaactcaccaagagtgaggtcgatcccacgaagattttagttaagtacgttaaaattaaacttttactt

SEQ ID NO: 317924 - DNA, 652 bp, Cannabis indica
aaccccaaaacatatcaaaaaaacacaaaattttaaatacatactaaaataggtcttgtgggttgtctgggtggttgtcgtggtatgtcacagtgatttttcaagggtagctatcatggttcgtcatcgcgaactgagctttgtgggagggcaacgttcaaaatgccagtgtgtctcctaggtggcagttcgagcttgcgagaaaagagagggtggtcgaatttttggaatgggtcaaggacagtgaactgttgggagtgtgagacttaaaaagagagtgggaagttagacaaaagtgagagttagagagaaagagagggtattttgaattgtaagggtattattgggtttaagggttttaggagaatagttaaggggcgtttggtacgaggtgttcaaaataatttgattataggaaatattatgaaggagaatatgattgtagggaaatgtgtaaattgtgtttggctgtgtagggtaatatgtactcataattctgttaaataaattacacagtttggttgagtagaggaatctttattttaaaaaattaaaataaagtgaaaagagttaattcatcaaagaaatatatttattaattagtaaatattaaagtttattgtattttttattaattaaaatgaacatttct

SEQ ID NO: 317925 - DNA, 822 bp, Cannabis indica
ggaaaacctaattactttcaacaaatgaaactaaaaattctaaccccataaaaacactaataggaattaacctaatgacagtaaaaaataaaagatcaaccaatcattcaaccaatcgttcactgtaaagcaacaaattgttgactgtaactcaagaaaacaataaactaaatcgaattgttcaacaaaataacaaaagaactaaatccaaccaataacacacgaaaacagaaactaaaaccaaccaatcgttcactctaactcatggaaatagcttgaaccaatcttttactctctttaatcaatgacacagaacaatggctcaaatcgcaggaaccttcacactgccgtcgttgacgtttgtaagagggaagaaactcaccactgtcgtctgcgattgggagatcgtgcaccgccggcgtctgcaaatgcggaagagcttacaccaccgttgtctgcgaatggagaggcaccgtcatcgtcaaatcgtctaggcggctgggatgaagcaaaggacgaaaccccactgtaatattacgattggaggcctttggactctgacggagttgtcgcggctagaagcgaaggagagagagagatttcaaccgtggatggccagaggtggtgatgcggccttggtctgaacgaagaagaagaaacgatagggagggagagaaacgagcggataattattattgttgtttattattctattcttaaaataataattgtctatcaatatctattttaaaattgatttattttattattttaattttattaaatcatttatcttattacatatttaatttaatttgataa

SEQ ID NO: 317926 - DNA, 806 bp, Cannabis indica
gtaggataattttttagtgacgtgtcattgccacgtgggcaaaattaggacttaatgaggctgaatagacggcaccttaaaaatgtaaacgaaacagtactttggagggttttcccaccaaaatatgaggttggatggttttttgtaagtaaattgatagttgagagggttttgccgcaaattactctatatatattagagaaattatcccacgtggggacataaattcaaatacattattatatgacttgttctctcattatagccaatgatgtacctttcatggctgttgacatagtcagagttattagattagacccacatttgaaacatttttcttgtcattttctctttgcttttctagtttaaatcttcatttaatgcaggagtttcgttttattttatataaaaaaggaaaatatgtatatatataatttaattaggtagaatatatatttatataaaatatgatatttatatgtatataatattaatcttagtgtaatggttaagttagattggctagagatgaaattcaaatctcaccaatcacattttttttttgcctcttattttacaaaaactatatatatatataatatcctcttcacttgaaattttactatttgtgtgtagtatctttatcagtgtcatattattattagtgtaattaagtatcgggctctatatatttaaaaaaaatagcttttaaaaaatatgactaattaatcagaagataccacttataaaaaatgttggataccacttatatccagggccggccctaaaacaaagtgggtcatagg

SEQ ID NO: 317927 - DNA, 782 bp, Cannabis indica
tctcttccagagacctctcgtaatagaagtgacgaagatgggagttgggacatggaggctagtgaagttaaacctaaaagtttctcccatgagaacaaggtggagaaactttcaaagcagaaaacatatatatgggctttttagtaatttatggattgcctatggaggtaaggctgctagcaatcacaccaagagattaaaagatggagaagaataaatggaatatccatcatccactgaagctttaaatgaggcgcaggtacgattctacagtgcatataattgttatgtataacattttgggtgatggcaaattgatcctcacaaataaaacaaatatcatatagagaacatgatagggtgtaatggaaattcccccaattcattaggattttttaggaatgtttgtattattttttctgggtttttttttattattattattcaagtttttctgggttttcttggtgatatgatttttgttgtcaatttgattttacagatagatgttggtgagtgatgaggttttcgaccgcatgtgatgttgctacaggttgaagtcggatctgagtaaaaaaaaaataagggaagatcaatagatgagtttgaattgggattagaaattttctaggttcggagcaatgcatgaatttaaatgaatatattaaatgtgtttaattttattttaagtatgtcatttaatttttttcataaattatgtttaattgtaatataatttttacattttttaatgattttttttttaattttaaaatgttttt

SEQ ID NO: 317928 - DNA, 1125 bp, Cannabis indica
tgaaattagttaggggctttgctaacttgagctaatttctgttagtgtactgagttggtagttagcaactgttgtaactaactcatttctgtttcagtgtataaaaggaaaacatgatttgttttccttctttaatcattctgattcaataaactcatttcttctctctctctttccttcttcttcctaaaaaaaagtgaacatgaaatacaagaatattaccgtactcatcaagaggagcttgatcgtagtaacttgttataacatatgcagagccagttctcccaaaatttgttccaccgtggtactatacaagaaagacatttgccaatattcttataattaataattaagttaaaatgacattaataatgtaaaagaaaagcataaaaatttgaatcactgaataataattaccgaatgacacaacaataaaaattctataatataattagtgtgtcataccatgtaataaattgatatagcttccattatttcttgcaataaaaagtatcacatgataagcaatatcctcagctgatcttatgtaagtttccccaccatatatttgcaagctgagatcaatgttatcaaataatactattaaattaaagggaaaaaaaaataatcacacaatttaaacgtaccttcaacaattttgtataacttgtgaaagaaatatatatatatttttttaatgcaatttttttaaaggtataggtggtatacaaagatgtccaattctctgtccaaagtgatggcttgtttggcgaatttggccctttgaaagtttctccacatttcattccattgcatgtattaatctatatatgcataattattaataatcaaatattgaaaagtcaactttttaatgtgtttatatataataaacaatctttaattcagcttcacattttaaatggaaaaaaacaactaaccacaggatctggggcatcactttgcttgcacatcacccatggcacaccagtctgaagatcaacagccatttttgctgcccaacgaacataggaggctcctttttcatgaaatgctgcttctacattctcatattcattctcaatctaacaattatatatgtacatattgttagacttttatttg

SEQ ID NO: 317929 - DNA, 1336 bp, Cannabis indica
aaataatttccaacaggtacctgtcgaacaccttgcagaacctagcatcaagagcaaagaaatagtggtgaccaatgaacaaagcacggattaaatggtcattaagtacataacaacaggagaactacctcaagaaaggaccatgtccaaaaggttacagtaccaagcgcatcggtatttaatgatcggcgatgttctttattgaagggggcagaacatgccatacttaaggtgtgtgtcggatcctgaagcaagacggattatgcaagaggtccatgagggattctgtggagaccacaccggaggccaaagcctctcaaagatgatattaagcaagagtatttttggcccacaacaaagaaagattgtatagactacgtccttaagtgtgattcatgccagtggtttgcaaatatcccaagggtcccctccaatggaattactatgatgactagcccctagccctttgaagtatagggaatagatctcattggctccctgcctatggtgaagggtggggtaaaatatgccatagtggtggtggattattacacaaagcggatggaggccgaacccatgaagatcataactgccaagaaagcttttgactttgtcataaaaaacattttatgctgatacgggctgcctcacaaaatagtctcaaacaatggaaaatcattcgactgtgataaagtcacaaatttctgtgaccaacactgagtcatcaaaagtttctctacaatcgcaaggccacaaataaatggacaaacaaaagctatcaataaaatatcaaaggtcaccctaaagaaaaagctattggcctgcaaaataattggcctgaggaactgccatgcgtgttatggggctaccagaccactacaagaacagcaacaaagacactctcgattctcaatggtgtacggatgtgaagcaatggtctcggttgtaactataatttcatcccacagaagagccacctatgatccggcaacaaatcaagtcctgctataggaagtgctagatatagtagatgagctctgggaagattctcaaatacgcatggcaccatactaaaagaaagaggcaaaatactttatttctaaggtcaaaaacaagaaatttttaattggtgatctagtcctaaggagggtcttcctggcctcccacaagccaggagtgggggtacttgggccaaattgggaaggcccatacgagattgacgatgaaataggctctgggacttatgaactcaaaagaatggacagatccatagtacctagagcgtggaatgctgaccatctccgcaagtactatcaatagttaggagttcagtaat

SEQ ID NO: 317930 - DNA, 909 bp, Cannabis indica
tttttttttgattttttacgaaattctacatagaaatccctattgcaactggcgctgcacctaaattataacaaaaaatcgtatagaaacccctaatataactagtcctgcaaccactttagaaacccaaactgtaaaatttaaaaaagaaaaattagaaaaaatagtatatgaggtaatccacttaaaattaattataatatatatttatatcaatgggacccatatttgaattgaatgaaagtaatgaattgctttatggaatgtttttggttttgagtttagggtatctacttcacaacaattttatagtgaagaatattcttatagggcattgtattattatattgaataatattgagattagattttatttatttatttataaattaattaattaattaaaatatctctttcggtgatttggggtgtttctttttttgactttgaaaaaaaaaaaaagaaaaaaaaaaacaacaacaataatttattagtgtgaaaagaaatagtaaataaaaaaaatggggtttcacaaatgataatgataattgataatgaaggatcatattattttaattattcactttttgttgttaatatcaaaaagttttctttgttttcttgactggtcttcttagacaggtgtttttttttacagtaattttaattattggttatagataaatatttaagtttaatttttaaaagtaataatatttaaagtaaatataaatagggcttaagtagaggcctagctcgttttatctcaaacacgatctcatgacatcattgaagcaaatgcgtttgtgtaaaaaatctagtcacttgatccttatcatctcgaaaaatgaccctaaaacctaacaaatccgacctatcacgtatagctgcatcaacatttaatttgaa

SEQ ID NO: 317931 - DNA, 3202 bp, Cannabis indica
ttcaacaatctctagaagaacttgcccaatctgcagtcccgtcatcccagacacgactcaacccttgtgatcctaagtaaccccaccaaaacaatgccggcctccctcctcgtcaaacaatgcagcattaatattcatcttgagtttctcataacctgattttgaccgaagctcagccccatccgaaagataccaagtatcaaacacaggaaataaaaacttctttcttgagcttttccccactgatcaagagtgatacgagccaaattaacaacaaactccacccgacctttcctatcattccacaagagttgatttcatgggaactaaatttcctaaaccaacatcactgcctgaacaattttttcctcacccagtcatgagaacaaatgaagaaactagtcccaaaacgaccctgcatcaactggaatcatagctaaacctgctacccccaacaattctgtgcaaaatcacaagcaactaaacagtgaaaaattaattcactggccccgtgacaaatcgaacacaataaagagacatccacatgtttagtctccaactgaactatcgtaggaagacacccactaaccaccctccatacacaatatttcgcctttgaagaagctttaattgccaaaacttcttttaaaacaccacaacctttgcgtccacactaccctcactgtttacctataataatttaaacacactcttaattgtatactcgctagaagattcaaacccccaataccagtaattctcggtaaccgaatcagaaagaggaatacgaccgccacttcctcatcaaataaatctttgacaatatcaacattccaagctttctcacccaccacaaaaagactaataacctttttcatcagccaaatgagaatccaaactaccttgactcgaaattgacccattcggaagccacgcggcatcaaataaaagagtctcctctccattactcattcccttccacgcccccttatgaatcaaatcctttaccgcaataagacttcttcaaatataaattggactattaccaagttctgcctacgtgccatcctctcccaactcatccacaaaattccttgacgagaattcgtagatgaattccaccaaaatttagccattagttgttccaaatcatgacacgttccagcaggcaaaaggaaaatgctcatagaaaaagttgcaagacttttagccacattacgatccaggaccttcttaccagcaagtgacaagagtataccactccaactttgtatatgcttcctcatcttctcttttaaaaagcttaatacaatagacttgtttcgaccgattgtacttgggagacccgtgtacatactattctcatcagcgtcgtttatattcaaaatagttcaaatagcctctcgaatagctccactcacattcctactaaaaaaagtagtagattttgccaaattaatcttttgtcctaacattctctcaaaacaatgtagaatctctatcactctttaagcccctcctgtgttagcttagataaaaagatagctatcattggcaaacaacatataaaaaatggcgaagcacccctagccacacgacacccctttattaattgattccgctcatactgacgaagtaatgccgaaaagccttcaacacaaatcaaaaacaaataaggagacaaagggtctccttgcctaatccctcaagaaggaataatgaactccatcctctaaccaccatgaacaacctcatacctcactgtggaaaaataacttgaaactagttgcacccaatgttgtaaaaaatcaagtttttaaagcataaacctaagataattctactccactctatcatatgctttactcatataaagttttaatgccattacccctctttcccagaaaccttatgcttcaaatagtgcataatgtcaaatgacaccatgatattatctaaaatcaatcgacccgatataaaagtactttgtgtgtcagagattacctatggcaccatgatattaaaaatttgattttaattcaacaaataataataaaaaaatagaatttatatgctaaatttaattatactatataattaaaaaaaatctatttttgattcaaatatatcaaattgttaacgtagattttgttaactaaataattagcctttactataaacttcagacttaattatataataattaataataagaacgacaataaatgacaatatttttatgtggttttgaagttaaatcttcatagtccacaagtccatcttatttaaatttgagagtttgtatacaggattcaataatactatttttgaggaatgaataaataacataatcacaatattatctatttttctaaaggttgggttgtcctttattccttggattgtgttcctatttgtaggagtctagggtgatagttattttcttgggatatgatcgttcgtaactgttcatgaaacgtggacatttcctacgtttcaattttgtacacatgagataattataaataatagcctaaccgatctttgtctttatctatatgctgactgtgcttagttgttcttgtcattcaaataaaatctttcttgaacatctttgtgggaaaatgtttaagtgttgagttatggtgcatctcacagccttccttaactgttgagtaaggtataagcgagaaggttacttcaacgcgttaagagtgaggtgagtgaatgttgaagttgttgtctttaatctctgaggatactcaagagtatgaaggtcaataagctgcaaactcattatctacctattccaaatagtttcattatgtattctatttatcctgagatggacctgtttacctcactggtctcatcagtcaatagttatttctcacgtctcactatgttctatatggtagtatgttttagtatttctattaactgtatttcctaaggcaagtcatttaagtacatttaataatgtgtaatttgagctggttcgtatcgtaactttgatgcacgtgtcaactttttattattgctcgaaatataggtataacgattgcccctaaaaagtactttttaaagtaaaaaatacttttaaaatgcctcaagggtaccatcgtattttctcaatttataatgtgcatgcttttattttggcagttcaaaacttcgaagcaaatcatttcaccacttaatg

SEQ ID NO: 317932 - DNA, 548 bp, Cannabis indica
aatgaagattgtgaaataggcccagcacacagcttgatcactcaacaaaatcctgccctatacaaaacactgtcgagtaaagactatgtaaagggtatattttcacgtgaggtttatggaagatcttacgttcaagaaatgaaattgtaagctaattaattatttgacaagttgcatggggtttaataaatcttaattacattactacttgtataagtaatgtttttattatttgtaataatttgttactatatagttaccaaatatactttggaaactatgtttgtttggttttgttatttcctttcgatatttgttttgtgctttgcgtgaggtttgtaattgtttccctttaatttggttttcaatgaattggggtgatctaagtcaattagctgttattctcaaaattaatatttaccttaaataatgtacttaatttaatagtatttgggaaatttagcttaacatccttaaatgtaaattattgtgacagtcagtagtcccgtgatccgtaaggggaaacaccgggtaagctgtgcaatccc

SEQ ID NO: 317933 - DNA, 669 bp, Cannabis indica
gtaatgctagcattagaatgctgattgtgtgaaggaaatatattttcataaaatatgacatcacgagaatgaaaaatgtcttgatactcaacaactaataaagtatatgctttcataccatgatgatagccaataaaaacacaagccttagctctaggatgaaactttggcacttagcatcaagagtagacgcataagcaagacatccaaaagccttaaggtgatcacaagtgggaggcctattgtgtaaaagcttaaaaggagatttcatcttaagcaacctagaagtagtacgattgataagataaactgcattattaacaatataacttcaataaggaaaggataaatgtgactgaaaaaaggagagcccaagccatattttaaatatgctgatgtttccattcaagtaccgaattttgttagggccaatcgacacatgagtgaaaatggtagacaccatgcgtagcaaaaaaaggagtaagattgaatttctttgcatttttggatcgaatggccctaatattcaaggaaattgagtggcagcaaacttaaaaaattgaggaataagaaaggaaacatgagacttgttagtgtgttatattatttattatataatataatgcttaagattaaaattatgatatgttatatatattattacatata

SEQ ID NO: 317934 - DNA, 916 bp, Cannabis indica
gataactaatcagattttaaagagttttatttagggcataaaacctaacacctagtccaagccttgccggccaaggccagcacccatacttgggagtggccggccagggtctacaaaataacacaggtctgactgacctccactatgcactctctcagagtatggtcagccagaccctatcacaccaaaatgtgcaacccctccaaggagggccagtcagtgaagtcccaatagcaaaaaatccttatgtgcagccacagttggacaaactcagggacatgattcaaggcatagcaggtctaaagccttcagatctttaactagaccggtcaaggggatcactattcttggcatacataaattccttgccctagcccaatttcaagatgtcggtatagaagatgtataccggaggcatggacccattggcacacatgaaatacttcgagatgcaacttgatctccagaaggttactagtgatgtgcgatgtcgcatattcccaaccacttttttggaaatagctcaacaatgctacttcaaactcaccccagaaagattcaactctttgaccgagttccctcgagaattttacacacaattctcgtcgttggggcttgtaccattgtagctagaagatcttgtaaaagtcaagtaacaacaaggagaacctttaaaggattacatccagacgttcatgacagaggctacctaagttaaaggcctacagaagagggtgatatacgacaatacagaggggcatactcccattgagtaacttctagaaggacatctgaaggatctcgaccaacaacatgaaggagttccttgatagagctgatggctttatcaaactcgaagaagcctgtaacgtccccgcttcaagcctccattcattcattgatttttaaccacata

SEQ ID NO: 317935 - DNA, 888 bp, Cannabis indica
taaatgtaaatttacactaattgctagcttgatttcctacactgagaagttcaagttacaatgcttaagtttggatgaatatcgttccaaactaagtcctcatctagccctaaagcttcctttgccatatgatgtgcatgagtgttacaatctcttggaagaaagtgtacagaaacattagggatataagacaagaaacttttgatatcctcaataacatcagcaagagcggaaagctccttctttgggctattaattttgctggccagctgcttggaatcagtgtatatattagcaagtggaattctaatgttgtagcaccaaattaaagccgatcctagagccatagcctctgccataatgggcgtagcttgtgctagtataggcaatgaaaaaccagctattaccttttcattccagtccttaaccactgctccaagcccaatcttactgtttcttatgttaatggcagcatctgtgtacaattggtaagatccttcactagattggttttgctttgccgtggcatgcgagtggcaagttgaagcaacatcaattctcttggactgtgaggtcttgtactctaacaagtaactgctggtccattgcactaattcctctgcatctaaatgaacattcttgaaaaagttttttgtttctatattctcaaatagtccacaaagtacacaacagaagtgaaaagttatcattatttaaagtagtaaaaccagacaaaataaattctctaacatctttatttctacgcataagataaaagtgatataaaggagaaagttttcaaacctgtctcgccctggaacaatctagtggtgcctgagttacagtttctaaaggacaactacaagaagagcaagaaggagagggaac

SEQ ID NO: 317936 - DNA, 962 bp, Cannabis indica
ataatattatataggaagaaaaaaccaattaataaatgaaaagtaaagttttagtgtgatatatatatagtgccccactaaatttgatgggtattataaacaatgctatgtataaaataggttttaaagttgggttggaatgaatttagtgctaaatctatgcaaatcatggctaattataaattatcattattttattgtgacttaaaagttcgtggcgaaaaagtattagtcacaaaaattacaatttgttgtgacgtctaaatgtattaaatattgtgattaaaactaaattagtgacaacttgtaactaaatactatgttttagtcacaagtaatttttgttgtgattaaaagtcacatttagtcacaaaaaatttatgttgtgactaaaaagttaacactaaaaataacagtttttggtagtgatgatacctgtggtgcttaatacctttatgagatgtaatatcactattggtttaatttaatatcaagctctacttattttaatttaataaagatttaagagaatagttaactaattttaagatgttatgtcataagtgctagacactttagtgccccataacaatactcttgattttattattattattattagtacactttttgtattttaataaaattctgctttatttgagtcaaattaaatttgggcgagatagtactaattatttgtctcggtggatcttaattaggagtgtttgctacgtgagtttgagtttaaattgaaaggagtaaaatgagagatatataaaactaaatgtataagggttaacattattattattttaatttaaaaaatggttaccattatttgaaaagacaaacttaattagtttaagtataaccccgtactaaaataacaaaattttcaacttaaattatttttcaaaaatttaattaaataaaaaattataagtatcttgaactaatcacct

SEQ ID NO: 317937 - DNA, 538 bp, Cannabis indica
acatacctatctttatatgcgtataaagctattaattcaaagtactaaataatattattatttagtagtaagtagttcaattgtgtaatgtgtagtgaatatgtatggttatggaattaattaacatagtagtacattattgagttatgatgatggttggagtacttggaccacaacttcaactgggcatatatataaatatatatatatatatatatatatttaattgattttgtgtattatttatgcaatgaaagaatcaaattttccagacaatatttgtactgctgtacatgagaatctgtccatataaatatgtttttacacttcaaagtaagtggtctttttccaatgacaatatttctcagctctaataaattaacccctcaattcaaacaccatatatgaactattaattagtctattattatttgagaatatgcttattgtttctcttggatttttcattgtgagttaagcttcgattatgtaaatatttttaattttatttgattttttaagagaaaataaataaaaa

SEQ ID NO: 317938 - DNA, 1937 bp, Cannabis indica
caagcgggttggggtctaccagcgttgaaacttttgtaactctatttttgccgcttaggtcggctaaggagaaaagacttgtaatattttgtaaaatgattttttttggggatcccgaaacatgtaacttttgtttgtaaggttaaaattattacaagtttattttcattccgttttcgtttaaagttttaatttccgcgcttattttaaaaccaatcccgtttagaggattagggtttcttaatcatattgggtagcgtgcctaaatcttagggcgttacacaacaggttcgcctgcagtggtagagtttgggcagccctcgggcagggtgtcaactatgtctggacggactatgtatgtccagttaaatggaaggtagcgtctcgaccccttcttcagttcccaaatgacgcaaccgtattcttgacattagatctggtcagggtaaaagtggtgttacacctcaagttctggggaaggcatgtgttcactactatcttcaaagctagagttagagaagttatcactggatgaggatggaatggcacagagacgaggatgatcctcgtacagaagttaaagcagattttggtcgatatggtgtttgcctccccaaaactcacaaggtttcatctacaaaacgtaggagacaagctgatgagaattggttggggcaacggataaaaaataggttgaatatactaaccaggtctgactaaggaatcaaaaatcagaaatttcactcataaatagaatttcccaccagaagttcaaaacttcaaattgaaatcttattctctctaaatccctaatggataatttaaaatggatatcgtggggataaaatcaaagcgcagttagaatcaaatgttgtggtaaagcataatcaagatttctaaatcttaaacctaggatttctatggttgtcctagaacaatttcaagaacagtcaagatttgcagccagaaatctagaaaattaagcatgcaagtgtataaaagaaagaaataatgaacttactctatggtttgaagctttttgttctgatggtgttggaaagagtttcttgggaattctttgaagaatttgagagagaaatcgcctaaaaatttcattgctctggtttttcaagaataaagatgactaaaaggattaattagggttttcaatcctattcataagcaacctaaaagaaagaagtaatcatttcaaaatttaaatgtctcgaattccctttaaaagtgtacgttatgtaatcattgctggtagagtaaccatcttcacgcgctggcattaagtcgcgataacgaggggaaattgtcaatcagcattaataacccaaaattgtagagacccttggttggggtcacgtcagttcttcattcgatgcctaggacacgcgtgacctgtccggacaagactccagatcgagtgaagtccacgtgcgaccaggaaggtcttgcacagacttagggggaaaatgttatccaattatcttcacattgacgtggcaaaaggaccgagcaacacgtgtcctatatttctgatacctaggcagaggtaaatgtcccaagcaccctgcacacaactcgtcagcatctataattgttgattactcaaatagagttgtcgtaaagacatccgaccaggtagaagcttgttatgccgagcatcttacaaaagataattacttcagaatgattttgttatgaccagacacgaagacaatccctataatcatgagattgaatctgagaaagatggcaacttgctttagttacctatttcatatatcgtaattatgtaatcattgtaatttcctattctatgcattgtaagaaaaagggaaaccatccctcatgcattaagcccctataaatagtgacctagctgttgggttttgtgccctaaataaaacccatttcaatataattag

SEQ ID NO: 317939 - DNA, 1093 bp, Cannabis indica
ttttaaaattagtaaaaaaatgtgtattttcaaatttggaatttttttttgggttcttggaataagtaggccctaagcacggtattcaggatcagatttaggcaccattaatgtccaataacaatcctaagcagtcaatcattgcaaaaacctaaaacaacaacctggttgaccttaacatggtagaactaggattattcattgtagagaatcaaaaataaggtaattttagacaaaatcctgcaaatttgacaataacaataaaatcgaattcagtgactctgctcgatgtagccttttatcatcttaaatatattttaagaaaattatcttcaactagtattccaataattgtgtcataataattaaagactctgctctaaccatcattacatgttaattaattaccatttaccaaaatcttaatagttcatatgatataatactttggaggcatggctgtctcagactctcagggctcttagagatttaatgggccgaaaatgaaaaattattgggataagttgaggaatacttttttttatatcattaattaaaaatacttttatattatattacattaaaatgtatctatttttatgagtaggttgttcaatgtactattattttttaccacataatttattttaacttgaagggtataatggtgacatcatctataaaagtgagtatatattaaaaaaaatagaaataaaggtaaaaattaaaacaagtaaaataaaatgagtatacaatataatttattagtcccttattaaagaaatgaaatatgtgatatttttaaaaattattataaaacatatatctttaaaatggattaagcaattgaactaggtggccttagctagcccatcttaatggaggactgggctctctcacacaattatgcgtacaaggttttctttgggaaatttacaaaatactagaatttgaggtaacttttacaaaaatactgtcacacggaaaagtttacaaaaatactgtgtttttataaaacactagtagaacacaaaacagaacaactcaaaacaccaataaaacaactaaaaaatatcagtgaaaacttaacaca

SEQ ID NO: 317940 - DNA, 1234 bp, Cannabis indica
agatcatttgatctaggatcaactaggcgatattgacttgaatagatattacggtaagtttaataaatctaagtcaaagttcaatatcggtcccttccgatgcatactccatgcatccaacctgagctttactttaaccaatgctctggaaagaacatagcacttctccaaatgcaagtaaactctgttgtagattatcatatcagtaaaaccctatgtctgataaatctaggaaactttattcacatagtcatgtttactttccaatgtgttgacggcacaataaacaggatcaagtatgtgaaaagggtttcagatgaatttatacattatgtacatataatcatgaaataaatcatgtgaaccatgcaacattaaatgttatttctgatctatattaataagtaaatctgattatattgaaatgagttttatttagggcataaaacccaacaaagacacccttgagtcaaaattctaacttatattgtaactatgcataaatactcccttaaacagagcaatgaaattcatataaaaatgaaattagatagagctagctgccactttcagtatttcattataaatccacacaaaactaaccttagagaaaaatgacccacaaagttctacagccatcttgttgcaacatagtcctatatatgtatcataacaatcatatcaaccatctactcattttgtaaatctacaaaaacttactgcacaaattgcaacatgaaagaattttcaatacaaaaacttacaaccattgagtgttatggtgtgttctcctttaagtggtagctagcttgttctaccagtttgtgaatcacataaattgcagcttcatggagaaagaaaaagggtcacaattacagtgagaaattaccattccaaataagcttcactgaaagagaattttacttcctagcttatccattaaaactgttgcaatgactgattcagaaaataagtaaaaactaattggtgaagagacattgaaacaattcaacacatgtaaatcttaaatctagaagcaacttaaaccttaaaaattttaggtaaatagtggcataagttcccaaagtttcaagtttgtaagtggcataatcccaatgtttatttttagcggcaaagtacccaatgtttataaaattgtaattttctctaattcgtcagtcgaactctgttatttcttaaataggcctacatataaggtccagattctagatca

SEQ ID NO: 317941 - DNA, 725 bp, Cannabis indica
ttttttaattttgtaagcatataaaatcaaatttcccattttaaaatatctaaattaaatcatcacttttaatcatgaacacattcaaagtcgtttattattaccgtatcttatttatgtagtcatcaatatatttaaagtcgatgtcaacataatatttcacttgtagttactattatattaaaaataattattatcatcgtatttacttgtactcactactacatataaatttattgattaaaatgttaattattttttcttttagtttctttactgaaattgtttaaaagaacgagtgggtatttttgttcttttaatttcaccttatttataaaagaaaatacttcttagtttcactagttaatcaatctcatcctgtgaatgaggacctagttaaggaagacaatgagtttttgataacctagtggtttcacaagagtctcaagtttgaattcctctcccctaatataaaaatatataatataaaaatcattggtaaaaaatatcaaactaagtcattggcaaaaataaatcacataacattaaatttcactaaacatataaatgtaaggacacgattttgtcccgtaatgtactttcatggaatgtatttcgtgatgttaggcagtcgttagataaggaacttatttgatctgagggctgggccgctggggttgatctaggggtaatttgagttaaaaatggtaacgtactctaagacc

SEQ ID NO: 317942 - DNA, 1166 bp, Cannabis indica
ttttttcttacttttagcttagcttttctttttttttttttccttaattaattttctttaagcctggctagttatttcgtagaaagattccaagttgccttagatacaggtcttataaggttattatcaatagagaaaatattctgtattttagttctttcttagtggactctttattttttagtcctttcttttcattcaaactttgatgggtacgtgtatctagcatttttatgaattaaattagcagagcttccatttacgtagattttaacattattatagaaacatcaaatatatcatatatgtatcaatcttttaagcattcaatatattgtttccgcccgagatatataaatatgaaaacattaaaaagagttgcagttgttaatatatgtaagtgatttttattttaacttacattaatatttattgattttaataaaatatgaattgactggataattttttgttatattagcccatattgttgatcttactaatactatattattgcccaaaaaactcttcatgcacaatgaaaaatgtcaaaacctcttagtctcattactgtgaaaagttccattcctgaatatttatttagtggtttgtcaaacaccacaaatgctaatgaattttttaaaattgtggaaaaactatatgacactggtaaaaatgtcaatgctaaacatcatatggacgaaataaaaatcattaagtatgatgagctaaaaggagtaggagatttgattataaaaattatgaatattcagtccaagttgaaatatcataatatttctcttcctaattcttacattatttatagtgctcttcatacattttccgcctctttttaaccttatcaagtcaacctacaacacttataattaaacatagagtgttaatgacctaatttctcagtgtatagctaaagaaagcaagctaaaaaagagaagaatgaatctacccactatgtttctcaaatcaagcccaacaaagtataagaaaaatatgaaaagaagcaagcacaactaggggctaagggatctcagggcaagtaagaaaataataaaaaaccgaaaaaagaaaataataaaaaaatgaaggaagtgggttctcccaccactgatcaaaatatttctctctctcaatctctctctctctct

SEQ ID NO: 317943 - DNA, 1230 bp, Cannabis indica
ttaaaaaaaaaaattatgtgagaaaaattcaaaaaaaatattaagtaagatatcaacattgttgtcttttgtactcagttgacagaatctaacttttataatatttgaatgtgtgttaatattttataataaaataatacaaagatattttattaaagtttataacaaaagagatatactcaacaatatttacaaaaagattttaagttatattttaaaaaaaacaatctgtaaagttttaaattaattcacttttatttatttatttatttatttgagaaaggaatttcactaaacaacattaccgattacaagaaaatgacaagtctcgctcaattgcgtgacgagtataaggtggagaaaccccaatccacatagcactaacttataaattaaatagttaatttattattataaactaatttataaaatcacactgcctttacaagttagcgcattacaactaagttacctcttacaactaatgaaccaagacctttttgagagaagatcaagcatgagtaccagaccaagtagtttaacaaagtggagagttcccctgggcggcataacacaccccaagctcaaacttgggctgcattccgcccaaatgttagaagaggtatccaactacattttgatccaacatggcaactcttgtgtggggtacaatgcctagcaaggaagtgaaggacggcacaacaccatcccaggagcacaaggactccctgggcagcaccccgcacaggtgcgaagaccaaatcaacatattcatttaatgttgaatgtcttcaaaagaatctccgtacaaatttagaaattgattgggaacacgaaatcagaagtgttattgttgtgttggaactttgtgaaatgttaaaaaatgatgtgtgtgagtaggagtcccacttgggatagaaacacttcatttgaagtgtataactagtgcaagtttgagatatgggtttgggccccaaggggtacccagtttcgcgctcatgggtgaggactcacacaccggaccaccacacacgcgtgtgtgtgccgccgtccccgccgtccgaccgaccgtgccgagccgagcgggcgggtgtggtgtcaccttattttttggagagaatttatttcttaaattattatttatttaattaattaaaacagttttcttttttaaataaaaacgtgtttgattaattaataaacagagatgcttcctgatttatagcatct

SEQ ID NO: 317944 - DNA, 780 bp, Cannabis indica
ttgattccataagtgttctatcatcttattcgttacaaattctttctttacatgatagtactgaatttcagaggcatagatatgttatcaaggctggttataaaatgttcaatactccaaaaccgactacctattggagtaaagaggtctggtcccgaatgaacacacctaaacacagtataactctctggctcgtgatgttaaacaagctgaagactaaggaacgattgatcaaaatgggtatcatggtgcaggagaagtgtagcctatgtgaagaacaagctgagaacattcagcatcttttcttttcaagtagggaaaccggtcactgcttgaaggagataaaggagtggctgcgatggaatgctctagcctctaatgtacaacagcttgtcaaatggataggtagagcaaaaatttcaaaatttaagaaggatgtatactgtgttgctactgctgatatggtttattgtgcctggaaaatgaggaattctgttatatggcagggtgcaaagatagacaccaaccgattagttgaggaggtgaaatggaatgtaaagacacgggtccaattcctgttcccaaagaaactctcaagtgtagataaagagtggttttttgctttatagatagaattcattgtaaaaacatagatggaaatgatggaaagataaaattgtataaattgaggcccttgtagtggggtgctcttaggatgtaaatatgtttgtgcaatacaactcattgatttatcaaaaaaaaaaattcacggtaccttgt

SEQ ID NO: 317945 - DNA, 1208 bp, Cannabis indica
acaaatagaagtggggagaaaagatcgaggttagggtcatttaagcaaggaaattacagacaagttaacgattacacaataggtatggataatgaagacaaagtttaccttggattcgatgagttcatcctcgaaggtgacgttaggatcctgtggggtctttgacttacgaggcttagtagacattatatcaaactcaaggtcacctagtgaaaaagtagcagtgacctcaggtaaaaacattggtctcgcgagtggaaaagaagataataagggaggttcaggccaggctgcgtctcgcaaaaaatggtatttaccctcaggaattctcttgcaaaaatcacctatggcgactagcaacttcgtcttgattggtttttattatatggtccctaatctttgcatcatttacttcaagtaaggatcgaggtttctgggttttaggtttgaatggaaggaaaaatttcttgggacactctgtttctaaaaattctagagaataaatttcagaaccaaattgggacatttctattaaaagagcaatcccaattccttgaagaaatttattaaaaccagaaatttataaatatggtaaacctaagtcttactccatctaaaccctaaaagttaaccagaaaaataaaaaaatttaccagaacccaacaaagaaaaacaatgatgcaattggttatgactaaaaatatgccaagaaggaagagaatgaatacttactggttaaggaagtatgcatgtgcaggggagatctctgtatctgggtttgagacgagcgggggggtgaaatacgttcaagattggagatcgaatctaagaaaattcgcaaaaaatatgttaacgacaatgagggcatgcaaagcttcagaaagtcgggatgagaatttctcagaaaagcttaaaattttttgaaaagatgaaaatggaggaaaggtggtatctttctattgttttataccttgggcttgatctctgttagattataggaaagaagatccaacagttataaatgggagagaagtggaaaagatggctcattaatgctaatgatgtgcctcgaaaccataaaatcgccaaattcaaaggcatgcaaattttcaaattagattatgacagatatacccacggtaatcatttaaaaagtactttatataaaaagaaaaaggaatttttaaggggcaattgttataccaaaa

SEQ ID NO: 317946 - DNA, 1314 bp, Cannabis indica
taagatcctggtaaaatgatttccaacacgtgcgatgccacgtcagagtgcaaaaattgggataacagaagggtaaaaactttttgtagatcacagcttacactttacacgtgttgtcattctattaactcaaaaattgaacgcgcctttcagaaagcgcgtctggcctgggataccgcaatgacgactatctaatgcaaacgcagatattgagggtaataataataatgagaaaatgcctcgaatattgtagagtatattttatgtagcctttcagtttcccatctgttggattgacattatgttttttcaaataagttctaggcctttaattcaaaagcatgtggatcaacatcccataatataaattcaagaaggggagacccttttattacttttattttttgccatttcaaattcaggccttaagagaaaaattagaaagaagaccaggatctagatttactaacaagtatgttgaattaacatcttaaatatgaatatctctaaaataatgaaactaaacacataggagtttagaaaaccttacattggttgcaacagaatataatgactccttctgctcagataacccttgtttcttactatcgcagagtattatcaaaatctgagcctggatctctttctttccttcccgtttggttaccactgtcttactcacgatgattgagtacttgaattgctatgtgtgggcatggcactctatcactaagggtttggatatgaagaaaaatgaaggaggcttgaaaactgtatagaaggtgtctctcatctacaagctgtcagataaagaaaactagatttttgcaagttgaaaattaagtgttcaggtggatcagatgagagcatcatgttccttatatagtgtttcaacaaggggttagggctaaattatatggattaaaaaagaataaaatattgggcaaaaataattctaaggccggccacataaaaggaccattctgtagttacaattttgtaacttttatttcaaccacttattcttctttcaataataccatatttttcaattcaatcctaaaaatgacaaaactatttatttaataattataattaattatcaaacaaaattgtcatttatattatttattaattagaccatataaagtctcttaattaataaattgaccccaaaaccttttcttcttcacgattaagcccttgcatagtgaaaattcataaataagacagtctaattttagaattataattgaataaaattaaaatcaatgaactgagtctacacgcactattatctcaactagtgagggg

SEQ ID NO: 317947 - DNA, 821 bp, Cannabis indica
cttagagagtatgtgcacagctgatgtagctgggaatcaccttggtagggtgatgtgggttcacacgtctcggatgcattgtgcggagaagctgcgacttgctgtttggcagtttcgttggatttagatttaggttataagtatgttattgtggagagtgactcgagactaactattaatgctctcaatgggaatgagttcctgctaagtaggattataatcctgctaacttaatttagcacaaataataaaattttactataagtgaataaataaacgtaatttattaattacgaaaatttatttgaaatatatgaatataatataagttatttgtgaaataaaaatattttcaagtttggtaatcctgaagactcaataaatggataaataaacttaatttgataattacagaaatttatttaaaatatgtgaatttaatataagttatttgtgagataaaaatatttttaggtagaacttgttgacacatcataaaggtgctagacaacaccataatacctcatagcaatgctacaatttcaagtttgatgaaatattatcaaagattggcaaaaatataaaatttggatccatacaatcagggctggccttgagttgaaataagccataggcaaaaaaaaattttggcatttacgataaagataaatggtatttttaaaaattattaaaatatatatattttttaaagaggaaattagactctatatcctttttatattgtactctttttatattgtacttttactcctttttttaaacattgtaccaattttgcccctgtcacttcaagatattct

SEQ ID NO: 317948 - DNA, 718 bp, Cannabis indica
ctttgtcttcatcatctccaccccaacaccgattacaccttcaacctgaccccctactcccagccccattcttatcaaccagccaccaaactcacccaccctcttgatctctcagcctcaccatctcaatcttaagcatccacctccttcgctgaaaccaccccaagccaccagttccacctctaccattcctaagcatctaagcccaatgattctctctccacctacgtctcatccctctcaccttcgacctgaaaccaaagctctgccgtctctctcagtcactcaagaaatcgccctctcctcttccgtcgaccacgccccgagatgccaccgccacccaaacccaactcatcccagtatcctccattccatccatgcttaggcatatctccgcttcctcaatttttctgctgttaccatacatatatatatttaaaaaaaaaaagtaaattaggggcaattttttcagcaagggggctttgaaatcggtagaatgtttgtgtctttgtgatagcgagtcaatggaggtggctacaacgaagaaccaccaaatccctaaaatggggttttgttggttgctctattcttccatggagctaaagtattaagaaaatgtgtacaatggagtagaaaggctctatttttcaatacaatttggtggttggttggcaagatggggggctgggagtgggtactcaggtttggggaagagatg

SEQ ID NO: 317949 - DNA, 1717 bp, Cannabis indica
ttataaaaaaaattaattaattcggtttgatattattttttctgccaaaaaaattgagtttaagagaaacaagttggtacggttccaattaaagagcatataaaatcattcaagcgatccgatatcagaagaatttttgaaaataaatatctatataaaaataatttaaattaattttagaaaataataataataataattaaaaaataaaaattaataatttttaattattaatattatttatttttaaattaaatatattattaaatattattataatatgtataaagttttaattgtatacaagcagtcctatagtaagagtatataccttacttcataataaccacaagatctaaaatacaacggttagaaaaaaagttccctaccggtagggaacttttgctaggtcctaccatagtattaccctatatatatatttaaacaagtttttaatccatcaaaaagtatgcacactaattcataaacgagaaagattaaacatattcttgaaaaattggacgacaaacttatagaaaccttgaacatggatcaaaattaatgaaattgtatcaattgaaaaggaaaaagtagatactatgacaacaaatacaaaaagatttggcgaaataatctaatcaactatcatcgtcaacacgacacgcatattcacacaaactaaaacataaaaaacacaaacaaaaaaatatgcttcaactaatcaagtatttatttacaacgaataattaaacttagtatttatgacgcaaattacatttcttttatcctataaagataaatgttctatctcaggcctcagcttgaaatagatccaaaaactaaaaaggactttgaaatatatataaacaattatggactttaatagaagaatttatctacagcttctcaaaagctattcttagcttggcgtatgacacccaaagcttctgcatcatttgtcgtggaaggaatgtttaatatctgcatgatctctttactcgaagttggaagaagtggattacatgccttctctagtttgaaggtagttagatacataagcaagctcttgttgcaaagatgagctacatgtgttgcataagattggagtgcctcgttctcaggctctatagacaatgcgaactttgaattactcaatgtatatttatggccacagtatacatttgtgtcatctggcaaagacgtaatctttctaatggatgacaacatctgtttaaaggttccttcaaacaatttgccacatgataaactgaacaatgtatctccaatgaaaattgccccaaatccaggttagtagaagctaatatgacatcatgtataaccaggagtctccataacatgcacctcatggcttgcaaacatccactcatccccatcatccaaaacaatatcaatgcctggaattttgtttttgtctatcgcagagccaatcacctttgcaccataccttgctttcaactccacgttaccatcgatatgaccgtgatgatgttgatgtaggattttactgctttaaccctacaccaacaaaggcttaatatcagtgtcaaaggtcaaaaacgacctttacctgtctaatttaatcttagactaaaacggcatcgtttagggcacacgacaccaaatctagtgtcgttcaaaggctttggtttaaagactcagtagaagagtctagaaaccctaaacaccaaacacaaca

SEQ ID NO: 317950 - DNA, 951 bp, Cannabis indica
gactcagcgtcgttggctaaaagcgaggtcaatattttagtgctttcattgaaagcaaaagaaaccaattgttgttttgattctcttcaaaacacacaaagatggttgtgactacaaggaggggaaatcccactaaaataactaatcccatggctacagatcctatttcgtagactccagagaatcgaagagacccagtgagaatggatcctaatccaaccattcctcagcctccatggggtccctactcaacaggttggatgacataccaaggatggtgccacccgtccaggtttccaagtgacacgtgttggaggtccaccaacgtgagggtcttaggaagacattggtgatgataattaattataaaatttgcaagaggccctgggttgggtgcaacatcagaccaacacccttcaccatgactaagaggacacccaagcagttgtgaatctgacacttgagtagcaaaagtgccaattgacaaccatttcagataggcaaccgaattgataactcaagcatattggctaactgggcggtaaccagttgatgacaccccactcatacgggatccaaaaagggggaaagatccatataacccaagcagatcgcaatatgagccaaaggaacgtctgacctgttgggaatattttactagaatctagatttactaacaagtatgttgattaaaatcctaaatatggttatctgtaaaataatgacattaaacacataaaagttcagaaaaccttacaatggtttcagcaaaatataatgactcattcgctcagatctctaacccttgttcctttctatcgcagagtattatcaagatctgagcatggatctctttctctccttcgggtttggttacccccatcttactcactatgattgagtacatgacttgctatgtgtgggcatgacactctatcactataggctcga

SEQ ID NO: 317951 - DNA, 565 bp, Cannabis indica
tttctttgttgctgctttaatggcaatttcttcttcaacaatagcacccttaaacaaaccaagaaaaaatcagtttcgtccaaaaaaattcataaaggaataaatgaataaacaacaaaaaccagattcaatagaaacatagaacatactttagatttacggggatatttcctcgtttgaactttatagtgttttcttcttcaacagaagcatcctaataaaaaaatttaaaactaggtttcatgagaatcaataaaaagaaatcaaaataaaacttaagattaaaaaccaattttattaaaaacataaaacatactttagcttgccgtgaagattttctcggtccacctttagccttgatagaagaacaaaggaaacttttgattttaatttactttccatttgatagagaatcaaagtacaaaaaaaatattagacacaaagaacttatcaatcatgataacaaacataaaaaccagtttcacaaaaaaccgaaacaaatcaaaccaacaaaactaaaacataacacatgatttgggcaaaaaacaaaatgataaaataacaa

SEQ ID NO: 317952 - DNA, 1262 bp, Cannabis indica
acttcatattatcaattacagacgaaataagatgtttgtaacgttcgtgctttcaagttttttattggcctttttatacttatggaataatgacttttatacacgagtacgtcactctagctgctttatggattgacgactggccttacagaccaacacgagtgtttccaatgtgctttatccgcaggaggtcacccatcctgaaattacccccaggttaagcacgcttaactcttgagttctttcgtgataggctactgaaaaataagatgcaccttgttgatataggtaataccaatcaatctatttaagctctattcaactgtgtagtccatcccatacctacacagtctcaaaatcataccacttgaccttccctaagcggtgtgggattgcacagcttacctaatatttctccttacgaatcacgggattactgactagttaaagacaatgagttgattttcaatatggatagttatctcgttatgtactgtaattataacggtatataaatatatcggtagattaatgagtgagtgatcgtatattactttgttttcccaaactaattaaggttgatataataaaatagttgataagataggaagggtaggtagtaaggtatatgaagcttaaggtaaaattaaattttggggctcttatatatagtttatttattatcaatatgtatttttgatatgttttagtgtattaatggtaatgcttttaaaaactcttaagagctctaaggttcaattcttcatatctacgcattaaatagtttttaaaaaaatagagaagtggagaggttgaggattgatctttacctcgcttaaaataagactctttaccactataccaaacaatatttattatatttttttcttatttaatattttatctatacattaataatatttttttaacaatttcaggaccctgaacgtctcggggtccaagacgtacgcctagctcgcttaccctcaggacctgtcctggagataggcatggtttgcaatatagaatgagtttattattacatcatattatttaattatagagaaaaatgtgttaaatattaattaattagctatatggaaaacattaggagtttttatttttacacttaaaaataatttttggaaataaattttacacattctatatagagaattcctttagcgcttagagatatggggtaaaaatattaataagcttttggataaagatgtaataccttgttcaagtcatggtgatcc

SEQ ID NO: 317953 - DNA, 1467 bp, Cannabis indica
tcttgggctgatcgtgtagggtttaatggaccctatttttgtggtttctttattgttgttttacgaataaaataaataaaagttttttttttgtttccttttttagttgcaaataattttttttaataaaaaaatgggtaacctcttggctgatcgtgtgagttgcatactcgggacttggtttcctttttggttcaaattgaaaaaggaaacgcctttatggtatttttcttttcaaaaatggtaagtcttgtcttataaattattctcacctacttctttttcccacacaatttctattctcttcttcttcattgtgtttctatcacaaaatcgtgtgtgagtgtggttgaggatcatcgtccaaggcccctgctgcatctcaagtctgaccagcactatctcctttggttttaatttcgaccaccccgccacctgcaatagctccaatggcatctattggtcgcaccaccaagattaaggctcgaaagaaagttttttctctctccaaaaaatatcccatggtatttcatgatatctcctttgatcttggagtcgatgcaccaccatctaaagtggtggttccatctcgagtcgaaaatgttggcactttttcgattgaaccatcggtgatggctagggtaaaagcgaaatttcaatcatcttcttcaaaggttgttgttgctgctgcagatcttctcatattgcccttgcagccaagtcgatcaaaaaaaattcaaagctcctaaaaaggtttgttctttctttcctatacacacgatggtgtttcctactatctcagcagcctttgtcgatattgcttttccatctgtagtggtggttccctctccggccacgaaaggttcatctcgcattgctgtttttttttgttttactaagaccactagtatttttttgtcttggtcctattgtctttctttgtttttttactccacatgtttactttgcatattaattggaatttttttatttaatattctaatatgtttctctttccttatcattttttgtcttgattttttttatataaaaaggaccattctttaaagaatttgtttactaatttcttcttcttctctcgtgatacattattttaattttgattcatttgtttcttctctaagtttattcaggaacaatggtgatgagttgtacttgtgttggttccttttctttccacatgatggtatttaaatagataaatgtgatattgaaataaattaattagataaatagtaaaataagaaaaagaaataaatgtttctttaaatgaatcaaaatagaaaaaaattgaagtccttgggcttaaggagatttcggccgggataagttgaaaaataccacttttattaatcaattaatcaaatttacctttaattttatatttaattgaaacatacttcttttatatgtattgtacccaaaataccctaacataagagagtc

SEQ ID NO: 317954 - DNA, 1324 bp, Cannabis indica
taactaagtattatcactaacaatatcgtctaacaattctaaatatttaattataattggatcttaatgaattgtaactaatacaacttattgcaactaggaacagagtaggtctcacatatcataggggccaggatgcattatatatatataaatttatatatacatatatttcaatgcacggtcataaataattattaaaaaataatatgttttgtatatttcaattattattatgtaagagtcgatattaaatagtacttataaataaattaaaaaaaattacatactaatggcaaaaattaacaaaatatttacaaagtcgtaaatataaataatcaactgtcctacttgtgtaattgtgtccatctaagtcccccactactaataggggtattccatatgagtggtgtctctaattttgtccttttaaaatttaatgaaaatttataaaattatttaataaaaaataaaattaaacttactatttcaaaaatctatgactacccacatgtaaattacaaaaattatatttatactatacttattgcattcaatttaagaacacgttgtgattattagcacattaaaaaaattaagtaaaaaaattaagaaaacataacataatttttctgataaattatacaatatttcttaataataaaccataaagtttatgtaattaatttttatatcattattaagaaaaaagaatagttaataattttttttaaaaaaaaaagactcacaacttaatggggcaatatccaatccaatttaactgaattgaacctcaactaagaaaattgaatatctaattacaattgaatttgtttggatattaaaagttgaattataattagatttgatcagttattaaatatactaaccttaaaatctaataaaaaaccgatctaatctaattatatttatacatattaaaaaacttatttatatttatatatgtatataataataataataatatgtttagcattagtttattcattatataaatttattttcaaattataaagttatggatgctttttctctaaaatttatactatttttaaaactgaaaaaaaaaaaatgttattcaatatggtatgtaaaacaaacatgtataattagttaaaagccgaatgcatattataagtccaatatatcattcctcagtctttcacaaccatgatactgagactactttctcccttttattttgagttcaatttttcagtaaatttttctcttaatttttagtctatataattttaagttttcccattttattttgtttagacttatatgtaagtttcatcaa

SEQ ID NO: 317955 - DNA, 881 bp, Cannabis indica
attattattaatattatataattattaatattattatattatataatattatttttaaattaatatttttttaatttttaaatagtattagcggcggggtcccgccgctaatgctctttgccaattgctaagttcaaaactggcagagggcattagcggcaggactccgccgttaatactattattagcggcggacactaattccgccgctaataatagtattagcggctatttattagcagcagacttttagcgggggatttccaccgtcaatagcctattgcgaccgaatcaggggttattagcggcggagtggtccgccgtaaaattcatgtgtttattgtgtttggttaattctattttgctattgactatttgttgctgtcacatcccttgcacaattctaactggttcgttgtgaaattcttgtgttgaatgttcttgctgaggtgttgttttcactacatggctcttgggtcatgagtaagtgagacaaacaaagagctagcaaaaactaatttaactagttaaatccatttgtttattccaatctaagcatagtactatacatgtgtttgcttctatgggtttgagggttccaagaaggagatgatttcatttatttccccaaaagagatgaaccgtagaattaaatcaattaaataaagtaattaaagtaaaagtaatgaaaaaaatctcccacacttgtttcacaaaaaaattcagtatactctattttcttaaagatgtgagtgggttcaatttattttcctagtacagggaccaaacaaacactgctacactagaattccctatatatatacatatggaagaggtttcaatggttacatttttattgtaaccatcatagttacattttt

SEQ ID NO: 317956 - DNA, 1967 bp, Cannabis indica
ttgcatcccagtttataagctttttccatttttggtgagcataccctttcatcattacttaataagacaatcttttcttgtaatttcaatagtcaccaaagaagactatttgactttacttatttatttctttgttgttttcaatcccctattgggctagaactggaaaaaggccttaagacaacttacagattgaccattcggtcagatataaaagtattctccatcattaccatatcatcatgaataattcagctaatctcctttaccttagtgataccactactctccctaatgttctgttatacatcacccttgtaatgtcattgcttcaagcctccattgggcattctccccacgaactattggcttttatatataggtacgccactctggccacttcctggattgataactgacccttcaggccaattcgagtgttcctaacgtactttgctctaactcgcacgtttcttagaaaaacttcttgaaatgaaatcaccccaggtcgagaacacctaatcgtaaatttctttcacaataggataccaaaaacaagatacactttgctattataagcggtctcaatctacccattcaagtcatctacaactatgtagcctcatacctacaaagtctcaagatcatcatatacgaccttcccccaggggatatgggattgtacagctcctagtattttccttgtagatcgcggggttctaactgttacagtttaactcatgtcccttttgatcttattttcttctttgttatgaataggtcaactcacaaaatcattgccttcaattcacctagaattccgggcgatactcataaattatcccacctttactaatactagattacttttagataaaaatattctttactctgaatcaattaaatggatgtctccattggttactcatgtcttatattccacttaggaataccagcaaatttaactcatattgttatttccctaatttgtctaccccgtcagatgagttaccattacctaacatacatgcacagcccattcatatcttttgatgttccctcattgaacatacaatatttaatatcgatgtcaattgaaatagcaattataatattgcccataaaattctaacttgagtcggtcgaaggaccgatacctgagtctccttgagccataactgacacttgggcaagacccgtacacttttcttctttaacgtcaatctttcttaactgcagacatgttcttttcaaatgacccgctacaccacaataacaagatctggctctacattaacccaactggtgccttttttgcatcttgaacactcaggataaggtttccatttcttattcttaccttgaccgctatcctggtcaccttggaaccttttgttctgtcctataattggaagttcatttagttttcacttcttgatctgctcgtaagttggcttcacatatttcaccacatctaatggtacaacaagaagtgtcgatagtacaagaatagatacaagacgagcccgttgttctctcagatctcggatttattttcccttgttgtctaatcatatcctgcatagaaaaatttacatattcccagtattacggcaataaaggattctcttccttaccatttgctccgagcctagacagctcactgattaggcaatttgattgcccttattgcataacttgtcacacatttaattcacatcttccaaggatttagaattgagacggatatcaatatcaatatgcatatatcatacacatattcttatcataatcatcactatactacttttcccaacatactttataatagtctaggcaggtaatctaatagcaaacaatataaatacttactataccatgagttgacttttcttcacaacaaatgtacatattcgaccagtcttaacgacctttaaaaccatggctgctctgatacaaagttgtaa

SEQ ID NO: 317957 - DNA, 1297 bp, Cannabis indica
ataaatatatttttatttttttcagaaatatattacctattatactatatacactattttgatattataagattttattatttctattattaatgtaataatttatttaacttttaaaaaataaatgctttccaaaaaacttttaaaaataaatgatcattttagctgtcattaactcaaaaaggaaaagagaaaaaaaaactgaaagtatgaagttgtaacaacaaattccatgaaaaaaataatgtagcagtacaaaaagttaaatcaagttgtcaaaataaagtaaaaaaaatcgtaatacaaaaacatattgaggagttgttattgttttgtatattgcaattaggtcattgttttgttatttttctgttgttttgcagttatcattttgttgttttatagttgttttcatgttatttgctaagttattttagagttagtttttagttgtttttttaaaaaaatttattttgctaaaacacatatttttgaaaacttaatacagtaaaaatgtatataaaagtgatgaaaaataagtatttttgtaaaattcccttagtagtatgagagctcatatatgttatcctatcttaaattataccaaatatctttttgtcacatcatgtcgtattacactctacaaatagcactaataaaaagaaaaagaacattgttatcgtgcaccttaaggtgcctaacacctcacctagggtcggccctaggctaaggtgggctaggcctgtgcctagggcctacctatcttagggacccaaataaaaaaaatatcttttaaaatatatatattttgtaataatttttaaaaataccatttattattataataagggctcaattttttttccttttcctaaggcccatttcaacttaagaccggccctgatcacaccgatgtggaacattgtgtgattggttagtgatttttttatattatttattaaattaaaatatgtgggacttgatattaaattacaccaataatattatggcttttttctttttttttttatgtttagtagcttaaagtgtcccttaacattattgaatgaaaaagtctctacaaatagcaaaaatctcctaaaataaaccagacaagttcatcaatggaccatagagtatctaacatcacatcacatgtgcttacaaggaatttgtgaaaatttaatattaggtctcgtacatacttttatattaaattatttaaatttatatttgagatctaaattttaatatattttttttttttgtaagaaatctaaattttaaatttaaatca

SEQ ID NO: 317958 - DNA, 2428 bp, Cannabis indica
gcctacaatctcttgcgtagtgcccagattttccacacacaaaacaatgacatctcacttatttaaattggttatgtcttttcttggacccaaatattttcaccactcttatcattgtgtttgcctttatgatgcttatttgagactgcattggccttagaaatctcatctttaggttccttcatatttctcttatctctcaatctcgatttctcttcgattcagatatgtttttgaatctcttccaacgaataattctcatttttatggaaaattcttttcctatagctcttccaagttggtgccaactttgccacaattgccacaagccgcgatttctcaagtcgcatacgttgctacaattaagctaaaagaacggataaaattgttctttatttattctttaaacatttatcttaatttaattctgtaatttattgtaatatcgatccaacttgaccgggagtgtaattccaaaggacacatgctttctatataaaggggtgatccaaattaaataaattaagttgaaactattatcaaaagtggactaagcaaacaaaaacctaactgaaccactataattctcttgtcttctctatattttgttttcttttttgtctatttcgtaggttatactttgagtacttgctattctaggtgagtactattataactgctagtgagtgttcttgttgtgcttgaatactctcattatctggtgttcttccaacaatattttatttttctgggtgtatattatatatttataattaatgaatttaaatttttgttgaagaaactatgagacctcaagttaatatttttttactgattggaccaatatgtatgtatatgtacttatgatattaattttttatgagctaataaaatacttttttttttctaatgtttatttattatttagttattcattatgttaaagtacttgaaaataaataaataatgaatttataagagaacgattatgtataaaattgagtagttaataattattctttgatttgttttatgtacactgcagacctaattaggatagaaaactacaagtaacttacgataatgataacaacttttaatgtaatgacaattacaagtgagatacggtgataagaatggttttagaatcaagtgataatttttccatagatttatcaattatttttttagatctctataatttatgtaaggattcttcaattttttaaaattttattcactataatattagacgatatatctttgtttgtttttttagataaaaaattgaacgaatatttttttgcttttttagagttttttattaatatgtatatatataaaaaaatttctaatttgattgattcttgtaatatgcatattttgagcaattaatatggtaatgacacgtattaaaaagttgaccagctcatcttatagagcaataaatgcgttcaataaacttgtctcagaaaatacaattattaaaaatatttgagctcattcttttaaagataagcaagccatgaataataactattggtttatgagaccagcgagataaataatcaatgtagaaggtctatctcgagatacacataatacccaacaaaaagtatgtttgaaaatggtagataataaattctttaaaaagcttgcagctcattgactcacatactcgtgagtatattgaaagactaagggaagcactcccagtatgattatctcggaattgtcacactatgatagtatctcgcgttttcttctctcatttatagaaggacgcgaggggtactatccaaacaatacataagcgcagagggccaccttcaaaataaaacaacttaagaagatcgtttacattgcgagatgaagaagcacagtcaaaataactatttatggatgaagacaagaaccgattatgcagttattatattattatcccatgcgatgtaaatatgaaacgtgaaatttgtccacgtttcatgaacgattacaaggataagaactcaaggaaataactatcaccttaaaactcctataaatagagacagaacctagagaacatgagacatccaatttgaaaaagagtaagaatcatacaaatcttttttgtattttgtatacgctttagtttatagaaaccataataagatagactcgtggagtatgaaaaattaatttcaaaactacattaaaaattttcttgccatttattactattgttatttatttaattttaaagttcatttattactttaaattttatttattatttaacaaaatcgtgttaattttttctaattttgtgtaaaattagattattattaagtgacgatatataattatgattgaaattataaaattttattttaattatattagtattttaataataatagttattttgaaattatataataaaatt

SEQ ID NO: 317959 - DNA, 925 bp, Cannabis indica
aattcaatataatgaattaagcaataaaacagaaaagagcaacactagatttaacgagttcgagccatgcgcaatgctctacatatcagttggaacagcaacaaccatatctttattgatattagtgtttacaagattacaagaatcttcacaaacttcctagagattacaagaagaagtttatctctctagtttagactctaccttacactatcacgattttcactcaagcaaatatggtctgattcacacccaaattacaaagatttacagctatttatagatttacattcttgcaaaaaatatctcctaaatcattgtggcacatttacactgccttaaatgatccaacttatcaccaacaacattaatccatgtcatcttaaaaaatgcgctttcaacacggacaatctggaagagtattgcaaacacacaagccttccggatacgtacatggcttcctacttggatggaccttcaagactaacaataagttgtccgggagtgtacctttggatattaataacaatatatccgagagagagatattccatacacagaacaagcttatctgaaagtactttctagattctacaagacattccacatagggcttttcggatacatactaagcttctggtatctgctctctagatttacagcttccaatcccggatgaaaaaacttttaaccataaccaacaaatctccaccttggtttcaagttgaagtcgcttgataaattattatttaaatgttgtcgtcccctcagcctctccaagctcagctgactccaatcaacttcaggcaatgctcaaacttattacttggcactaccttggttatcatatcagaaggcttgtcttcagttggaacattggcaatcttcacaacttctttctccacaacctctcgtatgaaatgaa

SEQ ID NO: 317960 - DNA, 1165 bp, Cannabis indica
ccacctcaatatggttatcaaaaagcacccccaccgccacaaaaagatacttattcttctccaaaaccatcatatcctccaaagtcatcacctccaaaaccatcatacccaccaaagtcatcacctccaaaaccatcatacccaccaaaatcatcacctccaaaaccatcatacccaccaaaatcatcacctccaaaatcttcatattcaccaaagtcatcacctcctaataatgcctcaccaccaaataattctgcatacccaccaaagccaagcaagactactccaccggctcaaccaccaaaacctcattatccctctaagccagaaaagaactctccttcagctcaaccaccaaaaccctattcgaaacctccctcaaccacaccttaccccggatcaccgctagcccagccgcccaccttccacggctacgcgccagccccgcccacttttggatctccttcgcctaccatcagtggcatcccgccttcctctgacatctctacgccaccttcgggaggcaaccacacaactgttatagcagtatgcgtgtcccttggtggtgctttcttcttggcattcatcttggttggcctgatttgtcttgctaagaagaagaagaagccggttttgattccggctgcagctgcctgtgcatcatcatcatcatcagactctgatgaagaaagtggccatggaagtggaactgctcgtcatggagccgccgaaggcgctgctgtcgttggtggaggaggatctcccaaccgatcatctggccatggttcagggcatcaacgaagtagttactaaagggaatattattaattacttcgtgaaatgcatgcatgcatattgatttgtttcataatttattaaattctatcattctaaatatctggttgaattttgattgcttgaatttgttgatatttgtaattttgtggttttcaattatattctgattctttcagttcccatagtaaaaactgttgagcgtacgtacatcatgtgagactgtcatgttaattttgtctatagtatttgtaagtagttatcactatttttttagtagcatctaattttaatttttggcagctatacatgataattgaaatattcacaaaaaaaaaaaatatataacttttaccagcacagtttgcta

SEQ ID NO: 317961 - DNA, 1417 bp, Cannabis indica
atcatgattatattccactgtgctgacgacactataatgatgagcaaataaatatgttctggacttaatagaatttatacattaagcataatcatgaaataaatcatgtgaaccatgcaacataaaaagcaattttttatctttattaattagtaaatctgattatattgaaatgaattttatttagggcacaaaacccaacagaaggccctagggctgaaaacatagtaaccttataaaaaggccttaagccacataggacatgaaagtagtgttttaaaatggcctcaggccacataggacatgaaagtaaagttttaaaaaggccacatgccacatggaacacaaaagtaagtaatgttctaaagctaaaaatccataggctatgcagaacatgaaaacatggtctatgcgttacaaatataatgctaaatgatactaataaaaatgttttctataagtgtgcaagggcagaaggagttgaatctagagcttagagatcgagatccatagaatctaggctggtcccatcatcaccatgctggctagcctggtggtcagtgacttagacagccacctcctccacaggtgtgtcggccaactcttcgtcgtgtgtccccgatgatgaaccctctcaataggcagcaacttggtctgtctccatccaactcttgaacactgcctttccacaggccaacgttttctccaaaaaaagttgtactaccaatgtacgataatttagctcgagggttctgcaactggtcttcaaaggtaagttcgcatgataggtcaacatactcctccccaatggtctactgtccatcaagagcctcctacaacttctttttatgatcatcaagttcagtttgaagccggaagatgagggcagtatgggcggtgttctctgcattcctggcgccaagcatggtcgctaagccaaaaaccattctctgtctctccgctagaaggatttccagctcaaaattggctttgtcctttgttacaagggaagcctccaatatcttcacatgctcttgaaaggcatatgaatatcccctaaagccatcacaagctgagctcagtttcatcagggcctgaaaacaaagcaaaacaacatcagtgtcagagccacaaaactggtcggtcagtccccccttaggactgctattgccagctagcccccacaaagagcttctaaggccggccaaccacatgcaagaagccacatggctggctagcctatatagtgccaagaagatgaaaaaaagctgaaagtataaatcgccagagaaagatccaggagcacgacagactacgagccgtgttaggtccaccgtcacccagctccttcagatcctcatccaagaaaaggaagagccctctcatgcgctagttggctacctcagcagccttctat

SEQ ID NO: 317962 - DNA, 654 bp, Cannabis indica
ttttttttttttttgaataggaagaccttatgcatatatggtttggatcatcatgtgatgatcttctctgtctcctgacttccttgtagtagttgaggctgcaatgtcctttgtttgtcatagtgaatcttggactgacaagataagaaaattgaagatgagagaatgtatgtttgtagattggggcacattagtagtgcattattctctgtccatgctaacaaattttgttatggaattacatcaattgtcaaatttcttgtcatctatgatattgaaaggcatatctctttttgtttttcgtattcaattacatgaatactatcaatatttaatatgggaaattgtttttattagaattgtattttttcttctataaatggttagctctgcaataacaacctctagagttgaaatattggtacttcatcaagcatattaattgtaattgcttattatttggttatgtgtaggtggaatcatctccagaatcaaaaggaaacgtatttttgttagtatggatgcgcaaaagtttgctgagaatcctcaaatggaagtgccggttgttcaaactggaactgcaaaggaaggtagtgctggacctccggtcggtcttattgatgttggcgagagtgaaggtgcttaccttttcag

SEQ ID NO: 317963 - DNA, 1573 bp, Cannabis indica
tacccaataaaataaaaaaaataacacgaaggtcgtgtttggtagaaaaaggagaaagtaggatggagggagaatttaaaaatgatagtaattctcatttgtgattttcaaaattaaatggagagaaagttagttattaaaagtactattatatccttttttagtataaatatatgttattttctcctttgttgtttgttttacaacaaaaggaaaaataattttgccctttgttgttattttcccctttgttgtttgttttaatcatagactatctaataatacttttgcttctgggcaagttattaattttaacaagtcatcaatcttttttagtagcaattctcttcacgatatgagaagtcgaatctgtcaactcatgcaaatacctgaagctgatggttcgagtttgtacttgggacttccttctttagtgggaagaaacaagaaagccattttggattttttaaaagacaagctgcagaaaaaatttaagcattgggcgggtcaatttttgtctaaagctgggaaagaaatactcctaaaaatagttgcacaagctttacaaagctatgccatgtccgcatttttgttaccattgaaaacttgttgtagtctcgaaagcattatgagcaacttttggtggcaatcatctaagaataagaatggagttggctgggttagttggaaaaagctatgtatgcataagacagtaggaggcttgggttttagagatttcagggattacaatttagccttatttgggaaatagacatggaggttgttaactgaagattcttccctagtttgtaaagtttacaagactagatatttttctaatgattctttttctctcggcctctcttggaaataattcatcgttcatctggaagagaatatttgaaacgaaagatcttattagtacaggtgctagaattcgtgttgggaatagccttagtactttgattacaactaacccgtggctgccagacccccatcaccctaaagaagaatacttccacaagaactttgacattaatttttccatgtctagactaatctccaactaaagtaagaaaacattgattgcatagcttgacaaagattgtgcaactgttttgaccagagcttattttctcgctctaaagagtagcttaattagctttccaacgttgaacccttttgctatttttgtctttaagataagggtaaataccattttggaccctgtgttttgcaaaagttaccaattggactctctgttttgttaaatgacaaaatgaaccctgtattttttaaaatggtacaaataggaccctgaacaatttttttgtcaaaataaaatttaataataatctgatctaaatgtattatgacaaaactatttactattttctgtatctgttcatgttagcgattgtctttaagttggttatattaaaaaataattaaaaattaagttagggtcctatttttaccattttaaaaaatacatggtctattttatcatttaataaaacagaaggtccaatcagtaactttttacaaaaacacatggtctaaaatggtattc

SEQ ID NO: 317964 - DNA, 737 bp, Cannabis indica
atatatatattgacggttgtattacatgaattataatagtggtcaataaaataacacatacattaactaataacattcaaatgaaaaattatggctctttgtcaaagaaaagcatgcataataaatggataaaaaagtttgtactaaaaaaatctgaatgatctcgattaccattgatctcaatgaaattggatagtatatgataactttagataactaggacatgtttcagacgtactgaattatcgaattgctacccttgtatcttaagataaacagttgcacaatataattgttatctcaaaatttggcttgtatgacgtgcaatcaaaattgtaatatgtagcaagacaggttatcataagattgtatctcgtcagcacattaagattctacagagaggtatttctcttaagggcgagttgtcgtctggtcgatagggagacaacaacttgatagagaagcttgttggatacttatattgaaggatcgatatatgcttgaccaatatatatattttgacaaagtaaatggttcagcgggatagttgtttctttagttcctacaatcccgacgatgtcatgcttaatttagattcactattacttcaggatcccacaaattcaatttttatgatgttcttttcaattttgagaataagtttaattaatttaattattttaaatttttattaatgtatattaattgaacttgttattatgggaaaactcttatac

SEQ ID NO: 317965 - DNA, 661 bp, Cannabis indica
aaccatgcaacattaaatgttatttctgatctatatttataagtaaatcgattatattgaaatgagttttatttagggcataaaacccaacaattagggtatacacaatatattccagccaataaaccaaagaaaaactcattcaaccaatacatgccattaaagatcaaagctttgaattgaaagctcaaagttgcataaaacctattccaaccatccaaacctgctacaaggagctaatacttactcaattgaaccctataatttgaaacctaagcataactaaacctaatagccactaaatccttaaatcataaactcaaaccaagcaaaaacttaaaaaactaaagaaggattcttctagggcttaccttagcctacttctcccaaggtttccttgctgaaatcaccagaaatcagcagctccttcccttgatcttgccggtttcgaagagagagagagaagaaacagagctttctcttgaattttttggtattttccttctaatttcactaaatgaaatgaaatgaataataggaaaaagaaataattttcttgttgaaaagttaaacttgctaggagtcatcctcaaaatcagccacctatcccaccattaaaattactaaaataccccttaaacaaaaaactagggtatttcta

SEQ ID NO: 317966 - DNA, 812 bp, Cannabis indica
agtggggataaaatttctattttgcccctcaatgaatttaatcctttaaacacttatagctcattgtaaatgatattttagtaaactcttataattactgaaatgattactcaccatttaactcgtttagccaagctcaaaggagactatcatttcacttttaaataatcatagaaactataggtgtctatatctagctaatgctcacactcaattgaactaccgagttccaagatgtaagtatgagctagaccacgggtaagatggtaacaaataaattaaagaactctaataatacaattagcttaaaacttaatcatctaaagattgagatcaattgatctatgatcaactaataagtgattttgagttagaaaaaatatagcttgatgtgatgtgacatatccatgtgggcaagaccagagccacgtggagtacaacatgtcaataggtaagccaaatcaccatatgcaacaccccaattaatgagggatcaaagcactcaaacaggatcaagttacaaggaaatggctgccagggggtctggccagaccacaccttggccggccaaggataatcacgtgtcagccagccccatgtaaaatgaggtacgaccagcataggtgaagagctttaagaaggcccattcaaatgataggctcacagtcatcctcctgcacggatcataacacgagttcacccacgtgaccgctctaagaacccacaaaaatagggtttcaaccccaaaatatctacctatcctttaaggatattaattaattatttttataacttaaatatatgataaaaag

SEQ ID NO: 317967 - DNA, 623 bp, Cannabis indica
aaaagccccaattgttatccgagttttcttgcataggacacgtggcatgattggggagcaaaatatagcaactgagaagggtaaacaaaattattcagaaggtaaggaacatctctcggatctggaagatagttagaatagatgactcctgggaagaacttccttcagtaatgaacccggagcgtaacaatagcctcgcaggccatggccacgtcaacatcatgtgtggatcactctatagacagttttacctttttctgacacaagatcaaattttgtcccccatgtcaggccatgatagtgcgcgtacgcaccttcggatatgctttttgcccaacggcctggtgagagagtattttgcaaaggatagacctttgcttgacgcgtgtcttggtttgtacaaaaacccttactacaactgtacaccacacgatgaagaaggttctcaccagccaatggttagatcgtcctttagcagtattggccttaacaacgtggggaataagaaaccctaagtaggtaaagggtatgccctttacccatgcgtgcctataaataggggtgttcatcatgttgggttttatgccctaaataaaactccatttcaatgtaatctattttat

SEQ ID NO: 317968 - DNA, 860 bp, Cannabis indica
taaaaaaagaaatcaaactaacatatgtagccatggtttaaacacaagagcatacagaatattatagaacaccaaaaagagaaaaagaaaaaggtgagataagattactaaaacacaaaatgtgatacatcatgatgatgtaaactatatgtactagaatatatatctacatatatttaagtaaatattatatttgtgaatgatgcatgtgattgctcttttcattgaaaaggatcttaagaagataatataaaaattaggaatgtaaaagattaataattgagattgaaaagtttaacaatgtgtacaaaacaataaaactatttgatatctaccacctcataattaatgtattatataacttatttatttgtttaaaacattaaaatttttcttttaactattaaaattattaaatttaaagatttccatttaattttactaatgggcatatgatgtaaatggaaattcaaaaagaatgatttagtacatgtcaaaacttaatcaacacgattaagtacatgaaaatcaccatgttagacgtgtattagtaaaattgaaaagaattggatgaaattttttaaatctaacaattttaatagttttaaaaaaaattaatagtatgaaaaatccaaaagcgcgattcaatttgtatcaaaatttgatgggaaaatcataattaacctaatgataatactaatactaatatactaataataattagaagctaaatacatcaaagtttatatacattaatctttgataaaattacattaaaacaaacatatagtattacactttttatttaggtcttactaataatttttattgattttaataaaatacgagttgattggata

SEQ ID NO: 317969 - DNA, 1100 bp, Cannabis indica
ctaaatattcttttaataaattcaaaacagagtctgtactaacgaaattggaagaaaattacaattttacaaatattaggtacttatgccgctaaaaataaatattgggtttatgccgcttacaaacataaaattttgggtacttatgccgctatttacctaatcttttatattattttttttatttacgatgatttattctatatttttaattttcttttttaaaaaatagagtaaatactattttgaactttgtattttgcaaaagttatggaccatctgttttaatacgaacagatataaaaattgcaatctgatttgtcataatatctctagatcggattattatgaagttattttgacaataaatcaatttaggattctatttatataattttaaaaaaatacattacctattttattaatagattgtctaattagtgacttttgtaaaaaataatgtcctatttatcttaaaaaatatatgtgtaattaaattttcatgttacatatattaacctttttttttcatttgtaaatatatatattaaaaaatacattggtgtcatgtgtgtaccaaatcagtcttttttaatattaccttaaaacataaaaagtttatggaaattgggaatttgggacccaactttcttctagtgctttaagaaaaaacaagaaaatacataagagtttcacaaatcaattgataataaggagtaccctccacgtggttctcaaataaaacaagacaacattatcttaccttttcttcaaattctctttcacatctttcctattttttttctttatcgtttatacagtatctttgctcaaatcaatgtcgttatagttgttttcaaacaaaatacattaattttatctgtgtttttgataacacctaaaaatctaaaattcgaaataatacagctccaaatgtaggtcaaatcaagatgaataaccgaattcattgaagggactgaaatacaaaataatcataacattgaaaattaaatgagtaaatatttattttttttaaaaaattaataaaatgaacaaatataataaattaattaataaaaattataaaaatatatttatta

SEQ ID NO: 317970 - DNA, 1543 bp, Cannabis indica
ttcacagagacagcttaaccagacaacaaaaacaaaaattaataaattaaataattaaataaataaataaataataaaataaataaataaataaaataaataaaataataaataataataataatgaaaacaggagagttagctcactattctagtgacaacaacaaaaattttcattagaataagctatctacaaagccatgtctccaaaacatgatgaaaagcttaatatgaatgaaagcaaactatttcctggagtaataagccactattccaaattttcagcgacatacttcatttttgcacattatagtgcttcaaattcaaagtacaattgaatgtcaatcattgccatcaaagtgagggtaataaagagggagggcccatcagaccgctggaagcttttcactccatttgagcctttaatttaaaatccgtaataaatagaaaaataaataaatactcgaagaccaacccacatcaacctctgaacaaatagcattgaataattttgagaaagacaaataatagtttgtaaaagagcattgctataaggcacagtctagcacttctctttgagaatactgtgatggttgctgatacgcattaaatgcttcccatactgatacagagtctcaatcagtactcagaaccagaaatacatactttaagatcataaattcgaacaaacattctacaattaaaccaaatattaatttaagacaaatgcacaattcccagggaactaaaaatccaaccttctgtttctcggcatcaatataactcttcacacctggaaccaatctgttccaaacaaaattaaggaaaccaaaatgaccaaaactcataattccataaaacatattttaaaataaataaataaaataaacaaacttacttgatggtgttcatgaaaagcgctaagatggtagctttgagtcctttctcgtggacaacgcaaacaatcgattggagtatagaagctaggaagagggcaacgagaggagccgaaaccagaagcaaaggctcatattgcgataagtacgaattagcaaaagttgcaaaacgaatccacagagaattcaaataatccatagctagctcctgtgaactgagaaatcagaacataataaacaaaaatataaaaaggaaaacgatgataacgatggtgattgaatttggaaatgaagagcgatggtgtttgtgaatatgaatataatatgtagttgtagcgtataacttaaaatcaaatgtaataatttattggatatttaaagcatttcctataaattgtaatcttttagacaataattagttttgtttgctttgctcataaaaaattaataaataactagttttgctttctgtgttcatatgtgagtcggtaatgtaatggaaaaaaaatatagtcatatgttaataaatgtctttaccgaagactatttgttattatttttaaaaaagaaacttagaaatattaaaataattacaaagcaaataaatatcttacaaattgtaccaaattaaaattctaaaaaattac

SEQ ID NO: 317971 - DNA, 977 bp, Cannabis indica
cgatactccttaaaaattattatattaaattatatgggactcgatacttagtttgatagcgatactgatacataagagagtgttagacactactaatgccctttagcatttctctagtagaaattataatacaattagttaatacaattcacctttttagagattggtgatgaagtggagattaattgtgattaattagtttaagtagtgtttgatcgctgtagtcaaaacatgctatatgtcgccatggtggaaaaggtcaaagtaaattaatcatcaattaaataataattgatataattacataacgcctccttttcataacatacgttccctcattagtagctacatgaaaaacatttttttttttttaacaaatgaaaaacattttattgataaatataaaatgtgtttatgtaatataatttttaatttgacagaatttttaattttctacatcatctttaatagaatattcaaactacttacaaaatattctttattaattttataatattgttatatatatttaaaaataaaaattatgtagatattttatataaaaaaatttattaattatatatttttaaaattttaatttaatttaattatatataaaaataatttaatttaattaaggtttacatatatataattatatatatttaatttaattaaaaataaaaattacattgatatataaaatatatatatatttaaaccttaatttcgcgatatgttttttttttttagaaataattaatgatatatatatgcttttaataatttgtacactttattataactacactgtcttaactacaaattaagaatattatataaattattattttttaaaatatatatttggacataatatataaaatatattttaaaagtaaataattctctaatcaaactcaaattatatcaaaatattttctaatataatccttatatatagagagatcaatata

SEQ ID NO: 317972 - DNA, 2658 bp, Cannabis indica
tttgaaagttatcagcaggtgcgtagagctggagctcgtcatgttcacccactttaaagtcttcacctttagatgacaaaaagtgtctgccccttaggttgccaaacaaactatgatgatagtttctccttactctaacaagtaagtaaaccagtcgcgtagggtgaccgggctaggccaagtcaaaaaggcttttatgatgacatgaaaaatattcaacaaaagacaaaaacaaatccactatttattttacgtcaaacaatacgtggagtaactcccaatatagcaatacgtatcatgtagagcaatgtctagtctagaatttacaaggactagtctagtgagtcctcctatggtgaacaaaaatatggtgtgagggagagatagctatgtctatcccatcccttctttggttcattcttttgtaagcaggagcgtagcactttgcaggtgaaggtgtaggatgtgcttcttcccttttatagcagcctcttaagcctttcaacgatcgtttagctacacgtgtctgtttgaacataaatatagttagtgtgtcctaagttagtctgtacttcttaataagttaatatttgattcttttaagctatcctaaatctgactattttgtgtcccttttactttatgttcttggtatggatgtattttgtgtccccaatggtgcttttactttcataaaagtactatttggggggtgattcgtattcttgataaaccagcatttatatatagatataggaagatttgtttgtcaaatctaagtttttgcctcccctgggttaatttaaaagaggaatgatattcttggatgatggcgaacataagatttatgttgagggggggcagtactttttttcgtaagtgaggggacatcttttttttttttcctatattgtataacatgtaaaaaattgataaaaatttttattttagtattaaatgtagtataaagtaaaaaaaaaaataataaaagtattaggttcaataattaagagactaaatataaatcagacgagtagaggttcaaaaagtaaaattttaatattaaagtaaacatacttttattggaatagatttcatgacctcaactatgtatatgaaataactttaccattataccaaaacgtatattatgttcattaatattacttttatttaaaaatatatgttgtaactagctaaaatacatatacttttttttagggggcgactgccccacctcgcttctatgtggttctgtccttgttcatcgagattgaaaaaagcttctcgttggcattcatggtgatcgacaaagcttctacatcgccggtagtggtgttgatttcagatttaggattgtttggagaagcttcaccgattacggagcagctgacttattttgtgaaggagaaaaagtcattttgggaacgtctgtagagattgtgtttttgaaaagtttttgttttctaattttatttattttttcaaatggtaatataaaagtaaaatttagacctaataaatctataatagaaaaaagccctatttttaaataaaaaaaacaagaaaaaatataattggctaagtatatgaagtgggaccaattagacaactatttttgttggccctattggagatgtccttagagcatctacaatggtgatattttttttaaaagggtgtcaaaaatctccaaaccacttaaaaatataatattttattttctctctcttctacatcattttttatatatttttgttctaaaatattctaatagtaagcacatctaaagattattattattattattattattattattattaaataattaaattttcttattttatgacaaaataataattagaaaataaattttcttattgtgcgacatcaatacttaacattctttttcactctaatggtaatcatttattaaaagatactaaaaatatatccatgtcaccaagcattcatattaaagttactcttaaatgttaagtttgagtaccaacagttacaccaatttattgacgaccccaaataaaaaatgagtttaaattgcaattaaagtctttttttttgcttatttgtactgcaggtccttaaattataaaagttttggcaagttagtcctcaattttttttttttgcaaattggtccccaaactatatatgttttggcaactttatttccaaaccttatttttttggtaaattggttcccaaacttttattttattagcattattaagtctcctcttagatattgatatttttattattttttatttattttactcactttaatttattttttgtgtttaattcaaataattttttttttaattttaatattttgataaataattatgttgatatattttatttatttatttattttaatttttttaagtattagtgtgacatttaattttttaccaaaatatttaaaatatgctttattcatatatactattaataagaaaaaagagcataaacactgccaaacccatataatgtctagaagaaattctcgccccctcatgtttttatattttagcatttatagtatattttactactgatttataagtatataatattattattttaataatttttttaattgaatatacttattaattatttaaattt

SEQ ID NO: 317973 - DNA, 1837 bp, Cannabis indica
atcttattcagatttcggattgtgtgttttttttacggcctctcctgtatgagtttttcatcccctttttcatcttatctggctgccactatttataattacatagtgggcaataaattacaaaagttgacaataatctttacaacaattattccctcaaatcattatatttgattacaaattgggctaagtaaatgcaacttttatttataatccacacagctatgagtacccgcttttatttggcctagatgaacgcatatttaaggatatacggtaagctttatctcatggggatgcctcgctaggaatggagcggagttaactttggtggtgagctgtggctcatcatatgacttcccgaaattaatattgctttaattctgataactaaattttttggtgtcgagaggatctttctcacatgcatgctatctttcagcaagatagatgccttgttgtctgtcatcttgattcaccaaattgtttacacttagtttgtatattatgcaatatacgctaagtgtttttagcgttattgtttctcttccatgcgacgaggttgaagcctcgtcatgcacacttgcagtcacatggtttctcgtcgatacataagttatcagttggtacttttctgtctcatagaagattgttcaatcagccgagttataaagatattatgcaaattgtgtttctaacaagttcttccatgccaagtgtacttacgattgcgtgtttgagtccttcgttcttcctagttcgacacgtgtctacctctaatatgctcacttgaattttgggtataacaattcgacccctttaaaaagttcttttacaataaaaagagatttttaatgattacaaagggtaatttcgtcatgttcttcttttttgaaaagatgcatgtccttttattttggcagttgtgtggcttcgaggtacatcagaattaaatgatcatcttttccacttctactttgaatcatgtccgtagtatcaaatatttctctaatctaacgaagcaactaccatgggtataaagtaagaaaaaaggaacaacctttgcatcattttctccattttagaaagtttgaaaaaacccttaaacttcttcgtcacggatcactattaagtttgtttgaagactttcatgccatcccattccttgaactttttcttgcgagtttcctccgacttcatcctctcaaagcgatccttgcttcattcgatgatttgcagacagagtaaccaggcattggcccaagccctaacttcaaaaagtaagttgttttcttccttctcatgtttgtttcattgtgtggatgtgttacctagtttgtttctatcattgcatcttatgtggatttggtagtttttagggttttgaaactgtatctaggttcatactaaggttcaggcaatatgtaggttgttttaaggtgcagcaatgtcccactctggttaaggaatttatcgtccagaagttttagagtttgagttacctacaaaattagccatcccgtgtaaacccaacccttcaaaacccacctccacattagaactgaacgatgctagggttagggaacccgtagtgagaactaaacaggaagatattactgttggaatttattttaccaggatcttagatctactcacaagtatgttgtttaataccctaaatatgaactttctaaaacaataaataaacacatataatggtaagaaaaccttacattggttgcagtggaataatgtctccttccactcagatctctaacccttgtatcatttctgtcgcaaagtattatcaagatcttagcccgaatgtccttctctt

SEQ ID NO: 317974 - DNA, 1346 bp, Cannabis indica
attctgaatcttttgataaaaaaataagtagataaaactctttttcacacaattaatatttgtatactattaatgcagaaaaaaaaaaaagcttccaacgtgaaaacattattctctctctcccagcgcactggtgtgtagcttaacaacccctcacttttattaattgttatttacattttgaaaataacaattcccattaatcagtagaacttgatatgatgtgaagaatagtatcgtattagaattacttaagaagattataattaatctaatttcgtatatgcggcacacattaaataaatgaagtcttgactgtctcttctcgctctctttcgcgcttattcaccgatcggttggtgttgtgattttaattaggtcgatttggttcttgatcggtttcgtttggaatttggattaatatttagggtttcttttggttaattgcaattacgcctggttgtgttgattaactgcggcctatccttatgggtttggaatattattcttttatctctctttttattcgttagttcgaatttctttctatctccattattttgttcttatatcttttactgttattaggttaattcctattagtgtttttatggggttagaatttttagtttcatgtgttgaaactaattaggttttcccattagtcttgtcttttgacatggttctatagtttctctcattgatttgggtttattggtttctagcgttgttactggatactggttcttattggttcttggttctggattcgtttgggtgtcaaagccaaattactttgtcattctttttttattttttagttcatgatgttcgtactcttctcttatctttaaataatattgagtttgtgttttgtcaaacgatctgtaaacaagttggctcatgttttagccatgattcatgtttctctccaggtcgtgtgctttaattggagaattgttccaacgaagtgcgttctgttgttattaacgattgctagttaataaagttgctaaatttattcaaaaaaaaattgtataatattaattaaaattaaaaaaaattgtaattaaatataaattatatatcattctattatttattattaaaaaaatttagtcataaaaattataatttattatcattaaatatatttgactaaaattaaattagtaacaatttatctttaaataattatcattgtaaaggtgtttaattataaaaaatttatattgagactaaaaaattatcactaaaataataatttttagtaatatttatatatatataaaaaaaaaattagaaaaaatgcacgtgaaataaaatagtattatatatatatatat

SEQ ID NO: 317975 - DNA, 558 bp, Cannabis indica
cacattttaactcaatctaattacttaactaaatgtaactaaattagggaacaaaacaatctaaaacaaatcaaaagaacttactaattcaactttttgttttattttttaagaataataggaacaaccttttcttatagaagttacattagaagttttgaaataggtaagactttaaatatttttttcaaaacaaaaaatatattaagaaaatactagctcacccacattttaactcaatctaattaaatgtaactacactttatatgcgagttaaataattatgatatttattattattatttcgttattaactctctccaattaataaattttctctatctttacaaaaaaaaaaaagataatgtataatataatgtataaaaatttaaggtaaactttttttgttaaggaaaatttaaggtaaattatttatgtattttaagaataatgatatgtccacttataaaatttacacacaaagacaaaaaattatataaaaataattaaaaaataacacctaaacaataataaaaaatagtatacaaataataaaaa

SEQ ID NO: 317976 - DNA, 632 bp, Cannabis indica
aaccatgcaacattaaatgttatttctgacctatattaataagtaaatctgattatattgaaatgagttttatttagggcataaaacccaacaacatgtcaccccctactttgtcaaaaagagaaagataattattaaaatgacccataatgagccaaggttgtaacaaagagttggttccaagtcgatcaattaattgccatgagtgcggtttattttgggggtgttgtgcaccataaaaagctgtaaaattaggaaatttaatataacagtgaaaatgacttatattataagaaagtaaggttacatccacatcatgtgtctagagcaacaaaagaccaccactaagcctgacacgtgggaccgctagaccgttaggaaatttaagacgcgaagcaaatttatttaaagcccaacagggagtttagactccatgatatacaaacctattatttatccacttataattcaactctatgtaactaagtttacatactactaaaaactacatttatttagcaattccaattatctataattttgattcagaactaatttcaactccaattacatgaaaataacaacaaaaaataacatatatataacaaaaaattaataacaaattaacaaga

SEQ ID NO: 317977 - DNA, 962 bp, Cannabis indica
aatttaattctatagacccatttattttcaacaattgtcatctcaggggagggaggaacaagagtataactcttgttttccttaatgcatccatttcattgtccatggcatgcttccatttcgggttagcaagggcagctttgacagatttaggttcttgttcagttatagtgtttgcaagatatgtcttaggtttataaatgccaagttttgaccttgtgaccatgggatggacattgtggatagatgtctgctgagtgacagatggggcagagatacaatcgggtgaatgagttgtaggttgattagcagatgggctttctgagtggggaagtggggaaggagggttatgtgagtgatttggagaatctgtagagttattgtgtgatgttgtgggttgagtggcctgagtggtaagtaaatcagatggaatttgataggcatttggatcaagatatctggtgtgagtgacagaatgtgtggacatgggacaaaaaagatctttatatgggaactcgtgttcattaaaggtgacacttctagcaacatagatgcgaccactagggtgaagacatcgatatccctttgaggatatgctatacccgataaaaagacatttagaggatcgaaaagagactttgtgactttcatagggcctaagaagagggaaacaactacaactaaaaacttttaaaagattgtagtcaggtttgtgatgaaacaacttttcatatggggagacaaaattgagaattggggtgggtaacctgtttattaagtaagcagctgatgtgaaagcctcccaccaaaagtgtaaaggcatttcagcttgagccaagagagtaaggccggtatcaaccacatgccggtgttttctttcaacacggccttgttgttgatgagtatgggggcatgagtttcttttgagaatgcctaacttagcacacatcttatagagtggt

SEQ ID NO: 317978 - DNA, 4090 bp, Cannabis indica
tatctggattttgcccccagtaaacttttacttacatagtaagtaggttgctggtgcttgccctcttctcgcactatggttgcactaatcgcgtcttccgagatggctgactagagaaacaacgttgctccagttattggtttcgccaaaactggaagagttgctagagtcctttttatgttctgaaagggctcttcgtactcttttgtccactcaaactttttgttgcctcgcaatatgttgaagaatggcacacacttatcagttgacttcaaaatgaatctgttaactgcaacaattcttcctgtcagggtttttacttctttaggcttcgccggtgatggcatgtctattaatgccttgattttttcaggatttgcttcaataccccccgcgttaactatgaatcccaaaatttttgtgaggaaactccaaaaaccatttttttgggtttagcttcatgttatacttcattaatatcttaaagcatttcgcgaggtctgaggtatgatccttactttttattgattttaccaacatatcatcgacataaacctccatgttccgtcctatttggtttgcgaacattttgtttaccaatcgctgatacgttgctctagcattctttagttcgaatggcatgactttataacaatagagtcccatgttggttacgaagcttgtatgttcctgatctaggacatacatttttatctggttatttccatagtatgcatccataaatgacataagctcgtgcccagcagttgcatccactaaatggtcgatcatgggaagtgggaaacaatcttttggacacaccttattaagatcagagaagtcaatacaagttctccaagttccgttaggctttgggacgacaacaggattggctatccacgagggataaaatacatcgcgtataaagtcgttgactaacaacttgttaacttcctgttttagtgccacttgcctctcggaatccaaggacctccttttctatctcttcactgggtagtttgaatcaacatttaaatgatggcagataatattaggatcaatccctatcatatctccatgattccaagtgaaatgattccggttcaccttcaaaaagcttattagctgctatttgagctgctcatccaggttcttcccaatgtatacacacttcgtggggtttcctagatcgagaataacctcttctgattcttcaattggtttcaataggtttctctcatcttgaactcgggggtcaagatcttcgtctttcttctcgttttcgtctgccaaggtcgccatcaattgatgacaagctttcctatgctacagctcaatgcgatagaaatcgcgagccatcgtctggtcaccacgcaccactcatacgccattttgtgtttggaatttcaatgataggtgcttgatcaaactgactgcccctaatcagatcagtgctgggcgacccaacaatatgttgtaagccgagggcaggtcgacaactaagaagtcttgcataacagtagcaaataaaggtgcctcgcctaaggttaatgcgagcttgattatgccaaggctagctatgctgtctcctgtgaatctgcaaaggttcaccatataaggccttaaattggccttttcgagccccattttacgtagagtttccttataaaggatatttactgagctcccattaatctgttaacactctcttgatccttttattggcaagttgaatggtaatcactaatggatcgacgtgaggatacctcacatttttcttgtcttcctccatgaatacaatgggaggctcctgggttttcacctttttgtaatgttttggtgcaaaggccgactgctcatttcttatctctttcacatatcgtttctgggtgttattactttcccctgcgatatgtggccctcccgaaatagccaggatgtcctctccttcaacgggaataggttgtaacccctggttgtttgggttattgggcagattgggctggttatatccctggacctgtctcttcacgcattgcttaaaatggccttgagggatgagactttctatctcatctttcaattggccacattcgtcggtcatatacccaatatccttatggaatttataatatttgttaggatttttcttgctcctcgaattcctcatgggctcgggcttaccgaaggctaccttctgctcacgtgtgaggtaaatattctcttgagtttcactaagctcggtataaatagtatacaccagcacatacttatcatgcttcttctgtttctttttatccttcgatggctccttaactctatcctttccattcgaactagaagcctccgagttatcagttcttgtggaaacagtacctgttgaaacattactgggtttgcttcctgagcttgttttcaacagattcatttcttttcgggcttcttctttctgaaagaacacctgagcccttttgttgaactcagtgatgcttctcactggacgtccttgtgagtcatcccacaactccccccttgcggctaatggatcagtagagatccccgcctgaagggctgtaagttgcgtgctactatccagattcctaaccctagccgcagccgtgctaaaatgacttaagtatgccttaagtgtttcaccgggctactactttatattggatagcgtggccattttgtgtcgtctatccgtagcagcttggaactgttcttgaaatccctagacagctgctccccagaagttattgaacgatgagtaaacttgttaaaccagctattcgctgctccaacaagcgaggtggggaacaaaatacagcataaattgttcgtcacattactcgctcgcattattttgttaaagttattcaaatgttggatcagtggttccgtcatatggcgagacatgcgagtttttgaatctcgaaggaaaaggggtattcattatgtctgtatgatacagcttaagctcctggttagagtcgtatctagatagtttccctaattcccccacttgatatctcctgaacttgtcctccagctcatttatctgcaattggattggatcctcttgctttggaccaagctgtttgcgaaggtcaagtttcttccgattcaagtgctctcgcagatctggttgggagtaattgctggcagaccttgtcgtactcacagatcgcatcctactcatagactttttctttgagtggttcgagcatttactggttcccatactttctcgatcattagctcattgagtactttctcctcttcgagttgatcgactatgggttcttgaccgcctcaaagtcacacttgcttcttcacgctctgctctttcctcctgagagcgatttgtcgtattccccccatcaaggtctgtacgagtcctcgctctatgggtttgggaaggatagtggtgatttctagcaagtgacctccgttctcccggttgagtccccagattctcctcattctcatgagggatttcccgttcatcagtttctggttgtctcccatcttgttgtttgtcctgatttttagggggcgtctcattttccctagtttgttcctcccgagaattttcctgtctcctggtccgtgagccaggaggtctacctcgtggtctcctcactccaagttcaggttgagtttgagcatttgtcccttgtgctaccctggctgaggttacatcacgttctaactcagcgcttctatgttgcgcctcttttggacggtgtctcaggcggcgattttcggtttcataagtacgttctcccataggctgggcacctccacgattgagctcttcattcctcgtcctggggttccaaccacgcccacgatgagttctccttgagcgtgttgtccacgtactaggaccaatgtcgggttcagctctctgggaacgtgtggtccgtgcactagggccaccctcaagttgagccaccctggaacggtgattagtttcctcatgtggggtgttaacattttctggatttttagccatgaaggaggtgatttttcctcaaaggaagggagggttttttttgagcttttctacagaggctctcaatga

SEQ ID NO: 317979 - DNA, 663 bp, Cannabis indica
aatattgtagggaataattgaagagaaaagtgtggacaacttcaacgtaccaatgtatagtccaactgccaaggaagtaagagaggtgattgaagaagaaggatctttctggttagagaagctagaagtttacgaaattgcatgggatgatgatacaaacaatatcaataataatattgatgatgatgacattattgatcataaattactcaacagaggaaaatttgtttgtggttacatgagagcagttatggagccaattctgtccaaacaatttggaaaaagtgtcatggatgatttgtttcatcggtttacacaaaaggtcatcgaatctcttgctaatgaaaattggaaccatgtaaacttggttgtttctttgactaagaaataaccaaattcaagtttaaacatccaatgtttgatcgaagttgggaaaacatatgtgtattatatgtttctttttatttcattatggatgaatgtacctttctttatatatgcggttggagtttaattgtttggtatattgtattgtattatattacatagtacatataaaatttttatctaagaatactctatttaagaataacttctaatttgttataaaaaattaagtctcaatttgagttaattataaataaaaataacatctaaattgta

SEQ ID NO: 317980 - DNA, 1545 bp, Cannabis indica
agagagagagagggtatgtgtgattagtttatttatttttaattagctaagggtataataggaaaaatatataaataaaagaattattttatataaattaattgagggtctaaattttaatatgagatattttttaagaatataaaatgaaatttccctttaaaaattaacatttattatgttaaaacttaacggatatgtaagagaaataaaataaaatataatatttttaaataatgtggagaattttgatatatttttacaaagtattacttttagggcttcgccgatgggcattgtccaaagattgttgtagaaaaaaagtaggccaagtgtataaagtgataggagagaaaagagatgtggaagaatataaataaaagggtaaatactattttggaccttgtgttttgatatattaagtattattttgacaaaaaatcagtttagagtcttatttgtacaattttagaaaatataggatttattttatcatttaacaaaacagaaggtccaattaataacttttgcaaaatataagatctaaaatagtatttatactaaataaaatgtggtatcatttgagcacagtattcaataaattaatttttttttatttttacattttaaattatttttttttgtatttttttaaaaattaacatagcaactcatataataactaattaacattaaaatttaggttgcaactcttttagaaatcacaatccaaatcgtattttaaaaaaaattgtatataaaataattaattaaattgtaaaaatgtgtcagtaagcagctatttttgttgaagaccatgcaaatagccttagagatgcttttagtggtagttgggaagtgtcaatttatgcgtgtgttggcgacatgattgtcattttgtggcactgagagaggctcagctttgggtttatgctcctcccttacttaacagttaacacactttgattccctgcatgctcaacacgtgtattgtcgaccgtattttactcacgaatccaaatcaagcccaaaacccaaaacgcaaaaccaaaacaaataacaacactcctctcactactctcattctacagtttctacttacttttacctcttcagtcaaaataatcagtgaccgttcaataaaaaaaaaaaaaaaaaaatcagtagtgagtagtgactgttgagtgaaaatcacaatgtttaccagttaccaccttagccgaatttcacctctccgtctcactctcactcccccaccccaatcaacaagtccaactctctttatttttattttatttaatacctttccaaaaattaaattaaaataatgaaacccttctgtaactaataatacaaaaataaaagagatattagaggaaaacaaaataaaataaagaggtttgccttttatttctgcaaaattcagagaaagggttgtcgcctacacctttttatttcaattttccttttcattattattattattattattatttaatattacaacaatccccccttttattttgatggtggtgctttgtgcct

SEQ ID NO: 317981 - DNA, 1586 bp, Cannabis indica
tacacgaaattacagcaaataaaggagggacttgacttagaacaaaaggagacatagttctcaatcgcccaatgtgactccgtcccattaagagtattgataactaatttcgagtcactctccaccaaaacaaacttataacccagctctagggccaacgaaagagctaaacaataggtcgctgcttctccacataagacatccgagaagtccgaccgagctgtatgaatccgaaccactctacccagattgttcctttctaccactgctatgcacatgctttctaagccaaccctgacatcacaattcaattttatccaatcctgaggtggaggcctccaggtccccttcaaaggtggtgtcgggcaagccaagaaaacatcatgaagctctgtataagaagtacaaatctgatcaatacatttcaaaacatccgaatgacagttattatgtataaaatcgtttcgcattttccagatagtttcaacaataatcgaagcatacaaaaagacttcttccactcgtatccccctagtattgagattccatataaatttgacctagtcccaaactcgaatcccagtattacagataggatagatgccccacggtgaagatctccataaatgcaacgccacatcacaggacaagaaaagatgttccatggattcctcccctaatccacacaaagggcagcaggtgtcctcaatgtggaatcttctaccaatcacggatctaacagggagggcattagagaggatgcaccaccataggatcttatgtctctccaaaattttgctattccataacttattccagagtgctggagcaacctcacattgaggagctctttccaaagcttgagacaggtaagccgatttactcgtaaattgcccatttttctccaatgtccacacccatctaccttcaccttgacctgaaggtttaccacctttaacgattgcagacaccgtttccttgtcaaaaaggccatttagctttaggatatccaagtctccattagcaagcaagagatcagccacatagttattattggttaaaacaccaccatttggtttcggaatgaaacctttatagtgaggaatccagggatccctccaaatactagtcgcccttccattcgtcacgactttaagcccctttccttagaattgctttggctttcacaatatttttccaaaatcaggaatctgaatctttgtatctacagctgagaaaatccttccctttaagatacttgacttccaatattttacagcataaagcctgagaacccttcaaccaattccacccccacttggctaggaaagccagattcatttccttagttttcctaaagcgtaacccacccaaagacttaggaaggcacagcttatcccatgctttgagatggagaccttggttccctttttcaaatccccaccaaaaattcctgactaaaccatctatcctcgtgaccatacgactagagagtttcgtggtctgtatggcataactcacccatatatttcttgagtgttttataaatcctaacaagtggtagcagagccatcttttgctaaatt

SEQ ID NO: 317982 - DNA, 726 bp, Cannabis indica
tacaaccaaacaaaaaaatagaatcaaaattgtttcttttctatttcattacctccaaccaaacgtcacctaactgttgcaatgtgaacaatttttacagaattttatttctccaaaaagcaggtactataagatttacaaaacattttgttagtgtggataacatatgttaaaatagtgttagttattcaagaatcacacagagggaaagatagggaaaaagaaatattactcacaaagacgttcttcaattaatctctgcttgtcaattccaacatttagcatagcagggaacacctgtcggctgtcagaaaaaaaaataattaagattagaaagaaatacaaaaaataaaaggatagctgcatcattacgatttcccacaaatacagattaatattactacattccaattaaatagtgagctcattcaccaaacaaccaagtgcacttacagaaaagaacatacctcaaattagaactgaatattttgagcgggttcgacccagacctgggcaacccgcccgaacccgacccgatcaactcgcaaattctttttagaaaaaaaaatattgggacggattgggttcaacctggtacccttcgggcgggttcgcgggttaagtttttagggccaccggatttcgggttgaacccgaacccgtcaacccgcatatttcatatattatatatatttttttattttttattacatattatatattaat

SEQ ID NO: 317983 - DNA, 682 bp, Cannabis indica
ctactggcctgcatattagatgatgatcatgagtacgagattaaaatggtgttgcatttcttttaattaaagtagtgttaagatatatagataaccttgcttaatattttcacgtacaattaattaagtagtgccccaagaaatcagggtgtcttaatttgctttgtactttagattttatatattttatgtacttggtttttaaaatttgtattaaaattacgtactatatcatatgagaaaatgaatcagacaagtttgagctatttgcatttgtctatagccgttttacaagttatagttccatctattctaattttacaatcattttgtatcatttgtacagtgtgttttatatgccaaagtttcttgtcccaaagaaccacggaacctccataagttgtaaattgctgctacaataattgacagcaacatgctctttcaggtattgttggattaaaattctattgtgagcacatatgtataatgtatatgttattataaagtgtgatacaaaattaattgaccaattatgttatgggtatcaaaagattattaaattatcatggaaataatgtgtagataccatgtaaagactcggtttgaccgagtcaaatatgtttatatatatatataaaataatatatatatgtatattaaaaaaaattaaattatatacaga

SEQ ID NO: 317984 - DNA, 1214 bp, Cannabis indica
aattataaatatggcatgtggatgtaggtctcgaagatcgaggaaaacaataaatgtgaggaataaattaaatgttctacctcaggatagacgaccgtcaaaagatgtaatgacctcgcgttatgctataaatatagtgattttcgaggataacaagatcacaagctaatctcgaaacttgactgagataaacgaggtaggattatatcatgaagggatgagttaagtggaaaagttagataatgagttctttaagagcttccagtcttttgatccacatactcgtgagtatgttgaaagattaagagaaataagcaaagtgcaacctatctcgggattcctaaggactagtttgagaattgtcgtaaaagacaatagcgaggacaaacatcttaactagcgtctcgcgggaaatgaccagctattccagaacaccgatgaagaatacaagctatatttggaatacgttatcttagctacgaacaaactacttcctgataagaacaaaaagcggttatcaacagttattttatttatccacatgctgtaaatataaaacgtggggattgtccatgtttaatgaacggttacctagataaaatcaaaagagaataattgtcattcctaaaaatcttataaataaggacaaaacctacggaaaaaaggatcggtctttttgggaaagaaaaactttgtgagattaggataatatccaaagatattctcttgtaatcagtaaacactataaagataaattcagaaataatattgacttatggagtatgtagatttaaattacaaaaccacataaaagttcttcgtgatagatatatatatttattaacgataaatatatattttttctttacaagacttcatttatttttaacaaaatttggagttaactgtttggtgctttcattgagagtctttgtaaaaaaaaaaaacgaaacacgtctccccgatataaccaaaccaccttgtcatggaggatactcaacatgatgaaccagatatggaagaagagacggtgcgtcgatcgggaaaagagcctcagggaacacaaactcaaactagaccaaacaaaggaaggggtccaactaagaggaactctgagagaagtgtgttggtttttatggtactaaatcaggatgcgtgattatcattgtaccatagctcagtggatcttcagatgcgtgtacattaaatcaaaa

SEQ ID NO: 317985 - DNA, 2035 bp, Cannabis indica
catccaacatgtctatttcttctaaatagtgatgcttgggtctttcaagaactgaacgggcaccaatttggtcttgtgtgtgaaggtgctactagttaattgggaaagtgcatcggctgttgcactttcttctttgtgggatttcagattgatgtaccctttcagctgacttaacaagtcttgaatcttactcaagtagaccatcattctttctcctcgggcaatgtactcacctatgacatggttgacgaccagctgagagtcactatatatatcaaggtagtttgtcaacaattcaagtgcaagctttagtccagaaattagagcttcatattcagcctcattattgaaggctttcaaattaaactttattgccttgtgcaattgttgcccccaggtgtaatgagggaaatgctagcaccagataggcagtccatataacttccatcaacgtgcaacttccaggttaaattttcttgctctcgcttcttctccttctcttgcttttctcttgaatcttgagaaatttcaggagatatgcctacatattcaaccacaaagtcagcaagagcttggccttttattgccactcttagttggtaggtgatttcatattggccaagttttattgccgacatgagtaaccgactagatgctttaggtttctgaagtgcctgtcgtaatagttggtcggtgtacactcttattggatgagcttgaaagtaaggtcttagctttctcaaagctaggagcaagcattatgtcaacttttcaataagtgggtatcgactttagcattaataagtcttttgctaacatactatactaagtgttgaatgccattttcttctctaatgagaactgcaatttcagcaaactctatgacttatatgtatatgcccaattcttcattctctagaggcttttccaggttaggaggttgagctagttgtttctttagctcttggaaggcagcttcacactcctctgtccatgtaaatttttaatttcctctaagtatgttaaagaaatggaaacacttgtctgtggattttgacacgaatctgcttagtgttgctatgcagccagttcatctttgcacttcttttatctttgtgggcgacttcatgtccaaaaaggcttggatgctctctgagttttcttctatttcttagaaattcactatgaagccaaggaacttgtctgagtctactttgaaggaacacttaaggggattgagtttcatgttgtactctcggaggatcttgaagcatttagttagatcctctatatgcccccaaccttttttgacttaacaagcatgtcgtctacatagacttccatgttttgaccaattacgtctttgaaaattttgtttacaagcctttgataagtagcccctatatttttcagtccaaagggcatgaatttataacattacaggcctatgtctgtcaagaagctcttatgttatttgtctggtggatgtatttttatttgattgtaacttgaataaaagtccatgaaacttgggatctcatgaccagctgtaacatgctctttatttaacaacctccttttctacagtacagtttagaagtttggatctatgttcacgacatgagaaattactgatggatctatccccaccatgtgttcatgcaaccaggcaaagatatcaaggttgtccttcaaaattttatcaatgcaaattttatttctagcgctaaacctttcctgatcttcaatttcctagtgagaagggtggggtcaatctttacttcttctaactcctctaccaattttaggatccccaaagtaatgatctaaacttgcctcctcactttggattgaacttcattaaccttggccagactcttggttagagctcttggcaggcatttttttttcttagctttggacaaagccaagttgtagcccttttttgcagattttttatatccccttaggaaccctactccatgtcttgttgggaactttaggcataagtggtaaatttgttgggttttatgcc

SEQ ID NO: 317986 - DNA, 1694 bp, Cannabis indica
tgtgaaaagtttagttatttataacggattttacgaggagtttaattttcaagaatatgttatacctacctatagcttggggttaccatttagtaaatagtattaagaaaaaataaataattttgttcaaaagaatggtagtctttacacctgagcaaatgacctatttataggtttacataatagcatgacttggggtttcctaatccaatacccgtcccacttctctaaactagatttaagttagtttaaacataaaataatactctagaatatcccgtaagtagccttggtgacatgtgagtctagctaccacgcctagtgtaggtggttaagcactagggttagccttgttgccagtcaccgagagtcggccctattgctcgtcatgaagggttggccttgtggctggctgtggagggttggcccatgtggcttgtcacatacggttgatcttatctcgtaatggaggcgtgtcttgtcacagaggcatgtcttgtcatgggcgcatgtctcgtcacaaaggtgtacgtcatgagggtcagtcgtgtctttggacatgcagggtcgaccctactggtcggtgatgctcatcagagtttgaattaaggaataattttaaaaaatcacaaaaacaacaaaaaaaatattacaaaaatatagagaatttttaacatttttacggttatttagattttatttacataaaatatgattttttttatatatttttatgttgtactacggttattttgttgttgattttttgttatttgtatattatttttgatgttgttttgttgttgttttcttgttactttcatatagtccttttgttgttttcttgtatttttataaaataccatgtaaaaaaaaactttgaacttaaaatataatttttttttacaaaaatgagtattttatataattatcccttgaattaaatcctttggaggtgtaggccatgttgatggaaaaacttttgttgagtgaggagtatagcttatatttaatgggttacctatgaatgggtagtattaggaaaaattcaatttttatgctttaatttttttggggtttttttttttcaactatcgtgcaaccatcgtgcaactacgcagcaacccaacgcaacagaaacaaaaaattcaatcagaaagagaaccaccattaattccgacgacttcacctgagaagacaaccagaatcaatcaaaacaggagttgcttcgaattcataaaaaaagtgtaaaaaaactactacgaaactaaaattcaactgaaaatccaatttaatttgcataaaactaatgtcctgacttaaatttttagatccatgaaaggcagatctcaaaaagttgaactagagctcccaaacaatccaactcaagtataataaaaaaaaaattacatcaacactatagtaaaatgtttatcctagtgtatttttgttgttttccaaatttctaatggtgaatttattcatattaaatcattaagagacatgtagatagagttacgtacgtggaaacactattttgatttttaatgtttcacaacagttgcattacagttgcctaaacattttgctaacagttatttcgtctgattgaaaccttcgtctgatgcaaccttcagccaaccacccgaaactttcgtctgattgaaaccttcgtctaaggtcaacctttggcc

SEQ ID NO: 317987 - DNA, 909 bp, Cannabis indica
tttccttaaatagaaaatcatttccttaattagaaaataatttctatatataaaaatattctaatataaacttcctaaacttttaagtctaattcgatctaactcttatactggaaaaattattgctgcacttcccaacttccataatcgttttgctctgtcaactttagtctgttaagtgtcaaagtagactatcactgtgtacacaagtatacacgtagtgatttcattagtctacctaattttaataattaaaaattataaaaataacttaaaatataaaaaaattaaaatcagaaaaattattttcttcttctttcttctacattctacttaggaacctaacatctattctaatcaatgtttgtaagaaatctattaaacccgtcaatatggtaatgaaattaaccatgcatgcatgttaggatcttacctactagttaccacgaatcccttttctagtcattgtgagaactcccactgtgttctttaggttagactgcatacaaaaaaatctaaatacatacatttgttcaaaaatatctaatcgaaaaacacagcaaaagaaatcaactatactgtaaagacttcattttgttctcattgaacaatcaaaaacaaacaaaaatttcaaattttcgttctatcgaagccttgcttagatctctgtcggaggtgctctgtttggcttcgagcagaaagaaacagagagagggacatcgtagggagagggaaagggcgaggaagattcagatctaggggccttcaagggcagggaacattgtgtgaagtctattttggccatagagagcagcattcactacaaaaaatgtcacttttaccagtacagttcgctgctgtgttggtaaaagtaacttttaccagcgcgcatttcacaaactgcactgg

SEQ ID NO: 317988 - DNA, 1903 bp, Cannabis indica
gggcacaaaacccaacagttttgtctgacattcctagcatcatttctcttgaccggtatattgactacccaaccaggcccttttcacaacttatatttctcgtgggattaattttgagacattcttgcaaggtgtcaatcttccttctctagccagcatgttgatggccctgtcagatacttcttggaaggaaatcttcaagcctcatatggataacaacctcatatgggatctaccaagtacatttctgcccagaagtcacttttcatattaagggcttgctaaactatgccatgtgtaagtgccacgtcacatgtgcaaactttgggataacattttcccccatgtccctttgtaaccatctctctgaatggggacttttgacacctgtatggatgctgataggcatgtgcgtgatcgatattttagcaactgttctatatagaagtgaacgatcaacttttattctcttcgactgtctcttaggtgtcaactgccaaaatggcagttttaaattacactttatggggggatcgtgatgacagctgaactctcccataaatactattgatctcaaaaagtgatcaactgacagcgggatcgtataaatcttatacttgccacatgtttccacaaacaagaatgaaaagtaatagagacaagatttgttatagaggttcggtccccttatgatagaagggtaatgacctactccccttttagttgtattaataccgagggttaatactatccagataactataggtggtatctgctatagcccccttaggaatacaaagtatgagtcaagaatggataaatccaagtgtaggggtgactcttgtattggcatgtgagagaggaagagaagatgagagaatttgtagacttagacttagagcttggaggccggttttaggcttggattcaacttaggtttctaggctagagttaaggccttagattacagtttaaaaccctagatatttgcatagtttgttagataattacaagacgaaaatgcccttgaatgtacatattagtcaaccattctgttgggcttttagggcccaattcgtagcccatgagttgttgtccacgtgtagaagtgcataggaaaccctggagagcacctccagacaagctaggcccttgtggagggcaagctagctggccatggtgtagtcccaagggtggtcggccatagtgtcggccacccagctcctgtgagggagctggtctatcacttgatgcttgtttgagtgtcgtggtctctttgcttaggtgtcatgacttggccttcttattggtgagttgtactgccatgtagcactaattttgtccatgtaagcatgccatgttaggaggacgaaaattaggataactatgctggtgtggctgggactattgtagccttagctaaataaaagttgatgcatttttttatccttttgaagcactttgtgttgactgattgttctcattgtagtagagaaatagctgctttagttgcctttatgatgtgtaggtgaggtaagtgaaaaaaggggcccacatgcattacataagtgacttttgggggaaaaatcttttttcacttctcacttttttacttttcactttctctcacttgaaacttgctttagagaaagctattccttctttgtaaaggtccaaaacccacaagcttcatcttcccaggatttttgcaccattttgacaatccgagcttcccacctttttctttaacaacatcttttagtgggtaagctttctattcccgccatcttcacttgatttggttgattttgttgggttttatgccctaaataaaactcatttcaatataatcaaatttacttattaatatagatcaaaaataacatttaatgttgcatggttc

SEQ ID NO: 317989 - DNA, 1154 bp, Cannabis indica
gtgacatttcttgtagaagattgttgcgtttggctctgagcagagagagtcgagaaagaaaggaagagaaagtggaaaactcaagggagaaccaaacattggggtccccagagtctcgcgagctttttggtgtggtcctcgtccgttgattgtgtcttggacggttcaccaagcccaggcagagaagaaagaagaataagaaaaaaaggaaaaatagaataaaaatagaaaaaaaatatttttttctaattttttagaaattaggtgggccaatgaaatttcgccacgtgtacacttgtgtacacagtcccagtccactgtggcacttaacagaccaaaatgaacggaaggagtacagagcagaacgattatggatatgagagtatagccataactttttaagtatgaaggttagatcgtatcaaatgtaaaaattcaaggagtttgaccgtaaattatcctttttagtattatatttagaagagaagatacaaatggaataatgctaaattgacacaatttttgcgggttggagttgctttagtataccatattttttcggccatatattgttgattatttatcttatttaactgttatttgatatttgttttcgactacacttttgttggacttgtataagataatttttttggtaagctctttttttttttaatacaagaatcaattttattgccgaaagtcaaacaatacattaaggaagaaatttcttccaactaagaaatcttattttctatcttaagtgaataaactcatcatgtgttgcggtattaccattttacattacatgttgtaaatatacaccaaaaaagacagataataaagacctagctaatagatccaataaacaatcccacccaaaaacactcttagaaaaagaataaactgaaatcacgacaactttagaatcactctctacaaaaaaaaataaaaagacctagcaatatgaacaacttcaggatcactctacttttggaagcctttttattatgctaatatataatcttttgagtttttgtttcttctattttttttaagagcagatagtatttttgagttataattaatataataaggaagaggtttcaatagttacatttttattgtaaccatcatggttacatttttttaag

SEQ ID NO: 317990 - DNA, 2085 bp, Cannabis indica
tacggcgccaaacgaacccttaatgtattaatttatacatttagaatagatttaaacatgacttttttatttttctttcacaattttcttagataagaaacattaaagtctgcagaaatcgatggagctcaattcctagcacaacagggcatcaaaactaagattttcatgaagaaaaaaaacctcattggcaacacaatgggcttgagttatttttgtaagagcagaaacaaaagagagaaatagagaatattgaaagagaagctctgcctaagaattgagtagagttatgcattatatattttgagaacttgtacagtattacaatgccaaatataaccgacttaacagaaagtaactaactaaccgaattcctaactaactctaacacccccttcaagttacactaggttccctaagtgttgtctctaaaagtgtcgaactaaagttgaggaagaggcttagttagaatgtcaactatttgatgagtggcagaaacgtgtctgatgtcaagttcttgagcaaggaccctgtcacgaatgaagtggagatccacttcaatatgtttcgtcctttgatgaaatacgcgattggatacaaaagaagtggcaccaagattgtcacaccagaggacatgacatttgagagcttgcattccaatcttagtgaacagggattgaatccaagttagttcagtagtagcaagagcaatgacacgacattcaaattttgtgcttgagcgagccactacagtttgctttctagagctccacatgatcaaattgttgcccagatatatacaataaccagaagtcgatcgtctgtcatcaattgagcttgctcaatcagcatcagtataggcaacaagagtgggaggagatgctgctttaaagtgtaggccataatcgactatgtcagccaggtatctaaggagccgtttacaggcagaccagtgttcatctgtgggagttttcagaaattgagataacttaataacaacaaaggagatgtcaggactggtcaaggttaggtattggagagctccaatcacactacgatagagtgtgggattgtccataggagtacccattgtggctgcaagtttgctgttgggacacataggtgttggtgtgggagcaacagcaaccatgtttgtacgagtcaataaatctgtggtatatttgggctgagtgagatagagatcagtggaggttcttgtagcttcaaatcccaaaaagtacctgactggtccaaggtttttgagtgcaaactgctggtgtagctgggatatcaattgatgaatgtagttgatgtcttcacttgtgagaagtatgtcatcaacatagatgagtaaaagagtgagtttgcattgtcttttgagaaaaaataaggatgtgtctgctctttaattatggaaaccccactgaagtaatgcttgtttgagcttgtcaaaccaagctcgaggagcttgctttaagccatagatggatttattcagtttgcacacattaggggtgttcaataaaatttacaaaccgctcaacccgaataaaccgcccaaaccaaaccgaataaaccgacaaaaaatacaacccgaaataatacaatgaaaatccaaaccgcccaatgaatatattgggtggtttacaaattattctaaaccgcccaattaacccgaataaaccgaattaaaccgatttatatattttttaataaaagtgtatatcttatattatataaattacatttattagttaaactattttgtatttaaagtttggacattttaatttttaacttaaaacttagattttatagttaataatttttagtgtatttggatattgaagttaaagtttaaaatctataccatattatcactttttttattattttattcaattattttatgtttactcaattatatttatcttatattaaagttcttaaaattaatttaaactatagcattttttagcttgaaatataaataatatatttttatttttttaaaattttaattacttgaattctagaaactaacaataacaattataaaaaaaaaatgaagaacggtttggacgg

SEQ ID NO: 317991 - DNA, 841 bp, Cannabis indica
tataaataccccctcaaagctcatttaatggggtcggagaatcttggctgcttaagagcaaacagagaaaaaactcaccaagaacattctttgtattaaagagagaaacattctcccaagtgtagaatctgtattaaagatatccataaatatcagtggctcgtggactaaggctcattaacgccccaaccacgtaaaaagtcttcatctcgctttcttacagctcattattatattcatattttattagttgccgaaaacctcggtcaacaatagcgaacccctctcctccctcaagccaagtacacaaatttcccgattacaataatcattccgaaattataataaagaaaaaaattaaaattaaaaaaaagaggttgtactgaaaaaatctcatgtagatatctatagattcataaaacacaagatcaaaacatcaccatagagataattaacttgctttttagaaagaaagaaaggggaaaaaagggaagaaaaaaaacagtatataaaaactgaaaagtaccatcaaaccgcccaaacttaaaaaaaaaatctatctttactgccatttggttctttcctcatctcatcatcatcaataacatcacaacagacttaagttttgtatgtgtaaatcaactcatcaaaattaaccaaaatctatataaagaaattgagaaatttgaaaaatttatatatacatatcacctatagctagtgctatatatataactagatatgatcaagtcaaatataaattccacttctagtcataacaaaatcatcagcttagcctataacataatatttatatgattatccatagagttaattgtta

SEQ ID NO: 317992 - DNA, 735 bp, Cannabis indica
actgttgatgagtagtgcagaaatacctgccagatcttctatataggggcaaaatcacctgttaaagaaagactccaagggagaaacaagaaaaaagaaatattggattaaacttatgctaagtatatcatcccatacttaggatgaattagccactgaaagaataccacaactggggcagtgtcccattcctaaaagtttttctttgatcaattagaaattctcttctagatgcagcgtcctgcttccagagagctttcaataattgatgatgattttcttttcttttagattcttgtgatctatggaggagcacttgtactagcatcttaggtttataaactcgatctttatattcttgtgagacctcaagcgcttacaacataccaatgcttaactctggtgtgaaaatagtctacttgtgcatttgttcaaattaattaactcaccgacactcctactagcatttttaggattaagaaactcagttactagggataacgtccacatttcattaaaatatagaaatactaatgcatctgtccgaaatgtcactacaatccctagctctcgtataccaaggtgtgtgtgacatacatagctctcgtataccatgatttttgtgaatgctcaagttatgtgcatagctcccgtatactatgtcttattttcccctaagtgattgaaaaaatgccttcattggtcacttcccatatcgaatcctgttgggccttt

SEQ ID NO: 317993 - DNA, 1041 bp, Cannabis indica
tagtcatataagtaaattaagttgtcacttctgtaactggactgctaatgttttgaattgtcttacttgttattttttttttttttttgaaagttaaaaaacaaatagaaaaacgcttaattcatgcaaattttaagccaatatatgtcaaggtacatgaatgttaaaattctgggttttctttaggggaatcaaaatgtggtgtggtgtgagttatgggtcgtatacagagtggcagaaaaaggaataggctgcaaggaagttgggtgggtcagaatgtgaaacttataaaattgatggtatgtgtatcaggttacaggcccagctggacacattcacacatgctctcatcattcataaacttgcattttcttttcttttttcagattgaaattaataatgtgatggtagacaagaaaataaaaggcagatatatattgctgttaatttatattatactagtatattgttacgtgcctcgtatgctatgttttatattaagtattatattatgagttcggaaggaaataaatgaataaaaaataaataatatttaatttagagagatttgaataataaatttaaattaaacttttatgtccagtaaaaacatattggaaacaataataataaggttataatatatgttgcatttgttcccgttcttaaaataatagcagcaagaacatatttgacctgaaaaaataaatattacaaaattaagaataagcaaagcgtgtgtaaattagacaaagaaggaaccctcaattctcaaagtctcgattataaagtaacaaagaagtattaaaatttcatctgctcattataaagccaccttcactcaaaatagcacaacaaaagtaacaaagaagtattaaaggtgtaaattttaccaaaaataatgagaattaacaactgatgattgcattctgtttcagtaggtgaaattgagagagaggcttttgttgtgtgtgatgaatggattaatagtaaagattgtttaattttttggtttaattattgagtttattttttgaaatt

SEQ ID NO: 317994 - DNA, 1151 bp, Cannabis indica
taagttttttaacaaataaaaaaatattttattagattattgtcattttaattttcaaaaaatacctaaaaattcttactatataaaaatatttaaaattaagattcttcaaatatattttttatatcatctatttaaaaaatatgctaaaagtttttgaatgtgtgcatataaattattatatagtgtaataatattaggtttatttgtctttctactaatcacaaagtgtatatgattttttgaaaaaaatttaattaaccaataaaattaaatgttataatttttctatggacttatacgaccttgtgtcttgacgaattacgagtttggatcctacgttttaaaagaatccattttggaccatgtgtttgtaaaaaaattataattaggagactacgttataattagttctaaatagagttatactgttatagatcttatactttagtacaattacgctaaatttttagaaattttatttcggacctcaccttttttttttttaattagaactaaaatgaattcttagtcaaaaatacctttgaatataaacaaactactttgaatttataaatgattgaacgaattaaaaaaatgataatttaatacttaagattttaataaaaaattatgtttgaaatatattttgttacaaagtagaatttctaaaaatgtagttattataccaaaatatagtgtaaaatagcataactcttactatcactaagggtattttggttaaatttatttataatttgaccttagggtcgtaattgtaattttttacaagattaatttttttttaaaatgttaggtctaaagtggtaatttgtcaaaatacaaggttcaaaatgatatatatacatttatttttttccatttgtaaagtaaatgtcattttagaccatgtgttcgtaacagttgatcctattttgtcaaatgactatttagaatttatgttatgcaaaataaaagataataatctctagagcctcatatttgtcaacctttttagggtcaaaattagattagaaattgagcaacaatagttagagttagggatgaggaaattttcagattaaggttaaaaacaattcatcaaaattgaactaagatatcgaattgtacttattcaaaaaaaaaaaaaa

SEQ ID NO: 317995 - DNA, 733 bp, Cannabis indica
taagatatcgaattgtacttattacaaaaaaaaaaaaaagatatcgaattgtcaattaatgaaataaagaggtaaatgataactttggcaaaatacaaagtttaaaattgtatttactctgttacaaaattgtttttgctctattacacaattgcaaaaaacacagctatattttctagtttgtatcaaatcaaagtttggtttcatgcttgacaatcttgattctaaatgcatctctttgacttgtttgcgtctagttttcgtggttagttataaatcaaattacttaggatattcctagtgacattgtatttttttttattcgttattttgagaaaattacaactaatatgcaaaatcaaatcaactataattaaatcacaaaatgattagcaatgaaaagattaataaaatgatgaaccaagaatcagagatagaacatggtagagcagagtaattaaaactagaaacaaataaagcacgaaaacaataaaatcaacaccaagatatttattggtttaagtcctataaatcgatgtgatttatggctctactctagttttggaacaccaccgtctttattgattaagaaagaacacaagtacaatacagtcgagaggattctttgtttggattctcttgaagtgtttatctctcacactcttaaccaagaatcttcttcatttatagaaaattcttcatacaaatcctaaaacccaatctctctctctct

SEQ ID NO: 317996 - DNA, 1274 bp, Cannabis indica
cagtgttgaaacttttttaactttgttttgtcgcttaggtcggctaaggagaaaagacttgtaatattttgtaaaatgatttttgggatctcgaaacctgtaacttttgtttgtaaggttacaattatttcaagtttattttcgttccgttttcgtttaaattttaatttctgcgcttatctttttagtaatcctatttaggggaatacggtttcttaatcatcttgggtagcgtgcctaaatgttagggcgttacagttctgatccctggtcgcttgtgttactgggaagatcaggctgatcatggggattgtcctaccctgttacatattattgaaagtgtcctcgtgcaatgagaccttctatctcattcttcaactgacgacactcttttgtagtatgtccaaaatctccatggtattcacattgttttgttgggtcccttttacatcttgtgtgtctcataggttttggctcgctgaaaacaaattcctatatatgtgtgaggtagatattttcccgagtttcattaagcttgatatattcaacataaaggggtatacatttgttgtgtttcttctgtttcttatccttggacagccttttggaatcatctttcctctttgatcctgaagcttccaaatcgaattcttcaaaagaatcataccccaattgccttccgggttccctcacatgatacctcctgaacttattctccaactcgtctattcgcaaatggagtaaatccctttgctttggaccaagtggttgacgaagatcagattttttcaagtttaaatgttctcgtaggtctcatcggtggtgacaactgtcggatcttgctttacccatatactgcattatgccttctttatcattgctacgacaagtgtcctgttgggattttatgccctaaataaaacccatttcaatctaatctgatttgttatcagtagaatattagaaatcaattatgtttacatgtagttttcatgtttatggttttatgtgtacaaaatctgttaagtctagaacttatagttgttcacaattacagtgatgtcaacacagtggaatgtgattgtgattatatgcttcaaaatacaatgtccctggtaaagatattgaatgtatggagtatacattgaactggaatcgatattgatcctggtaaagatattataatctttccgttgtatctttctaagtcaatatcactaattgatcttagatcaaaagattttaatcctcacatgcttaagttcaatctcaag

SEQ ID NO: 317997 - DNA, 1459 bp, Cannabis indica
ttaataaatgaaaacaaaaatcttaaacagaagacgtcgttgatgtatatcttgaataatttgtacatgattttggtgaggaaacattaggttaagttttctttatggctaaccacattgggttgagagagagaaaagagagagaactcgtgtgtgtaattcagtacatactttattagtgtcttaaataagacatatatacaatccagattctagatcattaggtgtagacaagggatgttcataaaaactaaaaaacccaaatcgaccatcaaaccgaccagagcgtaaccgaatttttggatacgtcatcactgaatttggcaattagtttcggttacgatttcttgacatggcggtcggtttcagtttttaaaataaaaaaatggttacaccgaaaaaatgtcaaaactgccaaaaactgctcaaaaccgccaaactaaaaaaccgctaaaaattgccaaaaatcgtacggttagtttatacgattatattttctaaacaatcgattacagttttcgtaaaataaaaaccgtaaccaatcaattggttataaatttgtaaaaactgaccgattttcacccgtagagtagacagaaatatgtagtattaattatttctaaattttattttaatatatttaaaatagagtcagcattgacaaaaattgtactcatattagaaacttatactgctaaaaaaattattaaatttataccacttaaaaattcaaaaattcaaaactttaattgctttcaaaaaataaaaaaaattcaaaactttaattactttcgccacaattatttcttaaataatttcaaggaaagttcaatgtcatcttttcttcaaccaatgaaattcacccttacaacttttgtggcatgcgtgttcaagtggttgaaaagcaccacttaaaaaaaatatcatagaaagtaagaaatataataagtgtatttattaatgatatatatagagaatgctataatgtactggtgtctattcctattaaacatgttgtatttttgttaatataattaaatatcaagtctcatataatttaataaaaataattgttaaaaagtactattgatgcctaacatcttatttcgtatcatactgatattagtataattaagaaaataattttttaaaaaaatcactaaccaattgtaaagtatcacatattgaagatgctgtagtatccaataacaatattgctctttaataaaataatttttatagaagatcgttaatcaattgcaagacgccactaataaatagtattaggcccaactttataataatgttctttatataaagtgtggctgcgctgtggtttagaaaagtctttaattacaataattatcatatatatatatactaggtgaatgtacgtgccgagccacgtattgctagttttatttaagattttggtatttttaagattttgaatgtattt

SEQ ID NO: 317998 - DNA, 1316 bp, Cannabis indica
cctctgcctcctcgagtcaggccattgaaactttgtctaccgtagtgggtaaggctagttctgaattttcccaggtgtttaggactgcctggtggtgccaactcaaagctctccttccccacgattaggatctaatcaatcttgggaatccagaagagacgctttcgaggaacttgcattatgccctcgtatggtaaatttactgtattaatctatattaatttttctttctttttctccttgtttcttatattcatttgctcataattcttcagacttctttcctctctttttcctcccatcggcgaatgctggagcggctcaaatacctggagggcgaggtccaaaaatcactagcccaacgtgaggtcgtgattaaataatggaacgacgctcaacaggaaatcacccgtctcaaacaggacaatgaacttaagaaggtgcttgcgaagaaagaggctaaactcaaggggaaagaggccgaactcaaaaggaaggaggccaaaaccacagagcgatgcaacaaggtcggccttcataccgtttatcgagccttgatggcgaatccaaacatggacacaagcttcttataggaggatgaaggggaaactttggcttactgtgaaaaggccaggaaggaggaggaacaggtcgaggcagcgaaagaagaagatctatccaagtctcccacaatgtaggctttggtttttatttatttcctttctttttttttataaggaaatggccttagagccgagacaatggtttgcgaagttggatggtctaactttgttttttttttttatcttttaatgcctcgtacttttatgtttgaacttcaatatgtaattgtttgcttgcgtttcattcgcaatttaaacaatcatattttgatcatgcacaaagtattttagggacttccatcgctcgtatatctatttgacattgagtagttaatggcctactttacgtgtgagcaattcatcagccatgcactcgatttgcgagcggtcattaaaaaccgcttcgtgataaccagttataatctgtttcaagcaaacttgaatatatttttaatgattgtgtcactttgtatatacgtttttattgctttgcatgaatagttagatcctctacccgggtgttaggtttaagtactttttccaagacacattgatgtctcgtttaatactttcctttagtgcaagctgttagtattcagctttatacgcgagttatgagttaaatatcatttataacttttgattttcctttcctgtcagataggtttttaatcaaaaattataattgtttga

SEQ ID NO: 317999 - DNA, 1169 bp, Cannabis indica
gcatctcgtgatgcaactattcttatacacgaggccagtacctacataaaacttttcactagaatggcttttcgtgctagcttgatcttggtaactctgattgttgtgaccgacacatttattttttgtgatttttgcaggcaacatttgaggatggaaaggtggaggatgccgtgaagaaaaaccacagcacatcagaggaagccgtgaaagtggggaaccttgctggcgcatatcgaatacttctcacccattttagccaaagatatcccaaaatttcagtctttgatgaaacgtacatgcacaacgcgggcattgcatttgacatgatgagtgtcaacatagcagatttacctgcgctcccaaaagttcttccatatctaaaaatattgtttaggaacgagattgctttgaaggaatcggatgatattcacgaattgtgattctattttttcgcaatctcattatagttttagttattaacctttttttttttttaattccttcccatatggaagaagtagagaaagaaactagaagttatttttttcctcacacttgtgtaatttggtgtctttgaagagttaagaatcatgcatcttactttatttaataatgccctcttcttacgatcagccacatcattttggctttgatgtgtttgtgttattgttctatgttattcaataaactaaattttattttattaaaaaaaatttattgaagtgttaattataaaaaaaaatatataataatatttaaaatttgttgttaattataattttaatttaattaccgtaatatttttaatttaataatactttattattttagaatattttttttattatatttttttaagtatgtgaaataagtttaaatttgaattgtaatattaaaagaaaaattaatataaaataaaaaataagagagatataagtaatgaatttaaatttaaaatataatataagacgtatatgtgtaatgagattaaatttaaaacgtaatgtttaaaaaaagaataacactttttttatatagccacaaaaaaatgtttacataaaatatggtactgtcgtaagaaaaatatagtctataaatggtcatacagaccctatcgaccatcgaagtccttccaatactttaaaaagccagcgtcttcgtctgca

SEQ ID NO: 318000 - DNA, 804 bp, Cannabis indica
tattttgaattatcgttgtatataggttttttttttaaaacttatataacagagatccccagaacacatttttagtgtcgttatgatgtccatttttagtattttattctagtaaagttttaatattatcacagattttaatgattaattaatcaattagtactaaactagtttataaaatcatacacgtggcgtccctattaattagggtgttacactttctttttagcatgatcgccattgtatccctcgtgaacgtcaatcataagtcctatagcttctttatgtgtaacacactttaacaaaggcatagagaaacctcatctgtacatcacactattcacaattaagtactgtacaacttttctcatcatttttcaagcttcatttttgtcccttggaagtgttctaataataagataggctacaattgatgccatccagttaggtgtgtcatccaataattcaatttcttctatggaattgatgctaggctcttttagaaacttcattgggactaagttttccttgtcagtcacaatgttgtaggccaaccgtgtcaaagcatctgcaattacattctcttctctaggaatctgtttgatggtatatcttctgaattatgtgagcaaatcctaaatttcattcaaatgtcccatcattttttcttcttgagccatatattccccaagatgtgattgatggccaactgagaatccctataaatttctagattctcactatgcacttcccaagcaagtttaattctagcgatgactgtttcatattttgcttcattattgg

SEQ ID NO: 318001 - DNA, 787 bp, Cannabis indica
attaattttaaaaaaaatatatacatcagataattggaggatgatgccacgtggatactaaatcaacgttggacccccttattgtttggctattggctgtaagtattccacgtgatcagattttaatttcatagccttatctatcccttctatatttgcactaattagtagtgttttcccttttttatttttggaaatggataattagtagaccttaaggtgcgttaactattatgaggtattcctctataattaattaggagttttttttaattttaattaaaataaaatatgtgagagtcgatattaaattataaggtaaatactattttaaaatttgtgttttgtaaaaatattttcagttttgttaaatgataaaatggaccttgtattttctaaaattgtacaaataaaatcctaaactgatttataaatcgtacaaatgacaaaactagttacattttctatatctgttcgtgttataaattgtcttaaagttagttatattaaaaaataaaattgttgaaaattcaactcatgattctatttttactattttagaaaatatatgatccgttttatcatttaacaaaataaaaaattcaattaataatttttgcaaaataaaaatccaaaataatatttactataaattatatattgatattacatatcatagtgttagagatagtattacaatggaagataaatcaagatatatacaactcaattgtaaaaataatacaaggacaataaaaagattgattaaatatatgttacacaatac

SEQ ID NO: 318002 - DNA, 635 bp, Cannabis indica
cagactcctatacgtatgcatgcatgacataaaaactagataagtaggtgtatgttcttatcaaattcagataaatataatagtattccatttccatatatattattaggcattagcctctaaattattttaccttagtcttatttgggtccgtgaatttgacaccacttttttatttttctcaatgtcacttacaaaaagttaatttgctatatttttttctttttttttttaagtaaaaaaggcagaaagaaaatagaagcaaatttcccaagaaataaaaatataaagaataaatgaaccgatgactaaggaagaggataatcaattagtatagagcatctctaatgcttaaattttggaagataattatgtggaatgcttatttagcaaaacataaagatatatcattggagataaattggtactatcatagaaaattgtgttaatccactctataaaaaaaaaaaaaataaggtaaagaagtagtgtgacaatatttaaaagaataaatattattttggaccatttgttttgcaaaagttatcaattggactctctgttttgttaaatagcaaatcgaccatgtattttttaaaatgtacaaatagaactctgaattgattttttgtcaa

SEQ ID NO: 318003 - DNA, 996 bp, Cannabis indica
cgttttattttttcatgatttagaaattaaatttagtgttaggtctgtgtttttagtggagaatatgtgatttttgagctttttaggctcgaatctgtattttgaggagaatatgcgatttttgcctagctcgatgcaggtccgatgtaggcccgatatagggtccgatggtaggtcaatgttgaatgggtttaagtgttgaagaagatagcccgatagtatgcctgatgatcctcataattttaagttttattgtgacacgatgggtctaatataggggctgataagtccgatattgtcttattgatatcagacctatcaagccctatattggacccattgtgtcacgataaaacttaaaattatgagaaccatcgggtcctatatcggacctatcaggctatcttcgtcaaccttcaacccattcaacattaacctaccatcagaccttatatcgggcctacatcggacctgcatcgggccggtcaggaaaaaaatcacagattacccctaaacttagattcgagcctaaaaacctcaaaaatcacatattatccactaaaaatacagatctaacactaaatctaatgctttaaccctaaatcatgaaaaaacaaaataattacagttaaaaattcatgaaaaaaattagagattatctttgacgaagacattgtccgtgttgggtggtggtcgtagtggtccagtcgagatggtccgtgggtggtgtggtcatgaggagttggtccgtgagtcgtgggtcgtgtgggttgtctgattgtgtgttcctccgtgtgcgtgtttacagagagcgcgagagagaagggggaaagagagagagaggactgttcaaataggaggggtagaatgggttttaggaaaaaataacttattctaccaatattgaatagtttaggtttagaatttttttttggtcccaataaatgcataattagtcaagtttttcaaaaaccctaaaagaaactctctctctct

SEQ ID NO: 318004 - DNA, 702 bp, Cannabis indica
caccaatctacctacttattttgctctaaaataaaacccatgctatagagcttctcaagagctttgaaacggtatagagaacaactgaaatagacacacaagtgaaaagttatggccaaaatactaaaattgaccttcttggtaaaccctgcatggaagccccacaaatacggaagctcaccttcagggaagcttgctatgtggaagctaactttcagggaagcttactaagccaaagctaaccttcaaggaagcttacaccagggacctaattctgggcagtaagggcttgaaccaaaagctaccaaaacttgcttctacctgaactagaagctaccaaacttttcagaacatcaatttggggtattctaaagataacacacaacccaaaagtatctaaaacaacatgcaaataaattcaccattagtgagccaagtttgagttcttgaactcaaacttgctcaacaccatccacaacaaacaaaaccggcacaaataaacaacaatcaacccagaattagctcagaaaataaccccttaaaacttagggtttgaacataaccaattcccgaaaagcaagcttgaactaactaaaacttaaaagaaatgagtactagggctttaccttggcttaattcttaaaatttccttgaattcttgctaaatccctggttgttttctctagagagagagagagagag

SEQ ID NO: 318005 - DNA, 1448 bp, Cannabis indica
agagagagagagagaatgttgaaatagggagggtattttggaaaggagagaaagataggtacaaatttcctatggtgtctaactttgatttatattttagttgtagacaatgtaagtgtgattaatcaaattttctttccgaattgattgaattgatattttttcaatctttttattctattgatgtatcaaactcattgttattaatttagagtatgtttgcaaaaaaggaaaaaaaatagaaatattaaaaaaaagagtaaattacggtaaaaatacctaagttttactccgagtagcagataaatacctaagtcatatttttggcggtaaaaataccttctgttagagttctggaacttccgtaggtacctgggcgttaagtgtcaggtaagtgcccacttgtcatcttctcattggtccaaattatttaattttaattttttaataaaataatatttaaatgttgttaaaaaatcaaaagccatataaatatataaaaattaaagaaaactaaataaaaaaatcaaaaagtttttttttttttttgaaagtaatataatgtttaaaaataattaaagtataaaaatcattaaaataatatagtaaaattaattaaaactttttcaataaaataaaaacatagctccatcttcaccaaactaaaaaacccagaaatcaatcaaaccaaactccattgtcgaacctctacgaacatcgcagacgaagctccatcacatttgctgatctccacgaaccctgcttctcattgtctttccgcgaacccaaatctcgatctcatccctatcaatctagaataacaaaagggaaggggaaaaatacatatctcattttaatcatctcgagagtgcggcggtgagaaattttaaggttaggctcgcgaggggtcaaagatggtttgtacaggcaaaagacgggatagaggaggtggccagaatttgggtgcttcagatctggtttgcaattttgaaaaatcttttgtttgagatttcttattgtttctgtcagatctaatggctttaatatctaaaatatatttcttatctttcgaggcttcatctcgcacttcaattcatcccctgaatcagatttggtgctacgaagagaacacttgaaacttccttagagatccaacgactgtgtggatcactcctctgagggcattctgaaactacagtaaacgatcagagccaatagtataccaacgatcggagctctaatatgaactactttatttaatttgtggtatacccagttactcatttgtgttgtgttatgcacatgaactgctaggtatggatttgagtaatgttagaattttgtttatgaatttttttcttctggttatttgtttatgttattatttattaatgtggtttctgtaagttagtattttttgttttctactgcatattgaaaaaagaaag

SEQ ID NO: 318006 - DNA, 1414 bp, Cannabis indica
tttcttgatcataagcaacagcagcagactgtgtggtaatgggagtagatatagatgttgaagagtggagtgggagggtcatttgattaacaatggaagaaagatgtgcaggtgcaatagatgggggataagtaacaaaaaaatgagtggagttggacatagcagccattgggttaaaaattgcagatagatcagaaaactctcccgagctagttatggcagaggatacagcaggcttgtgtgacttatttttagcctgattgggaatagagatggaagagtggtccagttgggatggtacaaagataacagaaggtgtttactgttccatgatagaagtattgtttatcatgtcattgcaatggggtccattaaatctggccgcataatcgtcaatatcatcctcaataggatcagcaatagtagaccgagatgattcaccataaaacagtttctggggttgaggcacacctctttgttctaattgaggaatggctgcagaaaagcttctcttggccagctgaattaacaagggccacacatttccttttgagaaattcgtacgatagcgatcataacttgaagtgggaggggcagatccttcgataaaaggttggtactcaagtgcaggctcctcaccattgtcaagtttttcaagaaaaacaagacatttgttaaaaggatggccaatgattccacactccatacaatactcaggcaacttttcatagcgaaattcgatccaaaattcatcccgaatatgtgatagagagatcatccttcctcttttcaaaggctttgagacatcaatcttaactctgactcttaagaaaggtccccaaccttcattcaatgagtcctcaaacacctcaatgaatttaccaattatgttaccagtgcagcagccaaagtcttagtcttactaaggaaaggtaggcgatatatttgcacccaaaagggtgtaaatttcagatcagccgaagtaaaatttttaccaacttctggtgtatgtaagactatatgatgattctggaaatggtatggttcgcgatcgaggactcgtattttgtctccctcacatccaaaagttaataaaaacatatccgaagactctgaaactttaacagggaatctaccatcccaatgatctgccatttgattctgaaatgtagataaccaaactttttctttgtgaggactttagcatacaaaaccagatcaatagaagtagcagtagcagtggcttcctggtcgtggaactgaaagacagattcttcatcttcagtaagagtaattataacttaaataatataagaggaatactaaagaaattttatattagactctcttttacactctttataattgagtgacatgtgtaactttttaaagtatgtttaagtatagttacaat

SEQ ID NO: 318007 - DNA, 1569 bp, Cannabis indica
atctaatggctaaaattgactcttgatgaaaatcgtaaatttttggagcttaaatcatgtttgttggatcgtttttttggtaatttgtaaaaaaaattgcacttgacttgaggacaaaattttgatttgaaatattcggaattgtgatataggtgcgagacatgacttgaaagaggttgcaaagaacattaaaattcaagttgaatcgcattaatcaaatcaatatttagggagttatagtcattttattgaatgatgttcaacacccagggcttaggttgacatactgacataaacctagatactatgtgagtgaaaaaacgtctcagacttgtacttttgattttgagataatcaatttcttcactctggtgaagtcggtacagttcccagagatgtcactttttccaaaaatcgggtagacttaaaacttttaatttgcgacaaatttgtcgatattttactttaccgaaaaggtgaaatatcaaagtgttaattagacttgtcataagtcgtagctctcgtttactacaaaaaaaatattcaaatgcttgagatggaactaaaattggataagcagaacccagcgcaccaggctatatgtcaacctgggtgttgggtgcttcttgggaagctcccaaggctcgttttgatacttctatggcattagagagattgcaaacgaggtctcctaccttgtttttcaccaaaataagaagaattccctgagcagaatttgttttgaggagcaaaaacatccgaactaggttttatgtcaacttgggcgcaaggccaagcacccgcgtcaacttgggcgatagggtcctgttttggctcctaatggatctcgttttctcaccgagatcacttgtatcttcattattttttaaaacagaaaagatgcccagaacactttttgaagaaaatacttggagctgacttaggttgacagaatatcaacctggcggcgcaggcatcaagtcaacctgggcaccgagtcccaattttgcccaccaaatgctttcgtttaattcccgaaaatacttatatctcaattgttggtgaaaatagagaatatgtgcctagaagacttcttggggagaaatgtttgaaaatggttgacaatatatcaaactaggcgctgggtcccagttctgacttctagatgactctgtttgtttcttgaaagtacccatatcttaatttgtgatgaaaacatagaatatgttcgaaagaatttttctgaaatgctgctggaaatggcccagattgacaataggtcaacttgggcgctaggtcctagttttaccctccaagttaatctgtttctttcccaaaagtacttgtttcttgattttggatggagacaaaaatatgttttggatacatctttagtattgtggttggaagcgcttcaggttgtcaatacgttaaccttggcgctgggtgcatcaccaggtgcctggttgctccaaataagaaatgtttcgattatgattctggtgcttctaacatgttcgtgacaggtcttattaatgtctaagtacaaagtttgagacatttgcctaa

SEQ ID NO: 318008 - DNA, 864 bp, Cannabis indica
tttaatatggaaagtttttagtaattacacagtgtacttacattcaattctcatgggggccatgagaattgaagagtgtaattgaaactcctcaattacttctaattacacagttacagtgtaattacatgatcagacaaacatgccaaattgtgtaattacctctcattacacacaaatccaattacattgtggctttccaaacacacccttataagtttttctttttagtgtggtaagggtcgtttacattttgtgtatgtataaataaatatagaaaatctttttggacaatggagagcattatgcgcgcaattgcgcattcttgaaggtatatatcattccattgaaaaaaattaagtatatatgattgagctggcgctactaaaaaaataagaaaatataattcttaatatttgattagtattaattttgacccatacagatgaattaattatttttacaaattattattcacgtcatgagccatgagccatgagccatgaatcatgatcatatcttacaaaaatactaatttctttttattacttttatatttttactcacactttttttataaaaaatttcataatttacattccatcatcaaatagtcacataaactaacatgaacacatccaaatcaaccaaacatcgttttaaattcatatttcatgaaaatataaatcactaccatgactctgagattagttgtttgaacttgttttaccagatctaaatttgctaacatgtatattgattatagctagagctataatctaacatcctacatatgaatttcctaatacaatgaattaaacacatatgaatttatagaaaaccttacattgatggtagcagaat

SEQ ID NO: 318009 - DNA, 1327 bp, Cannabis indica
gacatttggggttgtattttgtaattgctgtgcgaccaatctttaaaatgtaatttgttaacagttgtataagttttactcgagatcccgactatgtaaatgtatagattaaattataaagtttcgcaatgaaatcaaaagttttaatttggcacgattttcaagaaaaaccctttgattagcagaggtggcacattgaaaatcactatagcgcgcctaagttttagggcgttacagaagcagagataccaattagttatacaaaagagtttcgtcatcttatattatataatatagtcccacaacctctgctttattgctacaactaaaaggtctataccactgaagttcctagatatattatcatggtaccgaatcatagtgggagggtttttaggaacccaccctagtatgacttggataacactagtgatgatgaccatttgttagtttgaataagcaatggaaagtccaaataaggaactaagatttgaagcctagagaactatggtttacccattcacatggagcaacctagagttttcagaatacaaggataagatgagaaaccatgcttagtctattcaatggacttaagcaaatttctcgttcctaatatcaagggtttgattagaacatcaaaccttatggcctgtggtataaatggtaatttacttactttcttggaagcaactcacattagtaagatgctacagaaacttttaaatggctaactcttgtagaggtcacttgacttccagacatggatttatttatctaatgggttgtttccaattgtaagaggtcttatgtacactcttgtatgcaataagaccagacatcttctattgagtgggatctatgaataagtattagttaaatccaaaaaggaacattggaagataatcaaacacatcttgaaatacaagaagaagaactatatgttaattagtaagggtggtatattaaaacccttaggctacaccaatcatttttctagacttgcatcaatgctagaaagtctacttaagacatggtgattactgtgtgggtagagcagtggtttctggagaagtgtaaaagtctatctagaatcactaactctacaagtaaggctgaataataaggattccataatggcaattagggaattattcagactcaggaaagtttgatgcaaactttggcattatttgcaaacacagaataattgctagtgtgactcggtgttgacacagatgtaattttcaaacagtaaagaatcttgtaccctaagaggagtaaagcatacagatggggaattcacaaaatcatgtattttgtgact

SEQ ID NO: 318010 - DNA, 562 bp, Cannabis indica
attacttcgttttaaaattatatattattaggcttattatataaaggttgtctcattagccaacaatattgtgaatgttgtctcatcaggtaacagtattagaaaggttgtctcattcggtaatgatattagaaaggttgtgtctcattaggtaacgaatcagaaaggttgtctcattagacaatagtattagtatggttattttattaggcaacagtactagagttggttgtcttattaggcagcgaagaataatggttactttataaagttataatattagtttattttattagacaaatatttgatatttaatgatatttatattgtgtagtgtgattttctgtatacgaattaaaatatgtgattacttggttatgatactatgtatttatttggttatatttgtatattgatatgaatgtttgtattattacttttattattgagttttcgtgacttacaagtgctttgtggtgcaggtaagagaatgagcaatttagagcggccatgagttagaggtcttccccaataaatgagcatatcagtttatccaactacc

SEQ ID NO: 318011 - DNA, 743 bp, Cannabis indica
tttatagtgtttaatttaaaatttagaatttatagttttcaagtgagtagtagtgagtgtgtgttcaatctaagtgctccacactccacagagtgtatataaatgagtgtgagtgttgagtgttagtgaaaataaaagagtgggtgattggtgtgtattgtggtcaagtgttcaagtcttagtgtaattattttttcaataataaagtaattatatttttcagtgttattctgttcaatacttaattattctttaatttttatggctcccataagaattagatgtaattatactgtgtaattacaaaatattactatttataattattaatttatttgtcaaacattaaaataaaaattcacatgcaattactataattaaaatagagtggaatttaaaaagtattactatgtaacctaataacactttcaaactctcccaaattatatttttttaaagaagaattttttgcggctaaacttttccaattgatgttttacttatatttaatcctctaaattcaaattttggcagtaaaatcctttaaattactgaagtggtagcaaatttaaagtgttatctggataagtgtcactatgaactgcttatgtatacaccttgtacacatgacacgtttatattagcacacttaatattattatttaaaaataattttcaacatttattttaaaattaaataaaattataaaataaaaaatattatagattttgaaataattttt

SEQ ID NO: 318012 - DNA, 1346 bp, Cannabis indica
aaaatatattgggcctttatttttttgggccctgtgcagtagcccaccttgcacaccatcatggtcggccatgcttgtaatacatgggtctcgacacggcttgaatacgacctgcgaacacgaaatgccactcctaccaacaaattctcttctttatcctttaaaatacatcactaaaactccactttctctattttacatctaacttttaaatattatattttctttctctatatcctttaaacattatattttttttactattaataaaaaatttaatgtttacaatatttatttaaatacactactagaaaattaggctttagaagtaatttttttgggacatacaacatcagttttgacaaaatttgtgactgacgttgttttaggggtcatgaagggggtgtgagataattatagccatagagtctctatggtcgtccctatggtgttggttattaaataaccgacaccataagggttgatttttttttaattttggaattttgtgtaataaaagattttttttcaattttatttaaaatctaatttattttttaataaattatatataataagcataaataaaaattaaattgataaattaaataaatacacatttatattactttaagtaaatgtatttctttaatattatttataaattactctaactctaagtatttaagagttatctaaatataaatataaatattcttataaaagtaggttaaagaaaacatacttcatattaaaaagcatagccttgattttcgataaagtcacataacgccacatgttgaatccaaggacacgtaatttatttgcaagggatacgtggaatctaggttagcactaaaagctcactagtaggctccaaggaagacaatttgggccaagcccaagttacataggaccttctaggaacgtaccttagctccgtgacaagatagatctttagccagtgacagtctgtatctggaagcacctctagtaccgtgatatcaaaaggtttgacaacgtgttcgtggaagaccagtctagtttttctttttattcaagtgcacaaagtaaggaaataaatactcctcaaatcttgacagaagatcatatcaagttaaaaggagaaactacctaaataaagatcaagcaattaattcatgattaattgcctacaattataggacagagttttgactaatttaactgtatctaatctgcctagtgagtagatcatctccttcgtaggttggacttcatgagacaacccaaattatatagggataattacataagacactattttttgtgaaaaaaattacattttttacgtttaaagatttttt

SEQ ID NO: 318013 - DNA, 1248 bp, Cannabis indica
aaaaaaaaagaaaagaaaagtgagttggtggcaactatgtggtggagaggtgtatattaaaatttaaaatttaattgtaatgtattgtttctatagttaggtatgatattcctcttggctttaggagtgaggtacataattaattggttactcattttattagtcaaatcaattaatgcttccttaattactataacatgttgccaatttggtaaattatatatttttttcaataagaatttgctctaatatttgacagaatttgccaaaaattggcagctttgttcgtattatttcacaaaaataataaaaacattgattaattaactaaccattaaatccccacagtaaaataatcaaaacagaaagagatattgcatttgaaaagaatcacatattgatttgattattttaagacattctttcacactaacaattttaattaaatttactctcatatattttaatttaataattattataaaatattaataattatttattaagtgtcatcccaaataatacttaataccattaatatttagtagcaataatcactttttatttcacattggatgtagacaatatgctccaaatgattataaatataatgacctccttctcaaaagtcaaaataattagattgaacaagtaaaattaaatctaaaaaattagagaattccacgttaataatgtgtgaaaactaaataccatacataaaatatatatgaactacttttctcttattatcaattaattttgataatacctatacaccttataccatatacttatctattcttacttctccaatcgttaacttctgcatttcaatatacatttaaatcctacatatatgatattatgttattaaattcttatgcctgtgaaggtttcaatttttaaacacatatttcaaaatatcacatatcacagttcacacaacaatggaagtttatatcattttgcatttcttgaacgaaaccactaccctatataattattttattttgaaagatgctattatacccaaatttattattatagtaccacttttcgatatgccttaatgtcattttgtatatatttctcctaatctgaatttgctttgtatatataagaagataatttgttaaaataaaataggaaaaattctagtttcttaaaatctattctatataaagtgtgtctatataactaaaattcttggtttatgagaaattttatgggtgactttttatttttatt

SEQ ID NO: 318014 - DNA, 3444 bp, Cannabis indica
gggcactttaaagattgttgaacatgttcttttgaggaaattttgtggccaacagaaccaagacgatccacaagagtcttgattcgaagcaagtattcattgatagaaagagaactattcttgcaattttgaagttgaatggtataaagatctattttagctaaggtttgagtaacgaaatattcttctagcattttttagatttgagctgatgtttcagcaccaacaattcgagtaaggacaccatcggacatggaggacaacaaccatgagtacaaaagttgatcttgtacttcccagtctgtgaattgaggattgttctggtgacgaacttcatcctctttagtgagatattttcttggaggctaatgagtattcgagatgaattgctcgagtcgatggcctctgatgagtatccaagtattcactgaaaatttgtgagagaaaacaacaagagtgaaggtggaagtcgatgaagatgccattacaggaagctgagaagagaaaacaaaggagagaagacagatcgacaacaatggcggaagcgaaagaattactctgatgccatgttgaatattgagaaatgaaaaagaactgattcattgaattcaattgaagagcttcagctcatatatatacaagtagagagatgagttagttagactaagctcacaactatattctgttacaaaggacaactaagcaactaactaactacttagtagagcaatccttagattgtttcaattcagcaaatttaaaaactttatatatcagcaagttaatgacatagaaaggtgttgtaaaaattgcaatagtatgcaaagtagtcaagtcattagtacaaagctactaaacataatattaattataaaagaactaaagtaccatttagcaaagaatggtaataaaagtcatatccctattcaaaatgagcagttacttacagcaatgtaaagtacctaaaaaaggactttttcattaatagataacgattctaaagaaggtgaaatccacattaaggcatccttcaactctatctctttttcaggatcacaattagtaataactccgagatgcttccaattcaacaagggataacgacatatgttcttcaagttttctggccagatgagagccttaacgtgtacaaggatttataaaaacataacaatgttaaatactgtatataaattaagtaagaacttaaaataacaccatagaatcaaaccaatgaaataaaaacataatgtaacataaacataccttataggtgctaacatgcaatgtcacaatattccaagaacatttgagattcacaagaaaatttatcatatcgataaaccaatttgtgtcatagtctttctgcggcctatcatggattacaatttttccatacaacgaattcgatgactccaccgatatgctaaaattgatattaccttcgtaacaaaagtatgttaattttgaagttggtttaattgtaacaacattcatcactccaccatcatagggttttctagaggaacttctcatgtgttggctcgggtattcaatgtactcccaatgtaatagattgaagtagcttagagtcaaattctcaagtagaggaagatttgaaatgagaatttctagtgatgatgggtgattcttcttacaataacaatcaaataatgcaagacttgtaattttcttgcaagaagagagatttattctgtccaagggaacgccatttagtaccaaagattcaagatttatggcgtcaacttcaattcgtaaagcatacgaaaacgaaagcatttcaaaagtaaattccatgaacttgaggattgaactctgtacaaactgaaattttttatctaaaaaagcataatcatgtaaccgcaatttctcaagagaaggacaacccaacaaaaatttagctagaccgtcatcttttgcattataaccattccaaacatcattcaatgataaagtttttaatgatggaaaactaaatgaacaagaagcatccaaatttacctcctttaactccaaaatagtcaaatattttgccttgtcaattattttaggtaagtaatagagatccccaatcatccaaaaggtattgtacatactaaaatgtatttccttaacattattctcaatcgcgaaagctaaccatttatctatgagttcatctttccttctataagaagaaggatgcatctcaaacttaaaactagttatgcttgaatcgccgataaaatacatgccttttttgcggtgtttcaaatattcgttgacataattgtaaaacttttcaagatcatcaatattatcatcatcactattatgcaaaaaagagtgcggggactgaataccatatgagtttccaacgctttgaaagaaggcatgtcaaaatcacatctcgagttggggaaacgataggatgtgatggatgagatcttcgggtagtttcgaaattatgtcatcattatcaatatcatcactaacacccaccattgatattaatgatgttgttttagcactcttacataccataaattgaattaaatcaaaccatggtggattatatacatgaactgtataacaacacagcaaaataatcaaaataaaactcactaaaattaaatttggaatacaaaataaaatattccaaaatgtaagtttgagcatacctacataatgatcaaaagtaaatctccaagtcaaatttgcccttttctttaacccaaaaggattgagatttagaatgaagtgatatgcttttttttttttgatgagagagtggtatgattttggatttgattgaaaaaaaaaatctaggttttcttatgatgatttttactttcgtttggtttaaaattaagtttcaaatgtttaaatttgattatttgttatagatttttaattgatctatttaaaaattattaataaatttactacgtttttaatttctaatttttttataattaatgaattcgtttttaaataaataattaaatatgagctaataaaatataacataaaattacttgtcacggatataactaaccttctattaagttttttttttgtttttttttttagttttttagaatttaaaaaaaatatttctaaaggtagtaataattagttaaaaatttatgggtaattctacaatgcacccccttaaaatggatgtattgatgcaccctctacttgtttcggcttccagaaaaaaattttagtctaatttttttcatattcatatacgttctagctatttgagatatcctacaaaattttaaaaaattcgaaataatttacaatatagaaaacaatgttcaaacagtctattttacatgcgtataaaataaaatagtcacgcgtgcaacacactacttgaacgcaattttcggcgtgttaaacttttctgaatttcttaaaattttacaagat

SEQ ID NO: 318015 - DNA, 663 bp, Cannabis indica
tatcaaggatcacaccacaatccgagagcttccatttggttagacgaagattgactcccaagtatttgagagggaagctgccttcttcgaaatgaactaagtcaaaatttggtctcttcattgacgaaaaatagatgtgagattttgctatgttggccgataaccctgtagctttgcagaaacacatgaaaacttcataaataagcttcaccgagtttacattccctatacagaaaataacaaggtcatctgcaaaatacaagttagtgaagcgcaagtgcttacacagtggatggtaaccaaacccattcttctgaataaactgattacatagtctagtaagatactccataatcacaacaatgagcaatggggacatggggtcaccttgacggagacttttttccctttgaagttgacttgaattctaccatttaataataaatgatagtgagttccttccaggcaagtcattatccgcataataaactgtgaggggaaacaaaaagaccttaaaagatcctcaacaaatttccaatcggcagtgtcgtaagccttacttaggtcaatcttcatgatgcaccttactgatatatttttccttgtataccctttaagaaggtcttgaaatatcatgatattatgagcaagcaatctattttt

SEQ ID NO: 318016 - DNA, 2035 bp, Cannabis indica
accagatcaattccgagccaaagaaaatggttattagttggagttattaagttagctcagtcaacacaacagaattcatcaaacaccatagaagaatttaggagagcacaaacttggctatggatttcaaattatcaattgcgcagctttgtaattcttgcacaatgaaatagaattcatcactagcatatacaaaagaagagaaaagtaagtccttccttttctcttcactttccttccaaccaattgtaggatgtagcctgagtaactttaaatcacggatcttttcgtaccctcttttcttaatttacttgaacaagccatatactctctcaccactacaaattcccatagaaataagccaagactaacttgattctccatgtcgaataacttaaattcattacacgaggacaatcagaagaagctcctaatatatctacacaaaatattactcaaaaataaattagggaaatcaagaaaaacaaaattatcaaaacaaaaccaaatatccaaaccaaacagtatgaagaaaatgaaaaaaagataatttaacccccaaaactcctattttactaacctaggttacagctaaatgagtacgatatagtcccatcatgatccgcatatagtgagaatgttattacaaaaggattatcttttgtattaactgactaatttaattaattaagaacttctatcggtattaggattcctagtaacattatgatcaaaatcagtttatcaataaaaaaaaaacacctggtaattcgcacattaactttaccagttcactaaaaccctaatccaacagcaaagaagatataaacatacacacatacaaatcaatataatcatataaaaccccaactgtacctcataaagggttttattagcagcagaagaagatggaacttcatcctcgtactccatctcttgatcttcttctccttcagacgctggctcctccgaaaccctaactttcttcctcttcgccattttcaacacagacttgacaatgaagctcttcaacaattcgcagagcttatatataacagaagagagagagtggggaggcgatcgttcccgccaattcgttatcgggccacaatgtttttccgcgggagatattgggccgtaaatgggccaaaaaaagttgggctttttttgaaaatgatgggccgaaaaaatcagagtggcgtaacggtaattagagaggtaattagggttagttattgtaggaacaccgactgagtggaaagggtctcgctcgttggcagagaaaaaaagttggaaaagcgttttaaataggacgagttggtccctacgattcgaactcaaatccaaaaccaaaactctttctctctcttctctctctctcgtttttcttgtctttttccccaattttcatatatataatttctttccttttttcagattcttgaaggcaatttaatcttctggaattggggtaagagggattattaatattattattattattctttcttgttgttcttgtttattattattatttttttgagaaaaaaataaatgaataaaattatgatatgatgttttctttttgctttttgattagggattttgaattgatttttttttttgatttttaattttttttttacagatacaggaaccaactggttcgattgtgcgacggaagatcgacgtaaccgagagccggttagggtttttttttttttttttgagggttaggggaaaatttgtttgcgtatttaggttatgatgggttatggaatatgaggtcattgggttttttttttttttgtaattattgtggatgaggttggtttgctgtggaaacttttgtggtgtttggtttatgatcttttgagatattttgaggcttccccacccgctttgatcaatcttgttaacattctggatttttaaattccatggcgtggattttttgatttgtttgaattgttttttcttttttgggtgttgttttagggtcttttgtgatgtgtatgtagtttttttttttttt

SEQ ID NO: 318017 - DNA, 1128 bp, Cannabis indica
aaataaaattttaatttattaatttaatcgagaaattatataattacttaagaaaaaataaataattataaattctgttcaaactgtagtttcgaactaaactaaaccattattaaggatttggtttagtttaagaaatttattggtatgtttagatttccaatattcaaaaaccgttatattgatttggtttaaaaaatataaaaaatcaaccaaacccataagtgtattttgagagtacgagaaaataaattttaaacaaatattttaaaccttattcaagttggtaatttccactataacttaaaaagttgtgtaggtgtgacattcttttcttcaaatcatcttcttccatattgttcatttttatgctgttgttctaaattatttgtactattttactattttctccaagttattcgtaatcttttgtacaaatattttaaccattatttaatagttattttttttattaaattcttacaatagagctaataccgtcgctgtgaggcgaggccttctctggtcttgagttgttacagtttggtcaattttattccattaagtatattatcttttttaaatttgaatattatctttttcatttaaaataataaaatttatttaagataacctctaataaatgcaagcttcaattaaatcaatttcttaggaggtgagttcatgatattctgcatgtttttcttcactttttgcttgagtgttggtaaataattgatgcttaaattccatgagtgtaattgaatgtaaaaaaataaaataaaaataaatctatgatttttggggggatgcaaaattgtttatggatgaacttatttggaagtttggagaagagcacatagagctgatgtagtggagattttcttgtttgattgtactactgggccgaaattaaaaggagaaaaagaagaagggttaatttcataaatgcaaaaaaaacaataaaaaaaataacaaaaataacggttttactagaattttaaataatttttacgattttttttgaattttatttactataaaataacggtcttttaatgttgaaaatttgttcaattgttaattttttgtttatatgtatgtttattttttgtttatttttttgtt

SEQ ID NO: 318018 - DNA, 1432 bp, Cannabis indica
ctattccaatactttaaaaatgcaaccaaacaaaggaatggaataaaaattatttcctttccattccattccattttattacctccaaccaaacgccaccagagtaaaagaaaagaaaaggagaaaagtaataatgacgaggaaaatgatattattttcaacaaataattaaaaacaaataaataaataaagaaatactatcaagggcggacccacattaaggtgacgggcagtcggcccctgaaataaaaaattgagaaaaaaatgtatatgcatattagttagtcgaaatatatatttttaattaaaagtgatattataaacatgatataatctttagcataatggttaagcttcattttatagataaaggaagtcatgggatcaaacccaataatagcatagttaccttttagtattttaattttttttaatttctatcaataaaatttgtatttagtacttcaattattgaagtcaacttttttatttttacttaaactatatttaatattataaaaatataaatttacatcaatttttaatatgttatatcatgtatttaaaatgatacgccctccctcacttaaaaaaaaaaagtttactcccttcaacttaaatcctaaatccactactgttatattataaatataaatataaatgaaacaataacacatattaaaaaaataattctacatatttcatacttttaggcattattctatatatatatagatattattgatacaaaatatttcttcaccacatgcactaattaaatattttctttttctatatatggtattgtgattttaaaatcttggtgaactatgcatccaaataaatatttaattttcaaattattattattattattttaaagcaagtgtattaaccattggttactaaaaaaaattgataataatttaatgacataataaatgaggtagctcatgagaaagaaatatcaataaatgcggtagcttatgagaaagaaatatcccatttaataatttccatgcatgatggttctttgcaacttggtgctaaaatttattattattattattttaattgaatgtgtaattgtattttttttttcttttttgttttccattttgatagttcctagaaaattattttaaataatctttatttaattaactaatatttcctcttttatgtaatagtgtaaacttgttgaattgtacacactcgacgaaatcaatatagtttgggatgaatggataaaattagttttgtaaggtaggatataattttgttattttaattagttttagcatgaaaatagtattttgttatataagaccctgaactgattttttgtcaaaataatattgaataataattcgatctaaaagtattatgacaaaattgtttacattttttgtatctattcgtgttaggaatt

SEQ ID NO: 318019 - DNA, 715 bp, Cannabis indica
tatttaaaccagaaacctatgaatgtagtaaacctaagctttttctcttttaaaccctagaaattatccagaaactaaattgaaatcacttaaaccaaacaagtgaacaatgatacaattaattacaaaaataagagtatcaactcaggaaaaagaaataccagaaagaaaggaacgaaccacttactgttcaaagatggatttttgcacaaggaagaattctgtaaatgggattgagatgagcgaatcagcgtactctgagaactcctgaggttgagaattaaattcgaagaaattcgtaaaaaatatgtcaatgatagagagggcatgcaaggtattaagaagttgagagagcaatttttgcagaaaagcttgaagctttgaaaggcagaaattgtgaaatgattgttttctcttgaattatatactttaaaagtaatcaccgttagatcaggaggaaaaagatataacgaatgggaactagagagaattgggaaagatgggcaattaatgctaatgatgtgcctcgaaatcatgaaccggcaaaactcaaagtatgtaatttttcaaaattggattaagacaaaaatacccctgcaatcatttaaagggcaattgttatacctaaattttagcttcatttcaagaggtgacacatgtcacacagtggaatatgaaccacctgatataataaaattatatcatttaatgcgaa

SEQ ID NO: 318020 - DNA, 928 bp, Cannabis indica
tgtttctattttgccacacaaaatacacagtggctgaaagaacctttgcagtgactaaatttaccctttcgtttcccaggtgcttagtccaaagctgccagttctctagacagtccgaccaagcagttcccaaccaaccattaacactcttcaacacctgctgagaaaacatacaagagaagaacaagagctccgaagattcatcacagcagccacaaatcggacaaagcctgctgtcaatatgtaaaattttagaaagatgatctcaagtgagtaaactatctctcacaacctgcagccacaaattggacaaagccacagtattacgatatgtttattcataataatgtacttaatatggcaatgtatttaagcgaataaactcttaacctagtgtttattctagtcctctaaagttaattttcttagatgaaattaagatgcacatgaatatgaaaaaatatcaaaattagagtttcataaaatatttttaattatacaaccgaaaactgcataacgggtaaatgaatctcatatttactttagaatttatgttgcgacatgcctttagtcaaggatattgcgataattcaattaaacattgcgtgtttaatgaccacttatgcttctttatgattaaatatttaatgtcaatatgtgagctttgacctgacccagagctattattataattcttagccatataaaaactataactgaatttgtcgcaaattttttaatggcttgatatgaaactctataatacaccatagaagatgcatcctcaaaataataaatgaatattacttttataatagaaataacaattaagattctccacgatacaacttactagtaatgtaataaccgctttagtaatttggattagtaagggcaattagcactactttttattattttattatta

SEQ ID NO: 318021 - DNA, 2619 bp, Cannabis indica
taaagataatttgagttgacaaattagctaaagattttggtaaaggacctctgaagttgttatatgccaaagacaagattttcatttgactgcagtttcttaaagatgcaataaaatcaaagctattgggtaagttctttcctaggtgattttgctctaaattgagtatcctaagatgcggtagattgatccccaaactagctggaacttttcccactaaatgattttcagaaacatcaagtatctcaagcttagaagcatttgaaaatgattcagggattgtcccagaaaacttattaccaccaatatgaaattctttgagattggaaagttgaaggcctatgtagggaggaatagtgccttccaatagattacctgctattgataaactgatcaaagatgatatgttgtaaagtgagggaggaattgtaccagacaggttattagactctattgaaaagagtttcaaccttttcaatttgccaaattcttttggaacagtacctatcagagtattgtcccctatagaaaatagttcaagtgatgaaatatttgctagggatggtggaatttctccgacgagtttgttcgagtagagactaagaaaaaagagcttggttaaagagccaagttctgagggaatgagccttgtaaatctattttgactgagtgatatcactcttaggttcgagcaataactaaggttcaatgcagacaagtcaccttctaacatgtttatggcgagactcaaatttcgcaatctagataaatggcaaacttggtgtgggatttcaccagagaaactattgtttattagattgatggacctcaaaaatgtgagatttttaatgtaaggtgatatggtacctctcaagttatagcctcgtaatgtcaagtttgttattctttgatgtctgtgaccgcatgtgactccattccagctgcagaagtgattggaagcattccaagatctcaacactccaaaagggtcattggagactgattctttgaacttgagcagagcaaatctatcagtttcgtttcctaatgcattgctcatcacgacatcaaatgacacaatcaaatacaagaacgaaaaagcaagccaaagagcacaaccagtgatggtgatcttgagtttcatggctaatgaatggtactaggatatgctgcctatgcaggagttatatatataagaaaatggaggttggttattaaaccttaacaaagtcttcacaccaattactacgttggagcatatttgattgaattaagagttgtggacagagcacaggaaataattgaactaatacatttagtgggttggaaatttctttgataatacatacacctaaccaatggagtgaagacccaccacgcaaatgaagtttcaaattgattagaaaaattatagtagaaaaaaatatatggagtataattgagttgtaacacattattatctatcacaatattcaatcccctcattcacgtttaatattagagttaatcataaccaagcaagtgttttgagaaacaatttgatgattgtggcaataacaaaatatcaccctgctactattataaatttattcttttttttttcactttatttatttatttattgttttaaatcagctacaaatcttattattattaattataattatcgttgttattatttattattattattatgaaatataatgccttaatgtaatatttatggtaattttacatctcagccctctaatttgaggactaaaatgtaatactaaattttaaaataaaataaaataatggttagaatgcaaaaaaaaaaaaaaattgtaagcccaaattagtgtagattcaaaatccaatactattaatggtgtagaatttggtgtataccactttagtgtgtcattggagtagaatggtgtaaattaagatttcacacaaatttgatgaaatggtgcaccattggagatgttctaagaccatctccaatggttttgctaattggtgtagaatctgtaataattagtgtggaatcttttactttttgtataaaaatttcaatgattcacaccaaatatccagtcaagtaaatatattttacgatctcatatttatattacttacataacatcttcaatggttatgctaatttagtgtagaatctgtactaatttagtgtgaaatcttttactttttgtgcaaaaactccaataattcataacaaatatccaatcaagtagttatattttacgatctcatatttatattattacattaataacttgaatagttcatttatgatataattatatcatgactattagtaagaattaaaatggtaaaaataatttagtaaaataaaatagttattaaatcaattaaaaaatacaattttttgaaaaaaaaaaaaataaaatatatatataggacattttttaaaagagtttcttgcgattaaactctctcaactatcactctacttacatttaactctctaagctcaaattttgactacttaattgtttgcaaatttaaggtgtcatccactttctacagttaactgctaacatagacagtttatgtgtatattcttatacacatgacacgtttatattggtt

SEQ ID NO: 318022 - DNA, 1665 bp, Cannabis indica
gggtcatttgaaaagaacatgcctacaattaagaaagactggtgttaaaggagaagagtgtatggttcttgcccaattatcgattatgactcaaggggactcatgtatcagtcctttgatcgactctagttagaattttattagcaatattataattgctattgatatttatgttgcacattgtgcattcaattagagacatcaataatttgaatgaatcgtgcatgtatgttatttaatggtaactcatttgacagggtggacatattagagaaataataatatgggttagatttgctaatattcctaagcaaaatataggacaagagtagctaatggaggcatccatttaattaatttggagagcaaaatatttttgcttagaatagaaaattttagtaaaggcgggacaatttatgagtattgtctggaatcctagatgaattgaaggcgacaattatgtgcgggtatctattcatgacacaaaagatagtgagatcaaacaggggcatgagttaaactgtgaaatattagagcctcgtgatttgcaaggaaaagactaagagttgtataatcccacatgcctaggggaaagtcgtatgtgatgattctgagactatgtttgggactacatagttaaggaattgaatggattgattgtgactacctatattaacaaggcgaatcttagttttagtagcccatccaaaaagaagtccatggtcaatgtccttgacctgggatgatttcattcaggaagttttgcccatgaagtatgcgagtcagaacaaaccacgttaggaacactcgagttgacctgaagggtcactcttcattctaagaaatggcaagagtggaaaacctatgtataagagctattagtccgtggggaaagtcccaatataagcttgaagcagggatgttacaaatgtaacatataacaaaatggtatggaaagtagcggtatcactaaggaaaaaaagattacctgaattactcatagtgatacagtaatgatggagaatacttttgtatttgatcgggtggtcaatcttgtatattaggtggccattgaaatttcaagaaaagattgtcttactaagtaaaaatgaaaaggtatgctcacctagaatgagcgaaaagcttgtaaactatgatccaatttaatgggcatgaattcatgtagttggtgaatgttggatcataaagtaagttgtttattcaacaacaaactatatagttgagtgtaaaataacttttatagtggttaaccaagtatgagggtagtgatgattgaagggagcaatggtagcatgtgaaccagggagtaaaaccttagtggtaatgaagagaaaagtacatgagagtcttagatattgataaattagcatcatcaatggggaactcactataagtttgcatggtagttcatacaaaggggattgttaataaatagagaatatacttgaggtatgtatacttatggatgtgtttgaaaagattctcaagatttctaccaaacacagtgaaaaaaacagagtttttgcaaatgccaataataaatacgaaatcaattaatagtagaaaattagatcacttgacacaagagatttgtacgtagtatcagtgttctttcgaacactcctagtccacggggccacgccc

SEQ ID NO: 318023 - DNA, 1162 bp, Cannabis indica
aaaattttaaatagaacaatttgttatttcaaaataaaagcaactatttagttgcttatcatatcaattagatacttattagttatatttcaacattgtatacaaataattataaaaaagtaacatattcatactacgttaatttaccaattaaaatatcgttgatctaccaataaaaaaaaaaaaacaaaaacaaaaacaaaaactctaacataacaattattttttattagcatctcaagcaactaatatggtttttttaataaagtagggtaatataataaaggaatgaatcgtttttgtgttgtgtatggaaaaataacattgtagttgcctcattttaggtatcataagcaactaaatagttattttttttattatggtgacaatgaaaaaatatatatatcttttacatgtcaaaattaccacattcaagagtcgtttattttccttttagttatccaaaaagtaaccaaattttaatgtttcacaaaatataataggcgatcaaatttgcgggttactattttgttattctatttaaaagttattatatattaactaattagtttctacattaaagtaatgttacttaaataggtcataacataactttaaaataactgattggttattaatttagtagtctaaattttttgctaataaattatatggtttattttactttattgtaatacattagtttctcaaatagtatagaatgtaacataaatattgttacgcaaaagaaaaaaaaatataacacaaaagtatatcttaatcaacataataaactaaacatgaacacatagttctctccaaaaaaaaaatgaacatatagtttaaaataactaatctaaaaattaaagattatcaagtggagatatttttatttagagtggatcattttgtgaaaagtaacttattggtatattatcgaaatcataattaaattaaatattaatataaagtatattaaatataactatttcatatatatgtttatttgttgtattatatgaaaattaattagtttgtactgtaaacttaaaaggtaactaaaaatataactttaaaataactaatgaataatttaaatctttactgtaaagcccgcttagttaatttggaaattagcggttgtttatgtttaattatgaaa

SEQ ID NO: 318024 - DNA, 1001 bp, Cannabis indica
cttttacttttacttttttatttttttttctttccactggtttttaatccaaattctccatctatctctactcccattaattatattttccctctatatttttatacttttgtttggttaaagtttaggtaactattaattcttaatgtataataagcagtagcagtatcatcaatacagaacatcaagacttcaattttcaattggtattgtcaatattctctctattcttatttttccatttctttatatacatatatatatatatgtatatatcattcatcaaaaatatttcttcataatttagaggtatactaattttttttatatccacaacttcaccgtttcgatgctatttttgatgatcccaagctccttgaaaaccattacaagaccgaacatactcttcgtaagagttttgttttaacaaattaagtactctttatatttattttaatcttttaatttattcttttttttaacaaataatttaacattttatgtggcatgatgaatttagagttttatttttttcttttaaacattgattttattactttttttttttttagagttttctatatagatttattattttttaaataaatatatatttttaaaaaagtatacataaaaataagtttaaaattatttaatatactgattttattgttcaattaatatttatataataattatttgataaactgagattttattgttcaattaaaatctatatatctatatatatattgtaatgatcgaatttttaatttggattagtaaaagcaattagcactaattattggtaattttataattacttatgaatttaattatttgtgggccccatttttagaaatgggcattagagttataatgtctcaattccagaaattttattaaactctaagtgtattattttaattatatgtgaaatatgttatttttataattagtgctcggcgacaacggaaaatgcgatggatggctagtttgat

SEQ ID NO: 318025 - DNA, 1408 bp, Cannabis indica
tcatgtcagcatgcatggaccctcaacttctcaatatccatggcagatgtcgccaccaccaccatcgcaacagcctcctccaatgccctatcactatcccaacatgtatggggtcccattgcagcaggctcctctgacaccctatcactatcctcacacatatgggcccccattgcagcagcctccgccaccctatcactatccccacatgtatgagcccccattgcggcagcctgctctgtcgccctatcactatccctccacatatgagaccccgttgcagcagcctacgccgccctatcactatcccaacacatttgggattccattgcagcagcctacgccgccccatcactatcccaacacatttgggcttccattgcagcagcctatgccgccctatcaccatcccaacacatttgggcctccattgcagcagcctacgccgccccatcactatcccaacacatatgggccccaaccgcagcagcctatgccccctcggcctaaagtttcagacaatgcaaaagatccttgtccaaaacgcgggcatacagctcaggaagtaccaggtaatgttatatttaagtatttgaagagcttctgcaatgagtgaccacataaaaatttgcagagctaaaaattagagtaactaacattaatgtcctctctactctactaaatgcagatcatcccaagttacaaaatacaaaaaaggtttcaaaagtgtctttgagtgaaatgatgtgggcaaggctcgagcaattctctacaatgaacaagttcaagagaatagttctcttggtaattcttttcaactaatttatttttttattatttttatgtgggatagttttagatctcttgttttgcttagcatgctcttcttcgatgatgatatttatttgattcttttccctctttttttgattttaaatttacagtttattggttggtatatgtcagtaaatgatgctggttttaaggcattaatttctgatatggatactagcagcagaggaatgattaacgaggatgaactaagagtcggattgcataagcttgatgatcaaattccagattcacatgttcatgttctaatgataattgtaagtgtggcactttttcttccttaattctggtacaattacaatgatgagaaggacctaacttgagaattggatttacagggtgatctagataaggatggatatttgaactatctagaaattgtgggcttatttgctaagctaagattgataggcaatgatgacaagtaccttcgcatagcctttgaattattcgacgaaaaccaaaccaaatacatagaaattgacgatctacgacattgtttggctgatgttgttcatgaaaacactgaagaagttgttgaagccattatggaaga

SEQ ID NO: 318026 - DNA, 695 bp, Cannabis indica
gtagcgtgccttagcattagggcgttacattattactactagatttcagaattttacgtaagtattaatcattctcaaaatcttggttttgagttttagagtttttatgatgttatgtagttatactaattcagctctttcttccatattttcaactactacaaagagaccaatcccaacaccagaggtccaaaggaggcacgagatcttggtgaattttccatatagattgtgagcagctgacttcttgctacatgattataatttgaagttatgtcgcctcctcgccaaagatcaatccaccatggactataagggtcacaaataccctacttggcaacaagttcaaatgctcgtggatgaataagaccgtgactatatcgctcgcatccattatctaaaaaatataaccacttgggaagccaccgaggttgaagaaggggctccccgaggtaatacttcttgcttttatgaatggtgtcctaccatccttaggaccgagcgtactgccttagtgaaattgtaaggacaaccaatataatttttatatttggaattgcattgacttaatagcccataggttcaacagttagtaccattgaaggacttcaaatactattctttctcatctatctttatcttttatttttttatttgaatctttgttgttttagaatgacttttatgagctaatt

SEQ ID NO: 318027 - DNA, 1085 bp, Cannabis indica
aaagttcaagggcatgatttaatacatgtcaaaattcggggaaaaaagtcttaattagccaaaataaaattttaaattatatgaaataatatatttttcttaaaataaaagtgaatagaaaaaaaaaatgattgcctaaagaatcacacaaatacataagtatgtatgtgtagaagcttaaaaaaaggagctaaaatggacattttgttagtgatatgagtaattttctataattatttatgtttgagatgtattgtgaagtaaatagaatatatttggttctacttaaaaatacatttatttagatattaaaaaataatttattaattaaaagttcatttcttatcgtatttttacattatattatattaaaatatgttatatatatcatatctttatataatactagaagtcctaattaatctgaaagttaagtaattgattttaagtttgaatttgatgaattaagactaaaatgataagtcattgaacaaagaatttacaagttttctcagacattagaaacatatttcaactgagtagtgtttaggtccctttagaagaaaagattctcttgcttccatcaagctgaactccctctagcagatcaatttcaacttctttcagatattgaagatcaacactccttcttcaatccttgaatatccaatgaattacaatctgcaacaacaacaacaacaaaaattacaaaaaagtattttgctctaacagagcaagaatcactagaagattctcttaaatatatagagttagttagaaaaagctaattcagcttagttagaaaaaactagttcagcttacttaactaacacttcgataacatcgacttaactaactaacacactaactgatcaatccaactggcaacgagttgaaccaaaaaataaaacaaattaaaattaaaagttgacgacttagcaaaagataaatgaagttaaactaaacaggtgcatctaaaaaaaacttagttgatcaactcaaatagtcaaaaaaaaaaaatagttcagaatagggctgtaggctgtacaaaaaaagtttaaaccgcccaaaccgaataacccgcc

SEQ ID NO: 318028 - DNA, 894 bp, Cannabis indica
actatgtagaattttaactacaaaaccacgtaaaaaaaccctgtgctcatatattattttgctatagcttttattttttctgtgttgaattattatcgtgaggctcaaatttggttaacgaaaatctgcattaacagttgtcttttgccacataaaaaattaataatttttttcactactacatatatgtctgttttcgtcggtttctaactgacatttaaactttttccttcggtttataatcgacgcatatgtcgttcacacaaataaatattattttgcgtcattttttatccgtcggtattaaaaaatcacgtcattttggattcggcataaatagaagaaaaatcaaatttttaactatattaccttcagttttgtaccgacacatactaaatagttaaaaaaaatcaaatctagctccattcaaatccctccacacatcaaaaaccgtaaagatagaaattataaacagtttttacaatataataaatcaaaaaacaaacgaaaaaattgtgcaaacaccatggagctcccgccgttgacatcaggccctgcaaaagaaataggaaaacatcaaatttatgagagagatctcgaaagaatgagagagataaaaagagatcctgagagagaacattacctctcgtcgcacgatggttttagttcgagtggccaccaccatataggcgttgtgcgagagagcgtaatagtggctcttggacggtaggagcccataacttgacggtgtgggactaagatgggcgtgcaagagagatcgcgagagaagagaaagaagagagggacaggagagaaaatcgggtgcagttttgatggggtgatgctgaatagaaatttaggttaggtattttatatagtagggttttatgtgtt

SEQ ID NO: 318029 - DNA, 1199 bp, Cannabis indica
  modified_base (42)..(42): a, c, t, g, unknown or other
ttgctcaaagagccgttcgctcctccgttaccccctgcgacngagagaaagagatagacattttgagatgtgcggctgtgtttttcaattaggtttttgtctttagggttacacacttttctatatataccctatttgattttacccaaattaattattttattttatataaaataaagtaaaatctgatacactttaattttatcccaattgattattttattacttatctatttaaaataaaataaaatctaacaataaaagagatttttttataccccaaaagtttctaaaaatatcatattttaataatttttttatgtaaaattttacttttttcttccaattcatattcttaaaaaatatacccatcaaataaaaataaattatatttcaaacattataacaaaaaaattaaaataaaataaaaaatatacatatacatgatttagataaaaaaaaatatgaaaataaaatcaaaataagtattgaaattaacataaaataatgtgaggaatttttttttaaaaaaatattaagagtaattttttaaaattatttaagtttattttttttttaaataatggggtgtaattattgggtgcaaattgaactctcctagtaaaataacatgttaaatagattttttcccaacagttaataaatgttgggaatactaagtattccccacagttataaactgtggggaattagtattttccccaacatttgtaagctgttggcatacactgttttcttttaaaaagttctatttagtattgcccacggttctccactgttggtattgatttttcccaacggtgtttttgcttcggttctaaactgttgggaaaagcctccacttatattttccaacggttttcacaattgaccatcttattaaccgttaggaaaagccaattttgtagtagtgcttgctgaattttctagaacaaaggttgaagttgctggtctttctctggtttgggttgtccgaacaaggagagagagaaatgaggatgagttttctaatttcttgatttttctttgttttttctctaaaagaataacgaaaaatgaattaatcttttcctgaaaatagcaatggctaggtgtccacaccctaggctgccacctaattcctcacttgcccaattactaaaataccccttttgcttaacttaggcaatttaaagttt

SEQ ID NO: 318030 - DNA, 1216 bp, Cannabis indica
tataaactatccaatatgtagagatgaatctttacatgtttatgaatgtaaattttcgttgaacaattaagttaaaacttttaagcaaattaaaaacaaaagaaattacataaattaagaaataaatagaactcgtaaacaactattcaactaaaaaaattcctcaaaactattcagctatttaacacatgtatccaaaacttcatacaagtatgaaaataacagtaagaagaagaagaaagctgacctcctcctcgtcccaatcaaacatttctgacgaagaatccaaaaccaaaatcgaagaaacacaggtaaggtatttcacacatcgccgacaaatttcagataaagattcagaaagaaaacatcaaagtttccaggtagccaaacagcaaaatcccaaggaaaaaccagagagagagagagaaagaaagcgctagagagagctaagggagtggtcgtaagtgggacccacgtcacgtgacgtcatggaaaagaaaaatggtggtggaattaagtgacacgtggaggggtcgtatcgaaattgtggtcgggttaagcccaatcaaatccttgattcttattggtcagtgatttaagatttttattttaatttattttaataagtaattatggtctagaatatttgagctctcgttttcaggtgggcccccaccccaccttcaccttgtacacctaacattcgattaaacgtggatctcaggttcttttattattattattttattttttgtttagtaagggaaaaaatataaaaatattgttaaaaacataaatttattaaattttaaatgtggtatctaatatctatgatgaatgctaattgttactataattaatttattttttaaatctaattgttactataatttaagattagacattagagattttagtttagtactagtgatagaattaatagtcaccgtcaacattttaataattgttttagtatttgcttcagcataagtaaaaaaaataataatcagctactgtagttacagttgaggttatttttttggacttttttatttttactacctcaaaataattttttttttaagaaaatttacataaaaaactccaattgcaacaaaaaatacgtatagaaactcttattgcaactagcgactgcaaactattttagaaacccaaaccgtaaatttgaaaaaaaaaattaaaaaaatagtaatat

SEQ ID NO: 318031 - DNA, 940 bp, Cannabis indica
atggattggcctataaataccctagaggaagcacaaagaaagagactttttctttggattctgatcctttttttttcaaaccttcacctttggattgaaaactcttcatcaagaaaacacattactgtaacctattattaactccagaatattcctactaagctttttcttcctcaagaggaacacggtggaaatgagtaaaagtctattatttttgtatttgtataaacaatcaatagccaaagaggctaataaaatggactcgtgcactaaggatagttaacgcctgaaccacttaaaaatctcttgtttgttatttcattatctacgccttcattactttcttaagctctaaaaatattcagttgtcgaaaaactcggtaaacatacaccaataacaaaataactccttaaataatgtttaacaattcaacaattcaataattaactaagctatctcttttcaacttgtaatttcatgatgagttttttacggctaaaccctctcaactatgggtgtataaatttttttgtaaactgcccaaattgaacaacctgcccaaaccaaatcgaaataacccgataaaaaatacaaactaaaaaactcaacaaaaatataacatgtctaatctttatattaggcgggctgaaaataatactaacctgcccaatcaacgtgaattaacctgactaactcaattaagaggattttttttatatatatttatatattttattatatatagttatatatgatataatttatacgactataaaaaattataaagttgaaactaatatatatttttttatagtggttgatttgaactctcaattcaatctatacatatttgtctcattattacgattaactaaaatataacaattgaatgtaaaaaaaaatattagtggtcggcttggacgggttaacccgaccaaa

SEQ ID NO: 318032 - DNA, 651 bp, Cannabis indica
aaatgttggttttgataagatttcaattatgagagattaaaagttttttcacattagattttgaattaagtatgtgtttatcataaaataaagaaataaatatatatgtacgtatcaaatattgaattggactaaatttgattcattgtaatataaataaaaaagatattatgatgtttgatttatttttaaaatagcaatatataggaatcgagtagtgtatttacaaaaatttttttactttcaatttttttcttaataaaggaatgatataaaataaaggtataatttataaattagggtcatatttgtttatatataaatgagtgtaatagtaattatttatgtttatatatatctttaatggttatttgtataaagattattacattgtataaaatataacaaaacttatttatacatatatattagtttagaattaattattagttctacataaatatatttataaactctatatattttattaaaatgtactaatcatagaggtatattttttcttaatacgagatttagaaaaattaagacttaattttttaataataaattagaagttactcttgaatataatattcttaagagaaatgcttagaggcacgggtaatacttttctaagtgtcatattgctat

SEQ ID NO: 318033 - DNA, 475 bp, Cannabis indica
gtttatttaggtgaaataaattgagaaaatcaaatagatatttaggtgtaagttgtgggagaaaagattggtattttggcattttctaagtctttttgggctgagaggagcaaaataacaagtcaatttcttcttcttttttttcttctacaggcaccacatggccggttgcagtaggctgattgatctgacgacgttgacgtggcgatctggggttgggtgtacgctgaaagaggcgggacccgcgtggaaggaataaagagaggccttctggtacgttatttgcatctgccgagagtgggaagcactctctactctggaccgtcaataaagagttggacggctgagatgcgagtcaacttttgattgcaagtggctgatctgattttcttttgaaaattccacttttaactccatttctcccatatttttttaatggggagtgatatttgcaccccttaaacttctaaataca

SEQ ID NO: 318034 - DNA, 831 bp, Cannabis indica
ttatgattatctattgttaaaatcttaatagtcaaagatcctctatagatgatctaccccgaatagggataaatttaccgttctaccctcactataagaatgtacacttttgccgttgtaattaattaattgccccgacagaagtgtacatttgtcgacgaaagtcaacaaatgtgtcattaaaaggagtcaaattaattggtctagttccccttttactggcgcattatctcgccggtaatagttagttttgccgccgaaatccttaattttgctgacaaatgtgggcaatccaaccgccaaaaggtgggaacttttggcagttcgagtcaccttttgccagcaaacctaaatgcaccgataaaaatgaaaaaaatatttattaccttttgccggcgcgtaaatgcaccagcaaaagtgtagggaaaaaaaagcgatcaaattctcttgcagtgaaaaaacgtgcatgcaaaagtaggtgaaaacttataccggcgcatttaattgcaccggcaaaagtattcgcattttatcgaatcgacacgttgcattaggttttggcttttgccggcgcacaaatgtactggtaaaagctgtgaaattttttggcggtcaacttctcgcccaaatgaaaatgtgggtgaaaactttggttgaaattttgccggcgcattaatttgcaccagcaaaagttccaacattaatgaaacaatacgtttcatgtgtttttattcagctttgacttttttcggcgtgcctaaaggcatcggcaaaagtccaggctgaataaaacctgggacgaaaccccctcccccattttcctcttttttt

SEQ ID NO: 318035 - DNA, 1326 bp, Cannabis indica
agaacagaacagacattccatcaggaccaggagccttgcggttattcatggcaaaaatggttcttttgatctcatctgggctagggcatgaaatgagagactcaggttcttcccaagagagtctctcctggaataaatgactacaatcatataccatgccattatccgctcctgagaaaatacctttgaaaaagtctatgaattctctaccaataagctcacgactagatatccagagattatttttatctaaaatactctcaatggcatttcttctccctttaatggcagcagacaaaaagaataactttgaacatttatccccttcctttagctaagaaattcttgccctttgtttccagtaaatcgcttttctttcctgagattcattcagctcacgtcttaaatcacattcccggttccagtctcgagatccaacaggaagtctctgcaaatctttgagcttcttttcgaggtccttaatgaccatatctagcttgcaaaactgggtacggttccagtgcagaagagcgacccttgtggcacccacctttttaaacacacgggcagggggccaagaatggctaactgacttccaagcatttggaactaccaacttgcttctctcatcacgagtccacccttcttcaaatttaaaacatctctggaacctcggttccttgccgcccgaaagaagacaaagaggcctgtggtcagagttactagtctaaatagaacagagaatcgctctaggaaacagattgagccaagctccattaactaaccatttatcaagggctgactttacatgactccgaccagagcggtgattatcccaagtcatcttatccccttgaataggcatattaataagaccacaggagtcaactagattagagatgaccgggataaagggatctcgacccaaggtaccttccctttcagaacactgagaacaaaattagtatctcccaaaataagccacgggccaccaaatttatctcctaacttcaagaactcagaccaaaacattttcttggtgttcatatagggaggaccataaacacaagagaggagccacgggtgactaggggggtctgaatacactaacccagaaatatgattacaagtactagatacacattcaaaactaaatcccatcttccaagccaaaataatgcctccagcagtaccagacggaggaacacaaatattaaagtaaaagtggagatttttaagagtacgtaccagaggtttaacatccacttttagctcggacagaaaaaaaaaatccggagagcgcgatctgatcagggacttcagttc

SEQ ID NO: 318036 - DNA, 1584 bp, Cannabis indica
aaataagttcgcatgtatgaaatctagaagtaagcaaccataccgatagtgggtgaacactcactttaccacattatgggctacaaaattacaagttctattaaaagataaaaagcaactgtcaaaaaaagaaaaggctattacaaaacgaaacatagttcaaaagaatccaagaggaatcctttccagagagagtgttgataaataccctagagtcgctctccaccataataaacttgtggcctttcgcttttgccacttctaacgctaaacatcaagcagtcgctaacctagccagagcatcaacaaactctaaaagttttgttctaacccaaaccacctcatcaaggtggttccttcctaccacagcgatacacatgctctcctagccaactctaacatcacaatttagtttgagtcaatcctagagaggagggcgccaaacatccaccacactgtcggggagggagagagaaagatggaaccacaatactctgcataagatgtacacatagagacaatgcaatgggtcacattatccagcctattattgtgtaccttaccattgcgaacccgccaaatggtatcaatagtagtcgacgcgtaaaggaacacctcatcagtattaatgccttagttttttcaatcctagatgaatttcacccaatcctacatgcgaataccagtactgacaatgggaaagataccccacggagaagacctccataaatgaaatgccaatcctcaaccctacaaatagggaaatcttatcctcaacatggaatttcttattgagaatctctcgaactggtagagcattagacaggatacaccaccacaggaccttatggcactctagaattttaatattccaaagcttattctagagagagggggcaacctcacaatgaaggactctctataaagcttggatcagataggtagacttgcaagagaagcgcacacttttgtccttagtctaaatccacttatttttatcttgactcgtaggttgccaaccttttaaaatggcagacacagtctctttgttaaaaaaagtcgtacaacttctgaacatcccaaccactgctttctgacaacaaatcagcaacttttgaaacactggaagcactaggtttattagacgtttggataaattttatcaataaccatatgacacttcgagtgatacgaggacccactaatcttttttagtatttctcagttttgaactagatggatgaattacttttattgacacctactttttctttcctcattttctaaatgcatctcttaaaaaaataaaataaaactcttatactcacaccctttattagttttagtttagtacaaaattacttttaaagcatctctatttatgcattaatttagtgatacattgtaatgtcccccgcttcaagcctctattgggtccttacacccacagactaatggctcttatacacgagtacgtcactctggctgcttcctggactgatgattgaccctatagaccaaaatgagtgttttcagcgtgctttgtcctcactcgcacaattaccctaggtcaagcacgcttaa

SEQ ID NO: 318037 - DNA, 1607 bp, Cannabis indica
atttttaaaaataaaatttaaatattaatttgaattctatttttgatatggtaattatttagaatttttttgaaaattgcttcggatgctagctatacactgattaattataataataaccatatatataatataaaaatatatatataaacaaaaacgttcctgccgataaacacatcattaattattatatatttaatctgtacattgtatactaatatatatatatatatataattatatatgcagattcgatgacataaacacagaaagattgataatggaaaggaaagaaagtgggattgaaacagatatattttacttcgacgcaaagacaatcaattgggaagaatattttctcactgttcatgttcctggtatagtcaaatatgttttcaaatgatatataattaattaattaattcaaattgttttaaattatatatatatataaaaaaatgggctaattaatattattattattattattattttataaataattaatattggtttattatgaactcaattatatattgttaatttgtattaatatcttaattataaatttaatacatatgtacgtctgaaacatatgcatgcatgcatgcatgcatggtacgtactacgtgctaatattgaatgtaatctttgtcttcataaatatttatattcatgtatcatgttgtactacaaaattaataatatattattgtttattcaaattagaaaaagtgaatgttaaaatattgtgtgtctaatattggaattatatatatatatatatatgtatgacgtcatctcaaatatatattgtctttctttgttgccgcattttaaacatacttcccaatagcagttatattttattttatttggtaagaaaagaaattaattttatggaaccaaattacaaatttttacaacaaccaaaaactctacaaatgggactcaactaattcctgtcagtattagaaatttttttagcagaaaaattagtaattctattacatacatcatgcttaatttcttttcaaaaagcttcattaatgaaacacccaaatcaatattgacaactttctaacctattcaaattaggttttctttatttacaatatccgaagatttaattctcccattttcttctggcctacaaatttctttccaagctacactgttgcaagccatcaaagtgtgctttttccttccaaaaagaacgctctacaaatgtcattataataagtccgcatgagaaccatcttaggaatcacttttatccagcacaatttgttactgcgcaggtaaaagtaactttcaccaacgcatttcgcaaactgcgctggtaaaaaggtcaaagttttaccgacacacatctgcagtgactaaaatctaacatttattaacgcatttacgcgctggaaaaaattatttttgtcaatgcttttcattttgtgctggtaaaaattttaataccaactgttgaccaaagttttcggcaactaataaaatattataagactatagagctgtaagaaaattagagaaggatttttacgtggttcgggcgttaatgagccttagtccacgagtctttgttatttatggat

SEQ ID NO: 318038 - DNA, 779 bp, Cannabis indica
aatataaaaagagtataaagtgtaattttctctaagaaaaaacaggttaacatgacgtaaaaatattgggcatactctttaaaaatatacataacacgatttatgtatttttaaaaatacaatataatatgagtcgagctaacacgacacacgaaaatttacaacattacaccaacacgacccaatctaatccaaattgattttttaatattaaatatttataattaaaaacatgatatattatacatcgaatgtgcttgttctttctctctgtgattcactcataactttatcaaagtcaataatattaatcacttagagagagagagagtgatgaattgacttttctaagtaaatatatatagttgtcttaatcatgttcgatctgtttgtggttaagaactcaaaattattgaaaccaattacaaaaagcaaatctattaataataatgtttattaataaaataaaataaaaaaaacacataattctctctatatatatgtaacttttactatatcataacatgcatatatatacaattgcttttttttctactactatataatatatataataaacaaacgaaccaccttttcaatagattctataatatatataatctaattaatccctatcaaagttgggttttcactggacaacactcatatctatatatatatataaatatagggtaagattatggtaagacctagcaaaagttccctaccggtaggaaactttttttgaccattgattttagatcatgtggttattatga

SEQ ID NO: 318039 - DNA, 547 bp, Cannabis indica
aaataaaaagtgatacatgaattctaattttatttttaataataaaacattttatttttaaaataaataagaagtcacccatgaatttctcataaaccaagaattcggttatataggcacactttatatagaatagatatatttagttagttttattgtataaaaatccaattaatacttttaaattcatagaataacacttgcaacttatttagttaaattcataattaatttataaaatttatttgcagcatttaaaattgacaaaaacaaataatgggataattaagggtaatataaatatattaaaaaattataaatgatggcaatgtgccaaagtagttagtttttagaaatagaagatactcattaattattatttaaaacaacaggtactaattatgtattttcataaaacatagggtacaaaatgatcatttagtcatttttaaaagacaaaagtgtagtagaatttttgtttttgaaaaacaaaaatttgtttctttactattttagttttttcgattttaaaaattaaaaaataaaa

SEQ ID NO: 318040 - DNA, 1971 bp, Cannabis indica
tatcaaaattcaaggaaaaaaatacctaattagccttatcattattatcaactctatgtatatatatatatatataattttttttttgaatgataatatgcaatatgatgatgtgatggggcaagcttgatttctcaaagcttagttaaaggcaaagcccattttatatgaagtaataactttgggcttatttcattactcaattatatatgggctaatttcgagcaacaaaaaaattatttatgggctaagtccatgggacaaacttcatgaatttcaagaatgattttaggcccaaagtgttgtgatttttgttttgggggtaaattgaaaaaatatctcttttatttatcaattaattaaatttacttctaattttatatttcattgaaacatatttctttttatacgtattgtacctaaaataccctgatataagggagtcacaaagagagtaaattgaggtgacaggggtaaaatcagtaaagtattttaaaaaaaaaggtaaaaataataggctttaaaaaagagagtaaaaataaaagaggacaatataaaaaaggtatagagtctaatttcctttttttttccttttttttttgtttttgttttttttttctttttattattattgttttggtatttaaagtgtcatgaaatttaaacttttttattacaattttacaagattttgctttttggcaggtttttaacttgtactttcttgttccggaaaatgttttcatgttattttcatgtcacgattaaaaaatatattattttgaaaataattgttcgtatttttgtaaaaaaaaaatcataaaaatattaataaaactgtgagtttatatttttataaactttattatttttggataattaggatttttgttcctcaaactttgacatatgctaaatcattttctctgaacttctctcccccaccccgcgaactattgagattattagatttaagaacgtgtgaccaattttattaataaaagcttgacgtggatgaataagttcaagaattttttttttttttgaaatacttatttttttatcaaaggttcacgggataagatttagtatatgttaaagttcaggaggcacgtttaatagatatcaaagttcaggggcacaatttagtacatagacaatcgtcgtacatgcccgaccatgagcataggcgggctaggcctgttcttaaggcccacctagtctaaaggcctagaaaaaaaattctcttttaaaattatacattttttttactaattttaaaaataccatatttcttttaaataagggcctaaatattttttttcttgtgacacattatatttcaggactggtcttgtcgtcgtgttagtaaaattaaatggaagttgatagaagtccttaaatctaacaatttcaaaagtttcggggagggattttcaatgacctgaaatgttcagagggcataatttagtacatatcaaaattcaagagacaaaaatcctaattaacctttagaatatttacgaaaatatctctacttattttcaattttaactataaatagaataatcccattttcttacctatgcacaattaataaataaaaaacacaaaaatgatatttaccaatataaatttttgtttatttttttgaaaaatcgcttgtgttgtattattgataatgctgcttatcatgttatgtttgttattgtatcttttgtttatatgtttggtaactataaatttttcctttttaaattttaactaaatacttttatagtcaatattactttaagataagttgaagaatgcctttttcttgtatgcattaattaaaaatattttcatattatattttattaaaagatatttatttttataagtgggttgcccaatataccttcactttttacttaagtctactacactaaataatttatactaaactaaggggtctaatatggacatcat

SEQ ID NO: 318041 - DNA, 1492 bp, Cannabis indica
aatggcctgtatttgtttgattccaaccatgtcaagattgtccctcctcttcctaagcagcctgccacagaatccaacaccagtagcaccagtagcagctcttttccagcctccttagaagttaaaacaacctacatggtcacccttaataatgccaaagtagcagtatctaaatgtgtccaatgtaattctgaagtacaaaatgatttcactctttggcacaatagactagggcatccttctcaaagagttgtacaaactgttttacagtcatgtaacattcccataagcaataaaatttctcatttttccatttgttcagcttgttgtcttggcaagattcataagttcccatttcccaaagcttccactactgttattaatgaacctttgcagcttgtagtctctgatttatggggaccttcatacactccatccttcaacaattacaagtactatatacactttgttgatgtgtattccaggtttacatggctttatctactgaaaaacaagtctgatgctcttaaagtcttcctaaactttaaggctgaagctgagttacaactaggaaaaaaaactgaaatgcctacaaaccgattgggggggtgagtatagatccttcactaagtatcttactgaccatggaatccaacatagacacccttgtcccaccacacatcaacaaaatggcctagctgaaagaaagcataggcacattgttgaaaatggtcttgctttgcttgctcaagcatctttaccacttaagttttgggatgaggctttttcgaacaactgtctacctccacaatagactccccaccccacttcttggtcataaatctcccattgaaactctgtttaatatccaacctgattacaccacctttagaacctttggttgtaggtgtttccccaacattaggccatataataaacacaagttggaatataggtctactccctgtacctttttgggatatagcctcaatcacaaagggtacaagtgcctagattcaaatgggagactttacatttctagggatgtcatttttgaggagtttgcttttccctatgctaaaaccagtaccatttcacccaatacagtttctgtctccactggtgtatcttctattatccctacatgttctcattcttcttgttcttacacaatggctgatatattgcactcaaatgttgagaatgaccaacctgttaccacaaatcatgatttatctcccactaacagttgccttcctagtcgatcttctggttttgatgcaggtcagtccactacaggtgttgttttgtctgattgtccacaggttgtcactcataatgaacaacaacctccttcatcagattgtcctactggtgtgcctctccctgctggtgtggacactactgttgttgctgcatctggttgtagcagtgacatagctactgctgcttccactatcagtggctgccatcaaactgttgggttttatgc

SEQ ID NO: 318042 - DNA, 797 bp, Cannabis indica
tttttatttatttatttagcatcatataatttgtttaatagcgattcacttacctgattaggcatgctctctcttcacagctcacgagtcacctttgccttatttaaatcctctctcactcaaataaatgtaatattagtttttcttaaaagattactaagggaacttcatctactggaaagaagactcaacattcacattcccaatcatctaattattaccttaattgacattatttttgatattatgagatgtcaaatattgcagaaatagaactaaaaaattatattgatgataacaattcaaaaactgcttataatataggtgtttcattgtataggaggaggtagattaatttatcatacttcagatatgatgtttgaagttgctcgtttgaagctttcggtaaagcttcacaagcttaggtatgagagttgctaatttatgatttttagctatttttaagcttagcaatcatgtcctaacaatttggttaatgtttcaggagactatgttcggagtcttaatgaatttcacaaaccactttaaatgtattcgcaaggtttgtagatcactagtaatatgggtgatgttcatgtgataaatttgatgttttcatacaatgactacttgatataattgagaagataaaatttgagaatacattgacttgaagttatagtactactatataatataagatgacttgaagataaaatacttccgacccaatgatgatgaataagtggttcaatcttttatcttttgctttttattaatgtttatttgaacttatg

SEQ ID NO: 318043 - DNA, 1578 bp, Cannabis indica
tttggcacggcagtaagtgaggtaagtctcttgcaaaaacattcatatttcgttgaagaattgcttacataaaataatttctcaactaaacctataactggtctgaactattaaacatcaaacatttcatttatcttactaaaaatctgattatcagcatgatagttcagtctttagctaatgaaaaatatttagtctgtgactgttttactgaatacatctcatgacaggttgagataaatcttctgactggagaaacctccattctgcaatcggatattatctatgattgtggacaaagtctcaaccctgcagtagatcttggacaggtaaccctgattccatgtgctatcttacgaagtttctgatctattgttcattccatagatttatattggtattttcagtattataggctgaaaaggtttcatttatactatgaatgaaagaagcaaaatagttcattccaattgtacggggtgagataatgttacactggcatttttggctgtaaatctgattatctatataatcttttgtttcttttaaaaagaaaaacaaagagggaaaatgttaattctgaaggggaaaaagaaaaaggtgtttcttaagcctaaattggaacctagatttttgtagggaaaggaatagctaaggaaaaagtgaggaaagaaagggtgtagaaaaggatatatggagtgggaaaaaaatgatttccatgaaaaaattctcatattttggttctttgacaaaagtaaaggtgtggtctcatggtggaagagaactctatatctgacccaagtttttctcagtttacctctaagttgtacattttaaaagtaattggtattggttaccaaatagtatatcaagttgtcttatttagtattagattatttgcggctaaactagccaaactttatgttaatattttcattacaactacatccactaagaagaattatcgaacactttctgtttaagcctatcaataatgactttacagtcatttcaatatgtgagatagacaaaagaaaacgcagagctccactgaagtgcaatctgcaaggctttagcttcgagattatggagttaaattttccatgtccagaatagccaagccacctagcaccactccttaagaatctctcacaacagaaaaccatgtcttgcctttatcagctgaagtagcagcatcaagattcatttttgagacagccctaaggtggtgtattccaagcaatgcccaaacgatcaaccttaatagcaccctaaattatctaaaatttctaaaaaaaaaaatgtgtaaggtcataacttgtctctgtgtatgaactagagcacccagtatgtactaattcagcactgtaaccgttctctaaaaaatatgtacttatttattatgggcctatatataactcccaaatctgtgatgacttttcaagaaaaacattacttggctgttgacaatatatttgtgcagattgaaggagcttttgtacaaggagttgggtttttcttgtacgaagaatacttaacaaattctgatggactagtcactgctaatgggacatggac

SEQ ID NO: 318044 - DNA, 570 bp, Cannabis indica
atccaaaagtttgcacatctgacgtggcatttacatgtggcatgatctagctgacattaaatgagaatggacctccgaccaggagtgtgcatggcagatcccatatgagattagtgctcatggactgtggactgcctcctaagcaatcagctggctcaaccatcattatgctagccagagaggggcaaatcaatgtagccttcaggattttttcataagtaacttcataaaaaagataagtcttaagaagggcctgaccaggtggtcaatatgccggccaaaagaaaaaatgcccagaatgtaaaactaagctccatgagtctcaaggagggcctggtcgggtggtcaatagtgatatgcacgtcattatctcacaatcaatatagctaaaaggggagtaggttattacccaataatggtttcaatctatgccataactagaaaattttatatcaccgacacccgtgcttacgcttgatacgtcccaaggaatattgggtcacctaatcaggtgagtccgtacctacactcggtacccatcatttgtcactgacgcccgtacctacaccc

SEQ ID NO: 318045 - DNA, 884 bp, Cannabis indica
aaatattcataagagcaaatatgtactcccaaaaaaataataaaacatgatgattccaatacatatgattttaatttttttgcttattttagtagaatttatgaagtatttttttcttcaaaattgaatctataaagtattggttgataatttttttttaataaaatgtccaattttactttttgtccgagacccccaaattacttggaccggtcctatatatattggttagagctataataatatgtgtaactattttattttgaagcatatatatgtgaatataatttatgttataataaatattaaataacttaatttaaaaaatttacaaattcaaaaataacttatccaattcgcattattgctaattaaatttgagttgtttgtagattaaattggatctaaaatataaaatctctactttgataaacacctttaattttatcaagtatatgtgaaaatataaactaattcaaagacgtcgataaatgtaatcatccctagaatattagttcaaaattagtttacatttgaatatttaaagagcaactattgttctatttgaaactcgttactattacagatgacaaatgcccaaaaatagaaataaaagtccgaattattattgttgtaagattttgcttatccattaacactttttgcagatttgaactagaagtattcttcattcacaagtcatgacattcttgtatttatcacatcacatccatttttagcagcattcaaagtttatcagaaatgaaaatgcaactcaatagagagatttgagctaattaaacacattctttcattaagtaattcaacaaactcctcataataatctacaagcgtgggatatgcatgtatctaaaaccatacat

SEQ ID NO: 318046 - DNA, 1178 bp, Cannabis indica
atttacataaagttattatatttagttctaactaatttaaattaaaattagttaaattagtcattatacacaagaggacaagtacaattaattatatagttaaaaataagttttttggcaaaaaaaaaggtagcaaaatcttacaagagtcataattcaaaaatagatattggcgtctaaatcactttaatttttaaatttgtaacagttaaccccaaaaactgaaattgacggttcctcaagcccataacacacgtggcagttcctcaagccaattatttttgcaagctaatagctttttctttagggtgaccttgagtattttattgacagcttctacttgtccatttgtttgtggccttgcgaccacagagaaacttttgatgactccgtgttgatcgtagaaatttgtgaattcgtcacagtcgaattgctttccattgtctgagactattttgtgaggcaatccgtatcaacatacaatgttctttatgacaaagtccaaggctttcttggcagttatgatcttcatgggttcagtctctgtccactttgtgtaataatccaccgccactatgacatattttatcccaccctttcccgtgggtagggagcaaatgagatctattgcctgtatcgcaaagggtcagggactagtcatcaaagtaatttcattgggtggggctcttggtatatttgcaaacctctggcatggatcatacctaaggacgtagattatacaatctctcttcatcgtgtgccaaaaatacccttattttaatatggcatgttgcttgggcgtccagtgtggtctccacagaatctctcattgacttcttgcatgatctgtctagcttcaggatccgacacacatctcaaatatggcatgttgagcccccttcgatagagaataccatcgatcattaaataccgatgagcttggtactgtaattttttagacatggtcctttcttgaggtaattctcctgttgttatgtacttaatgaaagggtccatccaacccgacctttgctcattggtagccactgtttctttaccctgatgctaggttccgcaaggtgttcgacaggtaccacccccaacttctctatttaactatctgaggctagcttggccaggcagtctgcatggacgttcttttctcgtgggatttgctc

SEQ ID NO: 318047 - DNA, 3176 bp, Cannabis indica
caaaagatgatcctcaagacacgtcgaaggaggatcatcaaggcaaacctactgaaggcgatgctggagaaaaaaacactctcgacgagtcatattctgttgttgtcatggccaaaaatttctagttaactaaaagcaggctatctcgtcaagatcagttcaacgagagcctgcttggaaagatgacaagaatagagatcatgatgacaaccatgaccaaaggaatccttaatgtgtcatgacgatcagaggaaacaattcaaaagaaagaacatgctataaaagagttggagaattcttttctttggaagaagatgagaaataaaaatcttttaagagaactattagatgttcaaaatgctcatggctcaaggagcaagcttcttgttgaaactcagaatagattggtggctgagcagtttttagttcataaatcccacatagagaagcttgaatgggaagaaaaatttcacgcttgaaagaggttatcttctctttctgcgagtttctctgatttgtaaccttttgttgcttcatacatggtgtcaatcttgcttcccctaatcccatcttctttaaggtttacttgtaaataatattgacgaaactctcgttatccacgagaaccctgtgtgagggtaccgtacgtgtgacacatcttaattagtaaagacaatgggaggttcatcagatttgctctttttataggctctggagcgaaagctaatgtctcgtttttaacttcatttatatacctcttctatgcattattgctatttcctgtgaggtgtggccctccagaaataatcagtatatccttgccctcaacagggggaggttgtaaccttgggttattcaggttattgggcagattttgtttgtttccttgtggtctcacaaattgcctcaaataacctcgcgagatgagattttcaatttcatatttcagctgacggtattcttcaatggtatgcctgatatctctatggaaacgataatatttgttaggatcttgcttgtttctcgcatgtctcattggatcggttttgggaaatgtgacactgttttcattggcgagatagatattttcacgagtttcattcaatttagtatatactaagtaaatgggaacatagttctcatgcttcttttgtttctttttgtctttggacgagtcactcgactcatcctttttcttggtatttgagctagtaggatttgaatttcctactttggtggtgacagtgctcgctgttaccgtacttgtgctgggtttatctcccaagctggactttaacaacttaatttcatttcgtgcatcttccttctgcacgaaaaatttgtgctctttcattgaactcgttaatgtttttaacaggacaactttgtaagtcatgccataattctcccctacagttgacaaatcgattgtaattccagcttgaaggattgttaactgaatattgtcattcagatgcttgactttggatgtggccgtactaaaatgacttaagtacgcctttagggattctcctagttgctgcttgacattggttagcgaaggtgcttatggtcttcgatcttttgcagcttggaattgttttttgaaatcctttgataattgttcttaggaagttatggaatggtcggtaaattttttaaaccaactacttgcagctcctattaatgaagttggaaataatatgcatcgcaagtcgtttgaaatatttcttacttgcattatggtattgaatttgttcaggtgcgctacaggatcacttgtaccatcatattgtgcgacataaggatttttgaatccttgaggaaattgcgaatcaaaatattaagatggaatgattttgtctctttgtctaagtcatatccgggtaatttcccatattctccatcctggttttcctgaacttatcttccaactggatttcttgcaattgtattggatccacaggttgttgctccatgggttgtatgctagcattttgatttagttgcttacgtaaatctggtgcattacggtttaaatgctcacgtaggtcagcttgtctttggtttaactattcgcaaagatcaaggttgcgacgtcctttgatcataattactcacagatcttgttcttgagtaactttcagattggtaactgcgagagttacttatactttcttggtcgctataataacgccgcgatcctccttcatcttgcattcacctatcacgggaatgagttctggttgaccaactgtgctcgtgtgtccttgatcttaacccaccttcatttgtacttgaaccaaattcatgtgacccttctcgcatcagcctcctccttcggaagagatttgacacacggccccttacttagataggtgtgtgcattttctctatcgttgagagtagggctttgcggatgccttgggggtcgacctgtcccaggttgatttccagcatttctcttatcatgctgcggaatttcctgggttccaggtcacactagtctggcattcacattcatgcgagatgactctactatatcaggttgttcattctgttggtttgcaaatccatgggaagtttctgcattatcacgtcaagcctcttgatttcttgtatttttagtattttatgggttttctctatccattggaatatccctcacatttccaggttgttcttctcgagtgtttggggtgttcccttgattgtttttgtgtctcctagtcctagaaactcgaggccttccctgtggtcgccttacagacggatcaggttgagtttgaggagtccctccctgtgcagccctggctaccagtgcttctcgttctaactcgggattcatccagttcaactcaaccatgtgtcaaagttacctattttctagttccactagaggcacatatcaggttggatcataagtgtcttcgcttcgtctttctgggatctgctcaccaattgggttgaaatctccattgttccttccagaacggggagttttagttgtgttgggttgctgggttggtcaatcgaaagttgcatatcacacgaatgtttcaattctaggaagcgtggatcgtgggttgaaggtgtgtgtaataggtatttgtataattttttttaatttgggctgtatatttgtttatttggctggctgattttatttttgtaat

SEQ ID NO: 318048 - DNA, 1220 bp, Cannabis indica
aaacagtaactagttactagttaccattttttcagctttggccaattcttttccaaagtgttccaaatcattcccacttgattttgaaccatttatacaccttataaatgaataaatcaagtctccaacaacaatattttcaataactatcattcattcacattcataaacaattagtaacatcttttactaatttaagagtgaaaaaagagatgagagttacatattcaagtgatcatcaatttaaaggatttgcaactcctattttgagatcattctacacaaattttgtaactccataatgtatgttacaatttaacaaaattaatactttgtcacacttaattatttataatttaattatttaatctacatattatattatataaaataatataacaacatgttgaggcaacctccttgtatttgttgttttaaataaatcttatgaattatgatagctcttaaatttcttaagactgtatcttttgtgcttttaggatcagtcttctcatatcattcacattatttttcgatatgactcgtcttatctttatgtgtccttgcctctctctttataaaatacttgttccgttgttttagttaagtccgagatgaacttcgtctttgttgtctcgataattactacctctccaattaataatttatacttttgacttagccttaataaattgttatagcgagacttaagtatagaattaattatagcacattttgaagtgatataattatcacgttcttctttatttatatgtttattttatttttgagcttatatccacgtattgtattcatatttattactcgaaatatggttataacatctctataatccttagatctcactgaaaacacaacaatcacttctgtgcttgccaaagaataagaggaatgttttgtgaaggttcggttcatgcatcttccatctaaataaccaataattgaaacaagaataagatacattagagaatatgctagacaattgagaaaataaagtattttatcttagtgatgaaatagatcatttaataaatattacactagagcatttacatgagtttctctacgatatttttcaaaatattttactaaaattttactctgtttattttacctaaacttttacatttcatcatacattaacttttttatcttttatctacaatcattttgttaattccatttttggcatatttaat

SEQ ID NO: 318049 - DNA, 2332 bp, Cannabis indica
aaaaagtgtttggcagctaaaaaacagcttattgaagaatttatggagaatgtacaactaaaatttaaagctgatacaacctaattttaagaaaaaactattttgatgaaaggactctataataaattattttgtactaaaaatgtactttattatttattatatatgactaaaaaatattttttttttgaaggaatttaataaatgattttgtactaaaaatgtattttattatttattatatatgacaaaaaaaattgaaagaatttttagttttaaaaataaataatatttaattttcttattttttttattttattttaaaatattttatattcatattattaacaaactacatcaaccttgagtttcttataaactacaatttttacgtacgagtgataaaaatgtaatttaaaaataatacaaattagtttaatcaaatgcaaataaatttatactgtggagaaaaaagaactaaagatatataaaaaataaaatttttacatataacataactttttatatatttgtgattataatgaactagattataacattatcattattataatagaatcttaacaactcacaacactttataaccaaacacttagtttagttttttttactacagttcttctacagtttttttttctctacagcacaactacagttatttttccccacaacacagttgtgccaaactatccctaaatgtagtatattaaaaaataaattaggattttttttagaaaattagttaaatattttataaataatagttaaatatataatatgatatttttcaaataaatttgggactatttgttaaagaatttttttgaaactttgggtgaggggctttaggcgtgagcctctgttgttcgatcgatccttgagttaatcctgttagaaaaaaaaaaaaatatgtgtcttgaaagttaacatgttttaactggaaaaagaataaaaaatattaaaccaacaattttcttaaaataatcactttatttatataataataaagaagtaatattgcacaacaataatttggtggattaagaaattatagtatgtattagatatttatttaacatggcatgtcatggaattttgtcaataaaagaaatttcacgtttttgtagtaattttaagattaggtattccataaatggatgtttaatttaggatatagaagaacacgtttattaattattaacaaactagctcttgtgtatctatcatattaactcagcagcaatagcacatgaccaacatctcacgtgtctttctttttttctattaccttatgtaccttatcatctacgcttagcaaaacatggatcctagactcacaaaatcgtgcacatgccttatatcacgtgtcttaatttcaaaatgaaaaactgcatatcttaaagcaactccaataaataaatgttaaatttagttttaaatcacacaaaaataataaaattctagcacaatattttttttttctattccaattacaatattcaaaattatactaaaattacattttttttattgttatattattttattaaattataaataaacacaaataacatatatataaaaaagttaacttataaatatattatttaaatattaaaaactaataaaaaagatttagtataatttatagtgtcactaatattagtggaacactataaacaatgttatatatatgataagttttaaaatataaatgaaatgaatttagtataaaatctcaataaaatttgacattttaatattcctttggagttggcctaaaaattatgatttcagatttttgttatcaactatcaagtttatgtagtatttcttctaataccaccacaaagacattttattaataataaaataattatcactatataatagtacttgattatcttaatacttcatttgcttttgcaatttaatttttgttggtcctttatataattaattacaattttagttgttaaaacatttttttaaaatgtatttagaacccaaaataaagaaatctaggaagtatttgaataaaccaaaaaaaaatataggactcttatgaagtattttaaaattatcctgttggtgaggaggatctttcctttgggaggtgaggtctaatgttatgttctaggagggattaaatgcaatgattttaaacatgttaatttattattattatgtttaaatatatgttaatgatttttcttaacattctttaatgccaggtaactttctgtttcatatctgtttaaattttaaaaaaatatatattttgttactctttttcatatatatatatata

SEQ ID NO: 318050 - DNA, 1742 bp, Cannabis indica
aaacggtccgtattaaccagaccaccaaaaagagtttccctagttacagtctacaatggtatagattatcgcagtctgaattcaaactgcgattttctggtttcgataagcagccctaattttgagaatattttcacaagctcaattaaatataaattacatattagttattttatttataggattacgaaaacgatgaataaaataataattttaatattttggtactttcatcacaattatatatatccataaataaatacaaaattaaaatgttttagcagcaaatttcaatttcacaattgtaaatacaaaagccaataaaaattgtagaaaacatggtcctttttttaagaaaaaaaaaaaatatatggtttttaggaaaaatctacaataaataagttaaaaaaaaaagagaacaaaaaggaaaaaaaaaaaaaaagggtaaccagttactttagggtagctagtcaggagagtaaccagttacctctttggggtgatgaatttcccatataataacttttttatgaaacaaagtcatattcttacaaacttgtaccatacaaataaaaatgaaaaatcctttaaaaattctacttctatatatgactgtcaaaggactgggccatctaatgtaactcttttgggccaagggccgaatagtagagcctgtttgcaagtacaagaccacaaattttgaaaattgatcagttagacccatatagcataataaggttgattaatattaaaataaataaaaaaatctagaaaggggagccaatttgttttttaaaatataaattattggtgtttttcaattaattttttttttaataaaacaagaaaaaaaagatgtgtagtacatacctacttagtaccgagcactgacaaattagcactgtcaattatgagaaaaagcttaaaaaaaaatggggagatttatacaaactcatcacttcagtagtcatcagtgtaccgtttaatcatcgttttgactatttaggtactaaaataaataaataaaaataaataaagtttgatattactaatcaacagtagtagaagagtagagtgtgtatagtaataataattagtacgtgtgttgtcttaatttttgctttttgattatgactgttgtgggaaagcccaaaatggcagttttagtgtactttgtaatagtgaacaatcactattaagtgttattatgctatttatatattattattattattattgctaggtatatatatagctatatatatatacgtttcatgcagtcatgattccattctatgtatattctacgttctagaacaatagatggatcgatcgagattgacaaaactacatatagagaacgataagtcaacaagataacgacaaagttttgatatatatatatacacatcttatcattatcttaagacaaatgctaagaaatgcctaaaagcatccgtagaccacaatgactaatgtgtagaaagaatagaatatatagtaagaatgtgttattttttcttattactaattagttttatgataaaatttcattcaatctcactacaagaaatgtcatttttatgagtataatagtaaattgtattgataaagaggtcaaagttttaccagcgtatatttacattggctaaaatcgaacttttaccaacgtatttacgcgttgggaaaaatcatttttgctagtgctttttattttatgctggcaaaaattctaatactaa

SEQ ID NO: 318051 - DNA, 1562 bp, Cannabis indica
ggcatagcacacttgtacgctacttgccctatcctctcaaggatttcaaaaggtccaatgaaccttgggctaagttttccaagtgacaaagttcccaaaccttccaagtgattatcggccaattgcttgctgcaatgtcctttataaagttccaaacaagttgatatgtacacgggttaaaactgtccttcctaagctgattgctcaaaaccaaggcagattcgtgcatggcagatttattggccataacataatgatttgccaatatcttatctgtcactatggaaggaagtctcgaaaagcaaattgtatctttaaattggatctccaaaaagcttatgacaccattgaatgtgactttatagaggagatgctacatgcattttggtttcccccgaaattcattctcctaattatgacttgtgtgagaactcttaagttctcgttgatgttcaatggttctctacatggcttttttgaatcaaagcgaggtcttagacagggagatccaatgtctccacttttgtttgtacttgtcatggaatacctctctcgcatcttataaaagatcggggagagggaagactttatttttcatgaaagatgtggagatttgagactgaatcacttgagttttgcagatgatgtcctacttttttgtaatggagatttcaaaagtatatatcccatactccaaggactcaaactattttcacaaacttcaggtttgtttcaaaatccatctaaaactgctttttatggcaacaatatgaatgattatgagatttagagagttcttgatattttgggcttcaagaaacatgatttacctttcaagtacctaggaattcctatatgtcctaagataatttcaacaactgaatgtggattattaattgaaaaaatggtggcaagaataagagttggagcaccaaaaatctgccatttattgcaagagtggttctcatgaactctgtattagtggccattcattcatattagtgtcaaatcatgatcctacccaggaaagtagtgctagaaattgaatccatttgtagaagttttttgtggaatggtaatcatgtagctacaggttctactgtagtggcttggaactttatttgtgatactaaaacagcaggtggattgtgtttcaggaacatctctgattggaatttggcagccatgttcaagtatgtttgggctattgcaaaaaaagaggacaacctatgggtaaagtgggtgcataatgtgtacataaaagaggaaagttggtggtcttataaggccatccctgcagccagctggtattggaggaagctggttagtataaaagagagagagcaagataactttttgatgaggttcaaggggtgttcattggatcacatctaatgtttttaggcctatccagatctgatccaattatatattggatgttagattttaccatctgatccgatctaattaattttgtcatccaatcgatccaacatccattggatattggattggatcagtttcatccattaaacgtatttcatatatatttatttgtttaa

SEQ ID NO: 318052 - DNA, 511 bp, Cannabis indica
aattgggttttctctgcttatcccccatctagttctcatgaagatactgctgtgcaaccgaagaccactaactctatgaaactgaagcactggcaggcccctgcaaagggaagcatctgtgtaaattgtgatgctgcggtgcaagagaactcgataggagtgggcattgagttcatttggcgaaactgggaggggcacatcatagtagcaggtatgatctatatgccaagtttatgtacagtcgagatggctgaggcttgggctattttcgaagctattaagagagtgccggctgctactacaggtcctatagaaattcaatctgattgtagggcggttgtggacaaactcaaaaaccaggagcagtattttgacgctgttagcactattttgcatcagatcaaaaactagatggaagcttaaaaaagtgtcaatattattcatgtaaaaagattcaataatgagtgtgctaatatgttagctaggagaagtttagctgatagaaccactc

SEQ ID NO: 318053 - DNA, 1103 bp, Cannabis indica
gaaggaaaagaaaattagaaggaaggagattgtttggtttatatatataaggaaggaaagaaaattggtatattgaaactatattatctctgaaattactaatagggtaatgtccatttcgtacccttttaatacattatcgaactatctgataaatataattctttttgtaagagatttaaatataaattgtgaattaatgaactacagaaactaaaataaattaatatttcaaaaacaaataaattaaaaatacaataatatagatatgttcgattgaagccctccatagcaacacaccagcatcgtcatcgtcctcatcacacagaccccttcccttgcaaattcaacaaaactctttttggaattacattaacatgtcagagcttttatcttactgtgttgttgttgttaatgtttttcttatgaagcaacaaatgcataagatctttttacaggtttataaattgtttaaggaacctcagtttctctaatctatttgtaaaatacatcatcaaattttttttttctatttttcatcacagttttatatcatatcaaaaattaccttatttaacatatatcattcaatatcacaaccaactactttactttggatgaaagtagctgaatgtagttctatctcaaaatcaattgacaataagagaaggaattcatttatcttatatatgacaatttattttcacacattaactatatgagactaactctaataactttagaaaaagaaagcatgggtcaaaggatgaggaagatgcaaccctcaaatatattatccgcgttcaactaaacttaattagttttttattttattttatttataaaaattaatttcaagtttcatttcattatttcgtaaatatctaaataatataatagtcagaattataaaatagataatttagaattattaaaaatttaatatacttagaaattagaatgtgtttgaaagtaaatatgtaattattagatggtgtaattactaaggtagtaattacactacattaaactacgtttcgatatgagatgttaatttttataagggcatgagaattggagagtataattaaaaaccctcaatt

SEQ ID NO: 318054 - DNA, 1310 bp, Cannabis indica
cttgattggaaaagaccttagagtttactatgaattcaaaactataaataatatatggcttttagaagaaccataaacaattgagtttacaggtaacatcagattcattgcacatgtatcaatcttattcatgtaaattttcgagttatcattaccaaattaattattcattcttgtaaactactttaataaatttgcttatagtttacctttgatgtacgtaaaagcctttgttttgctacacggaaccatgctacatatatcttaattaatgaccaaatcaaatttaattaatagtccaatgtctctgctcaatcaatctgacataatctgcaatatcaccaaaactaataatacacacagctaaccaatttggaaaataatgatacgagagctggaatttatgaacatataaaaacaagaagcaaaaaataataatcaaagattttgtttgtgtcacaaatttggatgtactacaaatgtaacaacaaaatgtgtgttgtcacttgtcactattgtctaagttggttagatatgtgagccttcaaagaagcaacaccatggtttgtggacaaagaattgttctatagattttaataaagaaaacaatagtacatctgattggattgtttttgtactaattaaagctaacatttaacactactagctactattagttatttataaaatatttatttaatagtaattgcaatgatggttatattaattataatatatgcttgcaagcttgcatcaactacacataagattccaaagtgaggtggtgtgattcaatgtcatctaaattggaaaagtatatgttccatgtactgttgtctgtgagagttaaaaagttatatgttctaatttttatcatgattttgggttagtggttgtggaaagaaaatgaaaaatagaagtaaattttccaacatgttttttgtggctgtgaaactcttttaagtctacctttttatgttattattttaagaatactttctaagaatattttgatgaaaaatataaaatctaaaaatattactcctatacttttacttttacacgactacacctttatttttactttttcattttgttttatttgcactaatactttttactacatatatgatgtcattatactaactttacacactatttattttttcagttttattttaatttttattgtagctttctgttaaaaacttctccacaatcaaattatttttgatccaaaataaaatgaagttcgttcatcttcctcaattgtcttcctccatcatatggccatagttttttccatttac

SEQ ID NO: 318055 - DNA, 1794 bp, Cannabis indica
ggattcaacttcatatcatactttttaagtatggcaaagcattttgcgagatccttagtatggtcctcacttttgactgattttaccaacatattatcaacgtaaacctccatgttttgcccaatctggtttttgaacataccaatcacgaagcattggtacattgctccaacaattttcaacccaaatagcatgactttgtaacagtaaagccccatatttattacgaagcttgtatgttcttggtctggaatatgcatcttaatctggttatatccagaatatgcatccatgagagtcattaattcatgtcttattgttgcatccaccaattggtcaatccttagtagtggaatgcaatcttttaacatgctttatttaagtcagagaagtctaagcatgtcctccatgttccatttggtttgggataagtaccagattggatattcacgaggataaaatgcttctcgtgtgaatttattggttaataacttatcaaccttttctttgagtgcattttgtctctcggggtccagtggtcccttttttgacattttgccagatgattaggatcaatattaaggtgatggcatatcacattcaggtttatcctgaccatatcagaatggctccaagggaactgatcttagtttgtcttcaaaaaggtgattagttgctatttcagttcttcccccaaacttttcccaatattaacacatttaatgggattgtttgggtctaaactcacctcctccaactcctcacttggcctaagttggttactctcatcatggatcctagagttagcccttctatttttgagctctaccctgtagcattttcgtgctaacaattggtcgcctctaacaattcctactccagcatgagtggggaaatttagagataaatgcttaattgagcttattttccccagtcctattaaggttgggcaacccatcaatacgttgtagacagaagaaatattgaccactaaaaattcttgcatttgagtcgcggacaatggtggttcccccatggttaaaggaagttcaattatgcgcaattgcgacactgtcgcccgtgaatccacataagtttaccatacaaggtcttaatttttcttcctttaatcccatcttctacaatatttccttataataaatgttgacgaaacttccattatccacgagaattctctttatccttttattcgtaagttgtactattatcgccaaaggatttgcatgtgggtatcatacatgtaatgcatcttcatcagaaaagacaatgggcagttcatttgatttgaccattttcaaaggttttggagcgaatattgatgcctcattcttaacctcattaatgtaacttttatgtgcactactgttacctacgaggtgtggcgctctagaaataactaagatatccttgcccttcacagggtgaggttgtattcttgggttatttgggttattgggctgattatgtttgtttccttgtgtcctcatgtattgcctcaaatattctcgtgagattaggctctcgatttcatctttcaactgacggaattcttcagttgtatgtgtaatgtctctatggaaacgatactacttatttaaatctcgcttgttcctcgcatgcctcattgggtctagtctacgaaatgcgacccaattttcattgacgaggtaaatatttttgcgagtctcatttaattcagtatacacttaataaactggaacatatttttcatgttttttttacttttcttatccttggatgagtctcttgatt

SEQ ID NO: 318056 - DNA, 808 bp, Cannabis indica
acaacaaaaaaaaaaaaaaaaaaaactaaagatcggtttaaacaggtaaacccgaccaaactgacaaaaatcattgggcgtgttacactttttttatttttcattggacggattacaattagatatttacagcccgacatttatattgggttggtaaaaatatactataacccaaccaaagcgaccaatgtacacccttaattctaagtctgcggtcattacatccacattttgatattttaccctttcaacaaggtgggatattggcaaaatgaggagtttcaaatcttcttgattttacaaaacagtgacatcttcgagaattggtgaacaactttactggaacatcgaatctgactaagtggtgtcaacacaacacttaggcatcaaaaaatacaagtctgttatgttttgacactcacctgacgtctaggttgacgtcaaaatatcaacctggccgcagtgtgctaaataacctttagtaaaacaatcatatctcactcaatattgatccgattgatgtgattcaacttgcattgcgaatctatttcaaagatcttttaagtcatgtcttacacccacatcaaaattctgaatattttgggtccaaaattcgtcctcaacaaatttgtggtaacgcgaaaataatccgatggacaagattcaaagttcgaaaattgatgatttttaccaagagtaaattttcaccatcggatcatcatgaatcatcatcaatggccaagatcagcccaaaataattttttcatattttttgtatttttttaaattattattttaataggacatc

SEQ ID NO: 318057 - DNA, 929 bp, Cannabis indica
attttaagtttaattttttaaaattttaaggtatatatacttattatttttttgggtccaagaactccattttaaaaaagagttttttttacaaaaatgtcccttcaatttcttgtgtttgagaattaatattttttagttaattttttaataaaattgtaatctatttttttttttttcatatagatagtttgagtttgacatttttctaatattatcctttttttttccttacatatttatataaaataattatgtttgttacttagattgtattttatcttattgatatatattggtaaaagtttgtttatatgataagataaatcatccacaataatataataataaatcaaggtttttccagaacatgcaaaatatctatgcatcgtcatattactcccactataattactcgtttcacatcaatttggagagacgtgaagtaagtgggcataagtagaaactaaaatattatatacctaataataataatcataaagtgttaaagtactaataataatgcaaaccaaaattctaataaaaagcatgccactcacgtgccaacccaaataataccattataacgtttacgtgtcgccttaaagttaaagtactatttaactccacaaaaagtgttcagaaaaaaactttcaaaaagagaaaaagttatagtggaatcttttaaaggtgaagggtcaaaaatggaaactcaccaaccaaaggaagaaaaatagaggacacttatactttcactattaatatttaaagaaatttaagtttaaaataattttaaaaaattactcttaatattattttaagaaatttttttacattattttaattttattttcataattttttaacttatatatatttttgttttttctaataaattttatattttttattataatatttcaaatata

SEQ ID NO: 318058 - DNA, 1041 bp, Cannabis indica
cggcataaatacgtaagtttaactaatggttataaatatatacctaagtttatttttttaacaattattaacctcaaaaatcgacacttataatttatagattaaattgaagcactacaaggacagatcccatgacgattcatgaatagaggacgacagggagaaagactaaattaataaagactttttttttttaacggtaccattatcatctactagcattaaattaagttcctagaatgggagtaaaataggtggtaagcttataaaatcaagtaggaaaacaactaatatcaatgacccttagtttattaaaaattcttgtatggttagcattttaaaataaaatatatcatcaccattgtcaaaatgtataaacaaaatagagagatcacaaataattacaaagtcaagcttcaaatgcatatcatatcgtccactagactccttgctctcaataccaatcatagaaaacgacatccaaaactggttagccacacctgcagataaccaccataataccagagctcagattaaattcactccttgtacagattcaaggtcttttacctacaggtgagtgaacacatgttctacctatgatgacatagagactaggtcgtgaaacaacaatatacacaaatcatgatcaacatgactctcatcaatataaccaaaagcagataaaaataagaacaactgaagaacatattccctttttggaaaatccaatagcatagcgactgtattttgaataaatccaaaaatcataacatgcataaatatttatacaaaaatatatttgtcactcagtgccccagaacagtccaaaaaaaatatgcagaataagttttctatatttcaaacattttataaattagaaaaaaaaatagaatctgtataatattattcaacacatataaatcaagtctagtaatcaagttgagttcttacctctctcaagtcgttaaactttgtctaaaaagaagagtctaagccatcaaatcccgagctccaattatttagtccaatcttagatat

SEQ ID NO: 318059 - DNA, 746 bp, Cannabis indica
acttaatttattaagatgttcatacatgtatatagtatataatcgatattcaatgcatatgagaaagaaaaaaatcatttcaacaaaagacgaagactaaaatatcaaatgaaagaaaaatggatgcaaggtaaacaatttgaaagaataaatactaaaaattgaaattattaaagaattatatacaaaaaagtacaatattaacaattacctgagtaaactttgagatatatcaaaataatgtagtaattatttgctaagttatcaagaacgaaaacataatatcaaatttatcatgaagacttgagagagaagaagtatgaattattcagataataactaaatgagagaagttattaaataagtggtaagtttattatgtttagaacgtgtgacatgaattcttattaatactttcaaattaaagttttaaaattatatgaggccggcagttgaaacaatactcaaaacaaaatatatatttatatatatatataaatagttttgtacttatttatttttgaactaagacaacgcattatagaaagtgttgtcttatgttaaatttataaaatatttatttatttagaataaatttttaacaacactttttttacaactgtttctaattcttaaaataaaaaaaattgcaacactcttttttgaagtgttactaattaagtgttgctaaatatctattctgtagtagtgagtctaactttagaattataattgaccaatcacga

SEQ ID NO: 318060 - DNA, 1076 bp, Cannabis indica
ccagggatggatctctaattacatgaaagggtgtctcaccactttcagaggtactcctcctagagtacactcgttctagataatgactccaaaatgagtagtgagttcttcacccttagttatctcttttggaaacttactcctttagtcagccaaccatgcactgatcgtcaaccttcacatcattcaaggccatctcaacagttatggacgcaatggcctttttcaagtcatcaaagtctcctcgaatcaactcatggacgttatccttcactgacatcgcgtcgatgccttggtggggagaaataaggacaaccccctagagactcttgttgattacaaggtgggccatttgtaactccttggatgacaaggaattgtagaaattaatttattcctccaacttcagagtcagaggcgattgaggaatgcaatttagaaagaataaaaatagacataagaatatgaagattcataaaggaaagaagtaaaacaaggacaaaaatcaaatacttactggctatgttgaagctaaagctgagtgttggaactctcctcaatagaagtatagaaccaattgtaacgccttgaccctcagggacgccacatgtgtgcttttataaacttattatcactaatctataaattttagaaaagtgtggtttaatttaaatctttaataaaattcaaaatgaagacttccattttaaatactattagggatcccctgtttatatatataaaaaatctttttacaatagattacatttccgaacatagaaaggaattcaatcctgcttcccagaagccaagaccccacgactgatatgtacattgctgggagacctctgactcatggccgaacacagcttctaacttccttacctgcaccacgaagcacccgtgagtcacaatgactcagcaagaaaagctactatataaaatcatagaaagttcaagtaaatttcattacaatgtaatatatataccaataggtcatacatactcaaggtgcataaataacttaatgtctatgagagcacacttattacgtaatcaagtatattcatagttat

SEQ ID NO: 318061 - DNA, 1949 bp, Cannabis indica
aattaaatggcttaattgttaaaataattagagaaaggatttaaatataaatagaaaaattatttataaatattaattgctaaaagaggtcttgttaaatatttaattaattattttaagaaaatagttaattataattaattaattctaaaaaaggaatgtttacctattagtaacctgctattacaggtcaaagaaaaatgtaaccatatggttacaataaaaatgtaaccattgaatagtcacccatatatatgtattagctacattttgtgacaataaaatttgtaaagctttacactaaatgatataatatgaattattataaacacatatatcactactctccaaactacttaattatcaaatgaagtggcacaacatgatcttcacaaaagaaaattttaaatgatgaaaataattgttttaaaagaaaataatataagtggaggagaaggcaattcccaactcccaagtctcaacaagaaaggaaatatatatgtgttccttcatagtgccaaacggcaccaaacaatgtcaatgtcaatgtgtacatgctgttgttaaggagttacaccttagctattctccaatttttcattctcacattaactaatacccaaaaaataataataacaagttatatattaatctaataattcaggtgaacatttatttattttgatatattatacatctaattaataatatttgtcagtttctactcattttgcaaaaactcacatcatcatcatcagtagttgtctcctcatcaatcaatgtacctacgtatgtaaattattttcataagtttttaacattttttgtaaaccatcacatcacacatgtgctcacccccacaaaaaggagtacatggaaaatttggattaataaatctcagccctcaaattccaatcaacggtcaaagctaatgtgaccactggtgctacattttgggtgccatcacataagaaaacccttatataatatttgaagaatgttaatcacaacctcctatcacaatctcttagtcaatattcacgtttaaaattacatgttaaaatattttttttttcaaatttttttcatagcgatattcgttatagttacagtatcatctctgtaaatttttgaaaaattccgaatagttttcagtaccgaaaaacagagttcttaatatttcaatttaccacgcgtgttcaaaaaacttcaaacgtattttcagcacggtaaactattcaaagtttttcaaaaatttacaaggatgatgttgtaagcataacgaataccgccgtgaaaaaagaatattccgatatatattttcaaacatgaaagttgactaaaaaattgtaagaaaagattgacaatagcactcctcataatatttatcgtattttaaatctacatgtagatcattgtgtgacccatagatttttccctaagaatatatatatattttttaaaaccaagcaacatgaacatccaagagtagttacaataatattcatacatttatgagaattatttttgtaatgagatctcacttctctcacttgcaattattattttcttattgtaccatatcattagaatataaatctttgttatcgtgtatataaatatagggatacgattttgtctcgtgattgtacttttacagaatgtacttcgtgatgtacggcagccgttagatgggagttatttgatctgagggctggggttgatctaggggtaattagagttaaaaaatggtaacgtactctgagacccattattacgtaccttgagacccatctaatgtattccgtacatacgaaatacattccgtgaaagtacgtcacactacaaaatcgtgtttctataaatatatatactagtaaaaagctacgtgcgaggcacgtatactaaattttatgctaattttttttctatgttagttgaaagtgata

SEQ ID NO: 318062 - DNA, 843 bp, Cannabis indica
ccttctatggtattggctccataaacaaaggtagcaaagtaatcctttttctgccctatcattttgatatgacaatgcacatgttgcttagattcctcaatgatttcaacattaacaaaatcttcctccatagtaggagaatccgaccttccaccttattgctagaataaaagtcctaacacaaaaagctactcaccatcattttttgaattttttcacctttaatctttgtctcaactagggccccaatgccaactttattatctctccaaacttcagcaactttatcttgcttctcctttttattcaatcccctgacattccaacaactaatattgcaaaaatccattaacaacacaagttgaagtccctctctccctctacttcttcatgtggcccccctgttaatatcgcaaaggagttcctaagcactttctcacccttgtcactatttcttcttgtcgaaccagagcccttagaaacacggttttttggagcaatccaatccccactagctgttttgacaacagttttttcccctttgccattgacggttttttcttttaaatctgctatggcagccgcctctaacataggggcagtagcctcagtcgcttccttgctagcagtagccacataaggctgttcaatttcagcacaagtaccataatcattcccctcttttctccccttattttcttgcttttttccctcctctttaggcttttcaaccttcctacaatcagccattatatggccaaacccaccacaatgtttacacttaaccgggagccattcatattctattccttgttctaaaagctgcccatattcattaacaaa

SEQ ID NO: 318063 - DNA, 1031 bp, Cannabis indica
ttattattattattatttcaggtgagagttttcaatggaagaaaagcactagcacattcactaagtgatacaaaaacagcagtaaaacaactaaacaaattagttacttgcatacttgcaatagtaacaattgtgttatggtttgtgcttgttgaagtagccactacaaaagtgcttgtttttctttcgacacagcttttggccgccgctttcatgttcaaagacacctgcaagaccatcttcgaggccctcgtcttcattttcgttatgcatcccttcgatgtgggcgatcgttgtgttatcgacgggattccggtaagatttcttttctaatccactatcaaaatgttacaattattaaagaggggtagctcaaataatcatgccagggcatcagggtcgggtttgggctaagatgggctttaggcccagtactccaaaaaaatttctttttaagaatatacatatttattttttaataatttttaaaaatactacttttttaataaatggtccgatatataattagcgatttcctataaatagaactcaatattaaattgtaccgatatctatattacaccttacaagggttttaagcacgatagccatgggtaccttttagcatttctctattagatacgttgttcactcacataaggtccgagattcgagtcccttctcagcattctagctaatcaattaaatcatgatttttttattattattatttttttttttgcagttgttggttgaagagatgaacatattgaatactgtgttcttgaaactcaacaatgaaaaagtgtactacccaaacgcagtgttgtccacaaaacctataagcaactactataggagttcagacatgggtgatactgtggagttttctattgatttcaatacacctgtggagaaaatagccttgctcagagaaaaaattaaaaagtaagtttatttttatcatttattaaactttcttccctttttctttaaaaataattagagaaaattatattgtatacttattt

SEQ ID NO: 318064 - DNA, 738 bp, Cannabis indica
acacttaaccacataaactaattttttgatggtaaaaccatttaaacttcacttatattacctatttaccacggtggacatgccacagtgtatacgtcacaaattttttaatggaggatattggcgacaaaattacctgaaattagagacacttaattacatatactgattttttggtggtaaaacttttcaaatgtcacttctattagctatttattcattccatttaaaatgctctgttaagtgctctgcgactcgaaccatcaaatctccccttcccctactccttcttcttattttgcgacaaacccaccatacaacgatgaacctagggacaaaccaacgaacctagcgaacccttccaactgtagtggtatcgacgaagagttgtgggagagagagagaatcaaattcggcgaggtcaaggcaagaaagaaaaacttcaaagaagggttgggtcttggtgcttagagggaggctaaacggtggttttgtaaggtcgggaattcgtttttagggttcgtttaggttgaaggtggctagagttgacttttcggagctgtacgagaaggagaacggaagagagagggagtgtgggtggaaattaggattacagagagaaaaatgtaaaagaaagagaataagaagaaaaagaaaaaattaattttaattattttataatttttaattattaaaatatttaattaattaaaactatgtggaccactaaattttttt

SEQ ID NO: 318065 - DNA, 778 bp, Cannabis indica
aatccgattatattgaaatggatttatttagggcacaaaacccaacataaactccattggagaagtcttcgactcagacgaatcaaaatcaacaaagagagatttcaatgtcagtgtactctttctcttgtcaagaagagaagtacaagcaagagaatcatcctcttgttctatagaaatattggcaactaatttttccactttaaaatcgggaagatggatgggaacctgctgaaaagaaaataacaagtaataaaactgacagattaaaaactagaataaaactctattgcaactactaatcaactactcggaaacccaaactcaaaaaattaaaaatataaaaaagcaacataccttgatttttccaataaccttcaaagaagccaaaacaacttgatcttcataaatctcaacctggtttaagcccttgaaaaaatcatctccctttaaatcaacttctttgcgcttgacattatcaacatccttggactaatcgccttcactccctgcaacaacatcaccttgttcctcaccaataatagaagcattagaaccaacctttccatcaaacttatcatcatcatcagaaccatcaccacaatcttcacccgactcatcaccatcatcagactcatttttaatattttgtgattctggtaatcctttttcatcatcatcatcaaaactagggtcatcaatatcgttagatgtctttacctatttaacaattgtaaagcaactgaacaaaacatgaaagaaaccaaccctaacataa

SEQ ID NO: 318066 - DNA, 2647 bp, Cannabis indica
gagattccaaatccgtgggtgctcctgaaaaagtaccggtaatcctagtcacaattcatgggattcacaaatagggttaatcccaaaattcagtttcaagaatcacataattagcattctatttacagattagcataaacagctcgaaatgagctttccgacaatataaagaacatccaaaacatagtcccgagtcaaaagttatggcgaaaacaaaatcagaaaaagcagacattccctctgccaaacccagtcgccgcgaccaataatcccataacggcgactaggttcagaacaccaaaaaatcccatttttaagacccaaaaatatcgaaactcaatcctattttcacctaagtcataaacaacaaaaattcatgctaaaccaaggtgtttccaggcattactacattagaaaagatgcacaaaacacccaacatatatcacacaaagctcagtataatacaataatcatcaaacttttaatcccaagacttcaaagctcaaacccataaattccaagcattttaccagaaattcaacaccaataactcactccaaaacctcccaaaacaataaagatgcaataagcataaacctaataacacaatcaaaccaaaatcaccactatctactccagttctaccaacatgtacacaccaacttaagaacacatttgatggcattccacaaatttttacttcagagttacagcaactaaattcaaaataaaatggtagagaaagctacctgaaacttttccaaaattcgaagcaccacacttcacaaagtcaagcttgatccaagactaatttctcaaagattcaacaaattagagaggtgagtatagagagagagagagagagtctgttctagggctgaataacacaagaaaatgctttcaatttcagtccaaattccttttgttgaaaaataacacaaataggaaaatgacaaaaatgcccctagggccataacacagcatatgcacaattcaagagcaagaatgtcatgttcatcacatacacactcaattatatttcaggttattcatttcattaaagaatgccgaaataaaatcccaaaaatgtattttggccccgaacccagttcagcccgaaatactcgattgtgactataccacgccaacttgtcagaaaacaccttcaaaaggacaaattaagtatactatataataatatagttccataagcacgcaattaaattcaaattcatagttttacccttctcaagtcataattgtgaaaatactcctagctcaccaacgggttcttaacatgtcatttatcaattagtacacatataataaattatataataatataattccataataactacatatttaactagttagggtttccaaatccatttcttaatcttagggtattgcagcggcagtacaaaggaatctattagaaccgagtatggatggtctccatgccaatcgcaaagtagtactcatccacaaaatgcctattttgctgactgcagggtctacagtaccctttagccacttattgtccaactgggagaagtaaaaataccccaaccatctctgcttgtgagttgacttcaggtcgaagagccaattggtgtcgtgcggggaccgctcaccccatcctttagtggcatagaggatgaacagggcggataagtacttgattcccttcagtgtgcactgagtcgggcagaggttgtaatagtccataattcttttggagtgtggatgcagagacaggatcgcaccttgcttggtatgggcacccgactaggcacaatatccctctctttgattagttgcccagttgtttggagaagggaaaaagcattcaacactgcccaagcatccatccttcttgaaactcttcaactaggcctgggttacaatggacggaggagacacccaccgagccctaaaagcaccttgcctcctttgaggaaccacatcggtgtacacctcagtgatgtaatcatcaccttcctccaggacgtcaccaacctcggacactagttcctcagcctcattgtagcctccgaagcgcaaaggctgtggaactccttcctccttagcctcagagggactaccaggacggaccttgccctgatcttttatttcctggacctcaacgtccccctcgttatcctcctcctcagtagcaagctgggcctattcagcgcttggcatcatggcatgtcgggccacatgagggttaactgcagcaatctttcacatagtttgttttgtgcgggccatcatcctatccctggacggtggttggtaggtaggctatccaaaaatcatgccagaagtggcaatacaaatgccaaaggcaccagagcttggacaacccacgggatgttggaaaatattttaccaggatcttagatctactcacaagtatgttgattaacaccctaaatatgacctttctaaaacgatgaaataaacacatataaagtttagtaaaccttacattgggtgcagcggaataatatgcctccttccgttcagatatctagcccttgattcctttctgtagcagagcattatcaatatctgaacctggatgtctttctctgaatctttgatgctgacactcctttttgctgaaagtctttcttca

SEQ ID NO: 318067 - DNA, 551 bp, Cannabis indica
aatgtaccctgagactcatctaatataccacggaatacattccgtaaaagtacatcactgacaaaattatatcccataatatgtattttttgataaaatatattttgcatatgatttagcattgtattaattttttattcatgtccttatacaagtaaatatgagtttatgcaataaaataaaataaaagataaaataatacaaaatttagtactaaatttagcacattattattagacgtactaaaatatatacattaatttgacactttaataaatattataggctattattataggagtaatatgaaataaataaaaaaacttgttgattttaaatttatttggagcaattgtgtataatatatataattaataaaaattaattctttcatataatttaaaagttaaatacatagagaaatgcttaatgacacaagtagtagataacattatcgtgtcataatttttttttatttgtcacgatttacattttttttagagtaaataccattttggaccatgtgttttgcaaaagttacagattggacc

SEQ ID NO: 318068 - DNA, 591 bp, Cannabis indica
ttttaaaaatttttaccaaaccactcccagttttaaaactttaaagccaaaccatgattgatatgcgtttgctcattttgagaataatacactttctatatgcagcatgcataaaattaactttaatttcaagtagattgacacattagcaaaacacatggagatatcattatttcttgaactagttgaagcctcttttatcctattatacttggtgttaaagtaaaagtaaaaattttacatttaaaaattaaaaataaatgtaaaacacaattttatttatgtcaaattaatagtacaagagtttattagttttaagtttgatcaactcaagattataaaaataatctcttaattatattttttttgtttaaagaaaatactatttgatttcaatcatgataataataaataattagggtaatttttaagaaaatgaaaattggtatgaatttaaaattgcagttgaactcaataattttgcttaatcaaactgtttacatatatctattctatataaagtgtgcctatataactgaaattcttggtttatgagaaatttatgggtgattttttatttttatttaataa

SEQ ID NO: 318069 - DNA, 1531 bp, Cannabis indica
tggtatttgttacttgtttgcttccttaatcactctagacatgataggctaatagttcgtaaatggatatcattgtgggatttttttttttgttttcttttagtactgtgtttaagtttaggataatttcatataacggtattggttttgacgaagtttttggtgacattgagaaacttccctccaaataaaatctaatttatggtgtttctaagcaatttgaattggaattattctcatagtgacaaataagttacctttgcattaaatgtggagcaattttatgtttgttgttgttgattgcagttgtttcaattttatttggcatttttaatttaataggcgaagcagaaaaggcaaacgatttattgaaataattacgaattaatggcctgtttagaaaagtttcgaaccaaaatggacaatgcttcattgaattgctacaaactaataacctgtttagagaagttgtgaacaattatagtttattcatttgcatctcttcagcattgttgttagttttcgatagattattgttaaaactaacagagtttttaaaattattctattaagccacaagaaattctgttaaataggcatgtattatataggtaagatatataattatttccttatccttgtcgacaactaagggttggttattccctgccttttaggtttttggagcacaaatgacttgagtttggggttttatggagacagagctgaagtcagaatcactgggaataaattcatccaatgacatgttgggaaagttgacgatggagaagcgtgattgctccttcgtttctagttcaacgaagtataagaggcgtaaagtttttgcaattcgtgattttccagaagggtgtggaaccttagcccaacaacaacatgttagcttgagccaaactgaagaaacagaggaaacttgttctgatacccttcaaaaatcaatatgtaaggaaggaagcagtgatgactcaaaaaatgtaacttctgatttggggaaggatttgagtcaggtaagcgtttctactctaaaggaagagaatggtcctgttcttttggataataaaagtccattaatcgccgaaaacaacgacttagtttatcctgattcgactgttaatgagaattgtaaggaaggaagcaatgatggcttaaatgatggaacttctgatttagcaaaagaattacatcatgtgggtgttgatgctccaatggaagataccggtctagttcttttggaggataactttatgcctccaaatgaaaacacagacaccacttgcacagatacacttctgaaatccaatagtaaggaaacaagcagtgatggcctaaagaatgaagcttctgatttggtgaaagatttgcatctggtgggtaatactactccaaagaaatattcaagtcctgtttgttcggatggtaactctcttttagctactgaagacatagacacaccttgtatggatgctttgttggattcaaattgtaaggaaggaagcagtgatggcctaaaaaa

SEQ ID NO: 318070 - DNA, 1624 bp, Cannabis indica
gaatgacagattataaaaattaatctaactcttttcagatcttttaggtccgaaatcacatgttatatctaatcatctctgaaatagactaacatagaaccaaccttaaacaataatctcaatgtcactaaggctatgcaaatacttttgtttcacatcaatacttagtttatccaattttggcattcccaaaactcacttatcaggttttgaattgggatcattaagtatgcctaaggtgatcaatctcagacatagaattaagcacaaatatagataaattcacaattaaaaaaagagaaatagcaattatccttaacttgagaaataatgtcaatcaacattcatcatctcttcaaataggagtttagttcataatctccataatcaaaattaaaacagaaaataacatagaaaaattaagagagaagaaagagctggttggagaaataaatctggatcgccacaagccgctcttgaagttctctcctctgtttttaggtctccaattctaaatgcccctcaaaaatcacgagctcccttttaaatgagccaagttttctctttaaaattcatgaaattacgaaactgcccacgaactcgtcaagaaggcttcgccgcgaccaccaaatccttggttgcgaaggctaggacgtttgaaattaatttccgttctaccaatccctgccgcgacgagcttttccagaaaaggactttagttctttttccaactctttcctcttttgtccactctattcgcgtgaatacttcctttaaacatccagggacctgaaacaaagagaatcaagcgtaaaacagtcttaaaactagaaaaaaagatcaaaaactaccctaaaaagcaacctgaaacttagactaaaattagcctaacaaattcccccaaactagatccttactcgtcctcgagtaagactaccgactaaagacaaacaaataacgacacgatagataactgagcctccatatatttaaactaccgttgccacctgtacaacttaattcaattggttaaaccagaatttcaatccaataactctaaaaattaactcgaatgcttattttagaaaaatcacgtatagatgcaaattacgcttcaattgaaacatatcataatcattctactcttaccaacgttccaccaaccgatgttcaatatgcttgcatgatctacctctctccactaatatcaacaacccttgcttaaaatcaaaagatctttctaggttataatgtcatggcctaggtgaaaggtagataaaatgtcatttaggctacattataccataagcatactctaacccaaacaagcaaccacataaatccacactttctaatatttacccaaagaaatttttaaaagattgagaatttccactttctgtttccaacatcaccttttcctaagaattgatacttttttttcttctttttggatatattcctttattttatttttttttcttctttcttaaagacttagcacatttttttttctattgatgatataaacactttaccttacacaactttcctcaatctcccacttctaaaataatgccactcataacacttcactcccccaaacttatttataagcttatgg

SEQ ID NO: 318071 - DNA, 1643 bp, Cannabis indica
atgaggtcgtacatgtcagcggcgcaacctggagtgtttggtatcgcgacatctggggttattattttgtagttgccgcgtgacctggttatgtattttaagtattttgtataaaagtttaaaaacaggatcccggtacttgtaaatgattttataaagttataatgtttaatatttaatataaaagttttaatttgacacaatttttgagtaaattctttgattagcaaagatagcactgtaattgaaaagtcactgttacgtgccttagcattaaggcgttacaattttggtatcaaagtcgccaggtttgtctaccgaagcttgtcaagacatgtacaatcttcaacagagaaagctcaactcacagttcagtaagcccgtacttgtttagaattatatgtggttattaaacgtgttaggaagcatattagattatggttatttattttaaatgcgttgccttaaaatccataagtgcggtattaaatttgcaattgggccattgcctgacatgaataactttctaattgacaagtttgtcctattgaatggacacctggtgcaatatggaaagtcagaataatgtggtcagggccagtagcggttggagagaatggagtccaagtggtccccgtaaccgaggtgaaagtccttagagggcttctgacgggagtgatggtcatccgtcacaggctctgtttgatttagagcaaaggttcggagaagtggaagttatgattcaacgacacgatgaggagatttagtggttgaaacaacaaaggtctcctatagtacctttacgtcatatggcaatcattcttgattcggtattactagaggagcatagtatgactggtaaccaagtggaatcatcgcctgagaaaatttggatgcatgaacctacagtccttcagggagattcaaatattaagaatgctctttggactggaagccctaaagaatttattttaagacctcaagaggttatgacatgaggtcaagataccgcttaccatatttctatttatggcagaggtggtagaggtttcgtggttgagcagtagaggaaccctacgtcgttagcggtgggtttaaaatgaaacaagtggctccgcgggaattaaggtagaggtggacgccagggttattcttaccctgagtgcccatgatgcaagaaacatcatcccggagagtgccacgggaaagcatgcttcctgtgcgccatggttgggcactttaagaaaaatttccctcaagcaaagaaagataagtagaagctggacgcaaagcctatacttgctcagatatttgctatcacccaagctaatacaacaactagtacttctatggtgacaggtcagcttcttttcaacaactcccattttattgtactacttgactttgggactatatactcgtatgtgataccgagagtaattaatcttttaggtagaccttatgattttcttgtaagagggtttggaaccctattgcctagcggggagttggatatctccaagaggcgcattaggtctatgccaattaggatcgaagatagggagttgagtgctcaccttatagaattggaattaacagagtttgacatcatacttgggatggattttctatccaagtattcg

SEQ ID NO: 318072 - DNA, 1601 bp, Cannabis indica
ttttttttttttgtaacttctttagtcttgatcaatatttgaagttagtattttattttgaaattgtatgtgtttcatttattatttgataggtagaaattaggcttgtgactggattttagtagaggaaggatatttcatatattatattaaataggttttgcatctagtgaaaactatattttttattttcttactcggagaaaaaatcaccttgtagtagaaatggtggtaaaataatttattcctctatccggaacccttatggtttaggatgatgctcttatcctcctttcactctattctcgttgttccaaatctaactgtccagagtgattactccttgagagttttgactcaggaggtaaggtttaaggggaacctttccaagaagttataggggaggattctttcgatctctgctatcttgagtaattaactgcttagtattttctgtcttattatttttaaaatctgctatggccaaaggttatcatcatgaagaggtggcagttgatgaggaagacaccgctatggaggagattgctgctccaaaaatcgtattgaattcatttcaatgggagatggaacaataccaaaataaattcaaaattatgccaacctccggaagtatgagacccaaaggggtcttcagagtgttccaggcttattctggaatagactctccattcggggagagcttccaggtcaatgcgcggaaggaggcttcgacatttggagctggggccatattgagatggaagcgcatctgtcgctgaggagctaatttgtggagttctgtgcgatagccagagtggcaccattctaattcatcccgtaagtttacaaattacttgtcgaatggtacattctgtgtaagtagcagaatgtggttgtcattactctagaagagatcttgtatttttacaggattaagcctcaaaatatgcacaagcataaggataagattggcttctacaggctagataaacattccaaggccttgatctgcctagtaagcacaatgaagcacacatatgacattcaggaatactggttctacacttctgatttcaatattacgactaagagcagtcttttgctaagctttttcctttatattatatatttttaattttctttccatttcagaaatttgattgagtctattctattttgttctgttagactcccttccttgttcactcatgagtgcagatctctcatgtttataggtctacgaatactgatgctcataaataaattaaatatgctctctttgtggacacattatatttggttggaggatacttcttttcccttattaagtgttgtatcttgacattgttatttattatgatattttctttctaaaaaatgtaataataaaaaaatatatatgttatgaaatttttatttgatattaatgtttaagaatactttcttagtgcatgcatgtcaagtgtacttgttcagtttaggtctttttttttttttttgtaagttgtgatagttaattttgtctttcattaagtcaatatatagtgtagctatcatacatgggaggttgtagactgtagtctacccttgtctttcaaatt

SEQ ID NO: 318073 - DNA, 574 bp, Cannabis indica
tttatatattacaaccatgtataattttgtataatcttagactcgaactcaggacccccaacacacacctacgatcctactctcctataatcagcctcaagtagttttaaaaaaaaattaagcttatttttgatactgtaaacgtgtaatcttttaaaaatttacaaagataattaatgttgtaagtttaaaaaacatcaccatgaaaaacatttatacaaaatggaaaagggaagtaacctgtaacccttctaaatatcaaaatctatcaaaagagggaaaaacaaaaagcaaaaacaggcctttgttaaaagtcattgcttgaacgcactccaacttaggtcatgccaagccaagaccaagacaccattactgatggcttcacatgtctacaatggtggtggctcccttctctaatgattcaaaccccacagtggccccctagagtagataaagagagatattctcttccctgttgaggataatatgaagtagaaaaaaaatattatttgtttttatttaaatttatttcaaaagaataaagaagtttattgggcaatgaacaaatgtgtat

SEQ ID NO: 318074 - DNA, 829 bp, Cannabis indica
atattcaaattaaaattaattattttaagaaaattgttaataatgattaatttaattctaaaaaaaggaatttttacctattggtaacctgctattacaggtaaaaaaaaaaatgtaatcatcatggttacagtaaaaaatgtaaccattgagtagtcatccatatatatatataaataatttaattgggaatgatacaagaaataatcatatatatatattaatttattattatggtctaattaaattttttaatatagagtgattaattattattataaaacacatattactactcgatctataaatggggactactgcaaaattagttttttctcattggtttataactgtcttatatattatatcccttcgatttttaaaaccagtggctatgtgtcataaaaatgcagaactttaaataatggtttataactattgggaaaatcactttaaatgactgtttataactgttgggaaagactttcatcagattgtaactgacagtaaaagttactttaaatgacagtttataactgtcggtaaaagtcactctatttatattgccttaatataataattcatattcatgagagaacaaataaaagtaacaaatcagttggcacagatgccaaattgaaagtacaactaggatagagtaaggaggctctagcaaaactatgagctatcttattcgttgattgcttaacaaaataaacacaaatatctctaagcttcaaaagtaaagctttacactcattgataactgtaaagtcattttttggcaagttaaatgccaaaatatttttcttttatggtaagatttatt

SEQ ID NO: 318075 - DNA, 960 bp, Cannabis indica
caaaacactaatctcatggcactgaaacagatttcgaattttaaacaatttgggaaccgaaactaggtgcaaacccaaccccatccttttcgttcaactccggccaacattaaaaaatccgaactctgcattcgtttcaccagggccaccagctatgcatcccattcgttcgtctcaccattgccgaaaaagaaagaaagaaaaggaaactgagaaagagaacatgaatcgcaagagtttggacctgcaaaataccaatcgatgaagttgggttaggaaaacatgggaaagagacagagaatgagaaaaagaaaacaaagatggacctggggaatccgacgaacttgcttcgtggttgtgcagcggcttcaaggcttcgaggctgtgatgtggcttcagggtcgccggagttaaactttcatttttttttattagcgttgaactgagagagagaagagaaattattgtggaatgcggctaggttttctcctttagcgatccgagagaatgagagagattggtgtgaattaggttaatgagagagagaatttagtaaggaatatttttcaaaagaaatttaataaggaattaaataagggaatatatggtacaaaaataggaaaattaatcatgtttaattgtggatttcaattaaaaaataagaaaattattattttttaattaggctcatgtccagctattttggactagaaaagtcccccaaaatatttatctagtctagcattgttggagttcaaaatacaccattcttttagaaaatatatatatcacgtctactactggttttctagtctaactttattggactagatagaatttttttctagtcctacaatgttggactagaaaactcctcaaaatctttttatgtccaacaataattttgttggacttaaaaaaggggcattaaaagggttttttgtagtagtgactactgac

SEQ ID NO: 318076 - DNA, 980 bp, Cannabis indica
gagttgttttggactatatctattgtgtattttggttttatattcaaaccataatttcaatccgaaaaacatccgacatagtttataagcattacacatcctacctagagctcaaacagaaaatatttatcaattataacctcaaattatcaacatgcatgaacacttacaaaacatcaaaaacaccttaagaaacctcacaaatacagaaaatgtaagatgagaatggataaagagattacctcaagctaagacacaccacaattctaagcttttcttcaagattcaatgaaattacaatagaggggccggtagagaaagggagggtcggccaaagaggggttcaaaacttagaaatttaaattttctcatttagcaaaaatttgatttttcattttgttgaaaatacaaaatatgatcaaatgaccgaaatacctttatagtcaaatataatcatatacacataaccaagggcaaagttatcatgcatattacacatatatatatatagttcaataaattttaaatttctcatttaatacatcaatactacaaataaattccgaaaatatattttgggccccgaactcaatttggctcaaaatatcttgttgtgactatattgcactgacttgtctattaatacttgtagaaagataaagtatacatactatataataatatagtccataagcactatatatcataaaaattacgattttactcttctcgaatcaaaattacgaaaatacccctaagacactaacatagtcttaacatgcaatttatcagtatagttttacatattaaattatataataatataattccaaattaatacataattaaactagttatggttgctaatccggtatcataaaccttaggatattacattattattttttatttggtaaggagaaaattaaaaaaaaaagttaaaaaaatagatggaatcttatatatttttttttaaaaaa

SEQ ID NO: 318077 - DNA, 849 bp, Cannabis indica
aatttaaataatatttaattcaatttaaataataaatattttaaattaataaatatttaatttaaataaattaaattctgaatttataataaattttaaactgaaaaaaaattaatttttaatactatggcatcggttttaaaccctttgtcgttgattcttattacatatgacatcgatattagtatataatgacgtcatagtgtacactatgacatcagttatgtttgaccctacggcgtcgcttgaatcagcgtcggtagtgaattttaccaaaactaacgttgaaaggctttaaaaactacctctaaagtccaaatttatagtagtatatattaaatatttcacatttatattttttaatgcaccacattacttttagatgtgtagtttatattaattatatattattttttataagaaatatgtgtgtaatttaagtgtgtcaattattattcttttgattcaaatgcaaagggaaatttgacaatcaattcttaaaatgggtttaggtattttactttacaaaatattctctaaatatacctcaattttatttaatccccaaaatacccttcccattcaaactcacctaactctcacactctctccctctgaatctctctcgctccctcgcactcaccacagcagtatccaccaccatcaaccaccgtatcaccacaatccacaacatcgaacacagtcaaactgccttgtctccccctctttctattttcttcatttgaaacccacgaaccgcccgaatcgcactcaccaccgaaacctagcacctcaaaattttaaaaggtcttggtattttagcgagggagtccacgtacattggaagac

SEQ ID NO: 318078 - DNA, 804 bp, Cannabis indica
taaatattaaatatttatattaaaaagtaaccaatccaaagtaattgatccaatccgcacttttgaatttgagctactgtgcggattggattggatccaaaatatgaaatctgcacttagtgcggatcggatgcactatgaataaaatagtacggatcagattggatgtacacccctaatgttttcctcaatcacttattttaacttcttaatcaactttcacactcaaaaaaattgtgaataagttatagctagaatgaaaatggcatgaggtgacaatttcctctctgatgatgaaaaagaaatccaatcggtagtcaatttgtttgcaacattctgatcaaatatccgacttgctaagaatggaaggcaatgaagattggacatgtgtatttgacgatataatggatgatagtcttcctttgcaacatgagaagattgagagcagaaaatttgagaaagatcttccaaatctgtctaacttctctaacctaatttcaggaaggaaggaagatgtaaatctacgagaacatgcctcacagcacgggagaagttaaagctaaatgtaaagaccgcttaactttaatttaagaattagtagataaataaggttacttatgaaacttgcatattagttatgaattatcattttacggagatttatttgaattcagaatacattttatatgtcatatatgaaatttcatatttttgcatgttttgtgcccgccaatattgaaacgcgggcgtttggctattagaatcacatcttagtatttttttagtatagtggggcaatatagt

SEQ ID NO: 318079 - DNA, 760 bp, Cannabis indica
ttagttattgaattaaacaaaaaccactagaacttatataaaactaatatttacgtggctcgccacgtaactctcatctagtatattataaaatgggttaaagtttataaaaataggagtccacggtaaaattaacatttatactgtttcagttaatttcttttaacctcaaattcagtagccacgatcgacaaccaccaatcaaccacacggaagaaccaaaaaaacaaccatcattttcggcgatacaaatcatagactattcgaacgttttctatattctaaatttctaaaataaaacaatgacatcgtgacaaatcactccacagtacgtagaaaataatttttttaaaagtaacacaatatataagtaaatgatattatgatacacattattttttaatagtatttttgtaaacaatttgaaaagtacattgtgtagattttcctattaattttaggaaattctaccatatatacatcttgaaaaggctgcaatgatgcaattatatctattttgacattcgaagaatattagtttagtttaatttttttttaataattgtgtatgtcgtagttatttaaagaggaaattacgtaaaatatgacattttttccttaaatttcatagatatagaaaaattagagatttacttaacttatggtttttttacaatttaagttagttgtatggaaaaatatttctatatttttaagtttttattaaataaagccatattttcattttattaacttatgt

SEQ ID NO: 318080 - DNA, 588 bp, Cannabis indica
aggtccgatggtccgaccatcgggccagtgtctctttgtttcctaaaactaaaaaaaaaaccatgtaaaatttgatatccatgtaatttaagaacttttctaaacaaattaatgctacattaaatacaatttgaaaaagttaattcgataaaaatttcataaaagatcaatacagaatccaaaaacaataaaatcttatcaccaaaaatagcaccaaattcaatatttgaagctaagaaatcgtagccatctgtacctatgggtaagacctaatagcaagcatttaatatgaaaattgagataagtcctaaacctataataaagattaaagataaaaattaatattttatattctaacccacctaatagtaagcattcaatatgaaaatgtagtctcttccccacctttagcaagagcgaatttccccaaaacaaataaacaaaaacaaacatatgtattccttcacaaaaaaaaataaacaaaaacaaactgaatcaaagcattcgaccggctatctctggtttttttttttttttttaaagtttgaggaaaacaaagagacactggtccgatggtcggaccccatg

SEQ ID NO: 318081 - DNA, 1144 bp, Cannabis indica
acttatcactttattacttatgtgaatgtgtatacttgcgtacataatttttacaacaagtttttggccccgttgctgaggattgaaattattatcaactattttgcaatttattttctagtttgaggttctgatcccattttggtgcgctgaatttttcttttttaggtgtaatttagtgcatgagcgagcaagaagaagaccttgaacttgctcctagatgcaagtgtcacttggtgtagtttttcttttatttttttggtgcgcaaatttttatttggcattcggttaactgtcactatagaccgcttatgtgtacacgcttatacacatgatacgtttatattggtacacttaatattattatttaaaaattattttcaaaatttttaaaattaaataaaattataaaatataaaaataaaataaaaaatattataaattttgaaataatttttatatttttaaaataataatattaggtgtaccaatataaatttgacacatgtacaaaaaatgtacagataaacagtttatattgacaattaactgcaagcagttcagtagttcggagggttttatcgtcgaaatttaaatttagagggttaagtgcaagtggagtgataattaagaaggtttagccgcaaaaaaactcaatgttttaatattagttctgatgtggcaatcttaaaggtacaaggaaatcagaatcaattagttttcttattatataaataatttgtggtctttgtctcggcaataaattgtaaattgaagcattcatgctctaggagtgatccaagccacccgaacgactggaaattcgtgattgaaattctgattaattcaataaaattcttctccgtcttttgttctttgtgtgattattgctttgtgacatttgatcaggctacaaactttcttatcttataaagagagattggggtggttgagcaaaaatctagaactagtattgactatctttatgattgttataataggatataaggtgaaaattgtagtctttgttttgtaaaattaaggtatcgtttgatagctatttttatttttaattttctaatcaactaaaaattaaaagaattttttttttctttaaaaaaaattgtttttagaaaaactaaaa

SEQ ID NO: 318082 - DNA, 2019 bp, Cannabis indica
ggcataaaacccaacagtaagattctctacataatgaccttatggttataaccacttaaatatggaatataacggtagcacgctacatgacggatgatggagcctcttccaacatcatcttcaagactgtgtacgagaatatgaagcttcatttgaaagatctaacaccctgtacacagttcatgtacaggttctagagcaaaggattggctcctctagggtacatttgatttccattgataatcggtgaaagtcccgcacagaagacagacatgacccaatttattattattgatgtgggatatacattcaatgtcatgatagggtaaccaaccctgtatgacctaaaagtagtcacttcaattaagcacataggcattatgtttctgactaacatggtttcgggtgcttaaggggagaccaatagtctgcctgacaatgttacaatatccctcaaacgaaagcaaaaaacgaagatgtacccgccaagagctcaaacaacgagtttggccaaggataagggtcttcccaaggcgaggagatagatgtagatcctcgctttggggatcctgcaaataactttggaccagtggatgaattagaagaagaaaatattgatccctccatgccgaccaagaaactcaaaatcggtcgaggtttagcgtcagaaataaaattcgaattgatcaaatttttaaggaaaaaccttgacatttttgcttggtcgtatgaagatagtgggaatcgatccatgagtaatttcttgcgcccttaatatagatccaaacttccatccagtacaacataaatggaggctactggataaagagcaagcacaagcattgaaagatgaagttgaaaaactgcgcacaaataacttcatcatcgaggcattttaccttgtatgggtttctaatcctttattcgtaccaaagccgaacaaaaagtgaagagtttgcatcaatttcactaacctcagtaaggcacgtccaaggatttgtttttcacttccaaggatcgattagcttgtggacgtcatagctagtcatgagatcctaagcttcatggatgcctattcaggttacaatcagatcgagatgtattaacctgacaaggaacacacaagtttcctaatagatgtaggcctgtattgttacaaggtgatgcccttcaggattaaaaatataagagaaacctaccaatgtcttgtcaataagatgtttaaggacctaatcggccataacatgaaagtctacgtggacgacatgttagtcaagtctaaaaaggctaagggcacataaaggacctaaacgattgctttaaagtcctttgagaatacaacatgaagctcaaccccctcaattttggagtcaactgaggtcttaactgtaaccaagttcaagcattgcttgaacttgatcaaccttaaaagttagtatactaagattcctagaacaccaaccatgatggatgcattctttcttcattatcttcattcttttaatttgaagtaactaggtggaatttgtggtgtagctcccccaaataaataaataaataaataaaggtctccaaaagttattatcatttctagaaagttatttgactcgcggatgtaagtcctggaaggcttttttatcctttcatgaagggtcttcacaaaagctagcattcctccggttaggagctctggatgtctagttgctcctcctggaaggtagtcccagatagtcgacttcaactggcttgttcctatccgggaaggtcctttagcaagtgccttagtctaactctgtgggtcctcatactctcttccagatgcactcctacttgctgacgtggtgatttcactcaaaggagagttggttaagttagttattgcctaactaacttaacaacctaagttcttgcaattatcgactttaggatcttgatcctaagcctatatataccacaacacttatcattttaagcaatcgatcaggtcgagattgagagagagagagagagagagagaga

SEQ ID NO: 318083 - DNA, 1537 bp, Cannabis indica
ctgttaagatactagattcttttacacaaaataaaaaattaaaccaaataatataatcagctaaaaaatacatattttgtaacaattttttcatcaaatgatttatacatgtgaaaagaaaaatgacagttttagggatctaatctttccatctttaatccaaatggaatctacaaattagaataagtttatgcgataaggtaaattcaactttttacattatctttttattattattttaatgattgattcatcataacaaattgcccttaagaggtgtcactgcacaaagtcactttttaaacataaattattttacccttttaaaaaaaaaaaaacataaattatttacatccattcatgtagaattaatattatataacccttagatgcctaataattaggggcttagctttgttctataaataattaagattactttatacaataatgagtgtaattatgctttaaaatgtataactccacacatcacattcttatatgattggtctgttgtccacccatgaaaatgtcccatgtgaagtgtgatagtaagtacagtttttcatttcttcctttcatatttcttacaaacttttcttctacatgcctagctactactatttaatattaaatattaatatattaagtgtacggttcatttaattattgtcaacttcatctcttatttaattaatgatattattcagaacttggagcagattgattacaaaactctaatctcaattttttaaatattgaaacttattaagaaaaattatcttctccatttacattacataaataataaaagtaccaacttcatttaacaaatgagaagtacagtataaagtaaatgttttttttttcaaaattttaaataacttatcactttcaatttattctaaaatagtatcattaagtttggttatatatataaatttagtattctcaatattgcacaaggtgcaattttaaccacataaaggaattcaaattcaacttttatcacatgaggcactaaatacactaacaagaacaaagtagattatctaaactattaaattaaattaaattagttgttacagaaaagtttaaaaattataaacaagcatctacccaaatagactctcctaccgaactagtaacaaaagtagccagtgaatccattcacaaaatataaattaacattccaggaaccatcattaacatctgcttttaatgaaattacatcacaaaaaaaaaatagacagaaaaatattaaaatggggtgacacacccacctcacaactacaaacgaatcacattcaaattgcctttgtgacataaagagagccaagtgaagagctaactactcataagagtactttggactgtaaattatttttaatttcctcgtgtttattttgttatttcttaatatctttagtgttctcggttcatttatgaatttttagagatttaaaattaaactgagttttatgaagaaaaattaatggattcaatgtttatatgtttaggagatgttttggaggat

SEQ ID NO: 318084 - DNA, 1645 bp, Cannabis indica
aaaaaaaaaaaaacatagcaagactcactttattattcctatgatttctagatacacacagtgctttttcaagtcctcttcccttcttgggccttgttctgaatctcttggcccatatctttggtcttctggcccgcataagaggcagcatcttggacacgtctcttggcgtggtccaactgtacgggcaccgaggtccgtcggaagaaattaaggacccaagagagagatgaaagcccagttacacccaaagccccagaagttagaaaggaggctacagcaagcccaattgtaagggctgctggaacaagaactgggctgaagagaaggaaaactggggtgcttaataaaagcccaataacagttcccataagagtcaaaccagctagagctaaaagagtcccacctactggtaaaagggccatgacagcaagaatttttccagttgatgggccttgttgttggtgttgttgaaaacccttagcaccaccatagtgatgtgttgagtggacttggacttggtgaggttgggaacgatcagccatttctttgagtttgagaaaataatgatgggaaatatgaaagggagagagagaaagaggtgatgtttatataaagaggtgaaggtgtaggttgtgatgacacgtaatttttgagatggtgagtaatgagtttgcatgagaaacaagtttcagtgtcgctggctgcctcttaacccaaaacagtataataaaatttgagaaataaaaaaaaggtgaggtggctctgtatgttgacacatttcaaattgtgttgtggtgtgctgtaaacgttatttatttactatggtaatcaataatactttcatttatgggatattaaccctttattattattatttattttatttttttttttgaaaaagacaaacttcgttagaaaagacatccaccaaaataggagcatacaaacttcggtttggtgtgttttgggccagagatttttgggtttggtatttagagttggttttagtttcgggtttgagtggcatagtttttctgggtttgagaagagtagaactatagaacttatagaacccttaacccgtggatgtgaagaaaagtcaaagaacaaaaccataaaacctaacctacccgtgttcagtaggggttcgtttggaactccgtattaggttgtattgtattatattgaattagattatatatcatatttttatataatattatgttaaactttaatttatactaaaatattatatatttaggtgtctatacaagttaataccacatatagttttacgtaaaaatattgcataaaatacaattcaatataatacaatacaatacaatacaacttaatacgacgttccaaacgagccctaaaagaagaagagtagaggaaccctttagaaccctacctagaatttttgtgcaaagaaagaaaatttgaatatttttaagacattacatctttggggttagctttggtgtcttcttgggctgaagacttgttggcccggactaccattgtaaaagataaagggggtaagttgaaaaatgcctcttttattcatcaattaatcaaatttacctctaattttatatttatttgaaacatacctctttttatatgtattgtacccaaa

SEQ ID NO: 318085 - DNA, 2201 bp, Cannabis indica
attttgtgttctcttttttttttttcgaagacttctcggttgtcgtggtaatatacagcaatttaagtgagtaattataatcaccccattcgtttataccaaactgtatatatattctaaatcagattttgttttatcgatgtacataaatgtgccttttattgttttttttttttgctcaacagtacatatatatatgcatctttcgtcgttttcctttttttttttgtaaccattaagatgatgtggcatattcttgaattttaagaaaaattttagctttctttggccacgtgaggggtgtagtatatatatatttgagatgaaatgctattatattaaattagctggaaagttacaatacaataggcattaacggtagaggcatttcctctagccatgaacaattagtttccaccgaaagagcaaactgtgctaataagtgggcaacagtattagcagatctaaagacatgtgagatatgtgctccagggaatttggatactaaaagcgaaatattattcaaaagacaatggaaatcagaaacatgttgttgtaatgaatccaatcctttaactaccaaaagcgaatccgtttcgattaagtgaacatgtagattaagatcttgtaaccattgcaagctatgcatcaaagctagtgcttccatgatttctggtttaaagcagcctttgaagagaatagatgtagtagccacaatatcccccaaactgttccgaacgactgccccaaaacctgaaacttgtttcctttatgtcaattgttgcatcagtattcagcttcagacaacccgaaggaggattcatccatggagcttctttagcagcagaagtgttggctatatttccgcacgttgcactctgattgaaatctttcctagcacacttgaactcgtctatgtatgagtaagcaaaatagagaagagcatcagctggttttggtcttgtaccatgcctctccctatttcgtttcactccaaatgcaccataaaatagttgcaaattgctccagctgctgagttgaaaaaatagatgagcagtgcataaacaattccattaaattggtctagtgttgcagtagcgtttcagaattaaaacaagacagcttccatacatgtcgggctcttttacagtaaaagagtgcgtgtataatggtttcgttatcacgctgacataaggagcaaagggctgaatcatttatatgtctggtatgaagtacatcagatacagggaggcagttatgaatcgctctccaaaggaaaattcaaatctttgaaggaagagaaagaccccagaactttttccaccattaattgcttcaataccactagctaaaggagagtgatcttcaagtttcatggccaatgcatatccagatttaaccgtgtgttgtccattagtttcatggtgccacatgagaatatcctgctggttgattaaagttaagggaatactaagaactttgttaacatccgaatccaaaaataattcccgtaacaaatcaacatcccattgtctagaatctagaagcagatcagcaactttcatatttatgtcatcaccataaaagactaaaggtttaaaactggtgtaacttggaagccacgggtctgaagcacagaagatgttagctccatttcccactttccaccaaagccctttgacaagtaattccttaccccacatgatgaccctccatgttagatatggatatgagcccataccagcctcaagaatgagttattattgaaatatcttgcctttaatagctaatcacatatcatcagcacttaaattaatagctaatcacatatcttgcctccatgtgattagagtatcttgccttggtggagaatttacacgtggacacaaaggttttagcacttaaattaatagctaagtaaagtaaggcattatcctggatatgcctcccggagaaggcatgcaaggttttctatgctcccggagatcaagatagcatcaaagcatctcccggaggtgccaggcttcctctgagcagtcatctcgcatttaataccgcatgggaggaggcgtgttggaactgccacacgcaataaaatctgacgacacaacccccgatctgcacctacaagactatgaccattaaagtctaataacggctactctgtgacgaatcacatcggtcaaaagggaataaggaca

SEQ ID NO: 318086 - DNA, 989 bp, Cannabis indica
taaccatataattcaatgaatgggcttattgtaatttaattatttaatattattaattctaaataaattctctgtttaacgatcgaagtttattagtagagcatccaatgttcaaaattaggtaatcatatgtttttttataaaaatcaataaagtaattatatgtgagataactaatttgatttaaatcaaatttacatcgttgttttctgttcttttgtttatttccttcgaaatgcttgttgtgagaatagaacaaactgatttattatataagcactagaatataacgtactactttataatggagtatcgacagagcaactgtattgaagttgtgtttttgcaccacaaataatatattataatttataataaagaaatgggtaaattaaaatctgaggaatatttgaaaacaaaagaataggtacatacaagatacaacctatacatctagtacttctagaaatgaaaaacatggtggtactgtggtatataatatatatcaaatatgatatcgaatgtacagtacagtgagtcaggggaagtaacgaggaagcatattttaataagcacacacatattccaattatcatctatgataattaattaaatggagtttcccctgtgaaaagaataaataataatagtagaaattggttgggagtgagagatagttaaagtagtagagcaattataataaattccctcaaataaaaaataaatagggagttgagttgagttgagctgcatttgagtgagtggtggagcgtagggtagggaacgtgggggtgtgggaagtgaaagagaaagtgaggatggcatgacgtggcgacaacgatttgagaatcagttcgccgcatacggacggcggtcctttcaagtttcaacacaagaatggtgcctagtgggtgggtggatcccacatattctctcctttcaaatcggccaattagtaatttctctttgacatctactaaatcatgtcc

SEQ ID NO: 318087 - DNA, 546 bp, Cannabis indica
atgatttcatcaaaccttttgttccaagaatgagaagcttgcttaagtctgtaaatggacttattaagcttacagactttgttttcttgtcttggaatcttatagccttcaagttgctcattatctagatggtttcttcaagaattccattaaggaaagctatcttgacatccatttgccatatctcaaaattgaaagcagcaactatggagagaagtattatgatggatttgagcatggcgactggactaaaagtatcctcgtagtccatacattctctttgggtgtatacctttgtcataagtctagcttcaaaagtttcaactgtccatcaataccacttatcttcttgtagacccacttgcacctgatagggtgaaactcttcaggtgcatctacatattcccagactttgtttttcttcatggaatccatttttgaatccatgtcggctaaccattgttttggttctagaattgccatttcttgtttataggttaatgggtcctcatcaataccatcacctactgttggaaatattttacc

SEQ ID NO: 318088 - DNA, 792 bp, Cannabis indica
ttagaaagttcatatttacggtgttaataaacatacttgtgagtagatctaagatcctggtaaaataaatttccaacacttatatagtcaactctggctatcatcatgcatatgaaattttaaaccaatttgagcctccaccttcatttacaaatagccaagaaaaatagtggaagttgatacggaacatgatattgcctctgaaaatcaaacattttcttttggcatgtataccacgatgctcttcccactagtgagaaccttcaccaccaccgaatagtgagctcacaattttgttgtcgttgtcacagccaagaagaacgctagcacatgctttgtttggatgctcctctgtccagaaagtttagaaattaacaacctttcatgaaattattattaaaattaacttcttatctttgtgttgatttattacatctatgtccttgcattatggttactaaagactttcagttttttgtttgcctactctggaaaatatggcattgcaggaatgaaatactccacaaaaagaaagttacagatgcctagggatggcaattatactcgcacgttcgggtactcgcgggtacccgcccctaatggggcggggacggggtttgactttctgaagcgaggcgggtatgggtttaaatatgcataccccagtcagaaacggggcgggtgggggaatagatacccgccccgatatgatatatgtatacatttaagttttaaaattataactactacaattaaaataacttcattgtttaggctttttattgattatac

SEQ ID NO: 318089 - DNA, 636 bp, Cannabis indica
aagattctccatacaaaactcaaactcaatctatctcttttctctgtacctctctctctctctacctctcaaactttctctcttaagatcattcctctcgaaactcatatgttgatcacatcttgtaaatgatggtggtatttatagattagggatatggatcccaaagtcggttgttgcaaatgataagttgttaagttagctacaaattaacaaactcaacaaattcctcgtagaagtatctctacgtcaacacaagttaaagtacttccagatgaagtgtaaacttctaggactaagaagtgaagcacacacgctaaaggatcttcccagctgataggaatagagatagctggagtccactatccgaggactcccttattggagagaacaactagccatctagaacttctttccggaggaggactagctttcttgaagactcctttaaggtggacatgatagacatccgagaatgcccttccggatgacatctatcattccacaagacttctccggatggataagttagacttccaggaacgtccttctgaatgacatctaactttacataactagaacaatttttttggagatctttacatttagaggaattataggaagaggtttcaatgg

SEQ ID NO: 318090 - DNA, 1240 bp, Cannabis indica
caatggtttgaaattggatttttcatgtcatttttaggagcaagacatttagaaagacaaagtagtccggtgtgtatctttgcctagtgtcttgcatgttgaggataccacaactttgtcagttcttcaacccaccaattagtagccgtttcataaccgtacactatccatatctaaaaatttccagcgaggttctctttcatttccatttacgatttgaagatttgaaagtatttataaaatttgttggtaatttattatataatctcattttatttcagatccaatcgaagaaatttcatcgataaagaagttaattcatcagatagatttattattcggagatttggagatcgacattttgaaattttagatcgattacaatttctgttggaaaaagaaggtaaacttttcttattcaatcccagtagtttattttcttttcaattttcaatcagaacctattttttttttttttttttttgtggtaagcttaattattttaaaagtatttacacatacttcaaacaaaattctaatcactttgttaagaaaatttgtttaattttataaagatttaattatcataaaaagtgtttatgtgagttttttttttattattttattatatacttataaaaaaaatatttaatttttgaagtgtaacttttttttttcaatggggttgtagccctatataaccacattctaagcatccaagttaatattgtctaatttttgtttagcttttttatttttattttgaataattgtttagcttaactttgagttttcctcattatatgaaatgaattatcaatatagtcttgccatagtttgttattttaccccaattttgaaaacatgattaatttttaaaataattgggataaagttttatctctgtttttcgataaaaccgaaataaaatgcctttaaaaattagaataaaagactccgcttcaccctcttgtggtgaaatttattttaaagaaacaattttctaatataattttctccttgtctatcaatatattataggcaataaaaagttttctaaatttttttatattatgtaatgggtctcttataattataacgttagataagttataatcctgttcagggccggccctgaaaatatatgggcccaagacgaattaaattttgggaccctcaaaaatatataaaaaaaaaattaaaaaaagagtgttatgggatttgaaccatgaccttagac

SEQ ID NO: 318091 - DNA, 834 bp, Cannabis indica
attaatttaaaattgatatttaagtttaaatatattaaaaataatatattattatgatttctagagtttgaaattggaaaaaatcagaacttgtggaaaaatcccacaaaaaatgaacaaggggtgttgctgcccaggaggctacaagcagccctcacacgcgcgcatcagggagatttgcagcctccctgaccgagaaacatgggcacctgcagggtatcactcagtgtgtgcagcatgctgggtgagggatgcagggtcatgtgggcggcccatgcaggttcagatagggatttgtcccatgtccgcgcgcgcacaagcaccttgtccgagtgctcctgtgcgtgcgattgaaccattgtgcacccgaatttcaaactttcataagtttttcaatttttatcagaatcgagttccgtaaaaaccaaaattgcttaatttttcataaagaattcaaataaaatattttcaaaacgaaaataaaattatttttatggaaaaattttgtaattcacatacattcatcaaataacacataaaccaacatgagcacatcgaaatcaacaaataaacattattcatcgttttaaatccatatttcatgaaagtaaatcattactatggctctgaggccagttgttgggaatattttaccaagatctagatttactaacaagtatgttgatcaacatcctaaatataaattctactaaaataatgaaaataaacacataagggtttaagaaaatcttaaattgattgcaacggaatataatgactccttccgttcaagatatctaacacttgattcctttctgtagcatagcattatca

SEQ ID NO: 318092 - DNA, 789 bp, Cannabis indica
tgttaggggattgtcacgatgttttaatttaaaaatatttcgttaaagattatgactcgattacttttgtaagagttaatgtctaaaagtttatgaatgaatcaagtatttttgttttaaaataatgagatctcatactttggttattttcaataaattagtttattgtatttattataaatgattttaaacagactagcgagtttgacgtcttgaaaaatcagggtgttacacttctttttcaatgagggagtatacaaccaagagatttgtttttgccattaaatctatacaaaccctaatagagatggcaaaaagctaaaatgtaccaaactctacttgtaacttggctgtcacttgtttcatatggaaacatattatggcagattgggttgatttcaagcccaatgatattattacagcttgccaagtgatgaacatatatttgttctcaaatgaagtctcgccataatggtgattcattagatagtgtcatgtgaaacttatttgggcatgtaggctaagttttttatcccaataatgaccatcaaaatgttaagaatagttctgacttgaagttgagcgatttggtgagataactaaaggaagccatggaaggatatgaggactattttctatgccaagtgaagaaaggtggtgaggaggcttcatctgagatgttggaacaagtagggaatatgagtttattggatgagttaggaaagcatagaggctgtttggttgtgtttttaatttttagtttttagaatcgtgttttcaaaagtgaga

SEQ ID NO: 318093 - DNA, 651 bp, Cannabis indica
attttagaaaatacaaggtcaattttgtcatttaacaaaacacagggtccaatctgtaacttttgcaaaacacagggttcaaaatggtatttacccaaataaaaatagtcgtttgtgcaataaaatatataaatcttatttttttacattgtaaattattcaattttttttttaaagtttacagattattctaaagaactattacatagacgatcataaaaaaaaattagaataaaaaactctcctaaatactaaaacagataaaaatataacgaatcagcctttagcacattgtaatatagacctaaattatgtttatcacatagagtaattgcggcataaatacttaagtgtaactcgcgttaagtaaatttccacgtggcaatctttcattggtctaagttattaattttttttttaagaaatagttgaaatatacccataagaaaataacacgtagataatgacttagtatctaactgtcagataattacaaagtttaaaaaatatgttaagtattattaccacacaaaattaaaattgaatatttatttacaacaaaaaaattaattttttattgtatcatatatttaagggaattttacaaaaatactgttttttgaccaaaactttacaaatatactgggacac

SEQ ID NO: 318094 - DNA, 1470 bp, Cannabis indica
gccagactgagagaggtcgtctgccatgcactgttgatcgcaatgtatttgctcagtagagacataaattcccgagatggatggatgaccaagagtacatcctttaatcttactaggcggagctggatcaccgtaatacagaaaccaatgacctgataaggcagctcaatcagagaacccgtggaagaggccaggatctcatcaaaggcccactctaaggaagactagttgatagatcagggagggtttatcaacaagctgaccaacctggttcttcaggaactaggacacaccttcccctactcaaaggaggacaggccttcccacaaaggtctaatggtgagaacagccagatcttagcaaccagcggcatagggggctagccagggatctcaggctcaacaacagctcctatcaacaacctttggccggccaaccacctgcaagaatacctttgatcgaccaggggagtacactctgccactgagagaagcgagccactcaaaggccaatctttaactggctaggcccaagaatgggtggaaacacccaagacaataacaacttgaggagtgaagacaatcacttcagacaactagatccaccaaactccaacaattagtgtgatctatcccatgtcaatgcacatgctccaccaaccagtcaaagaagcatgggcggccaggccctgcctaacacagggttgatcgaccatggacagttgcgtggcctagggctggctagcctccaacatagtagttcgagcttatatatatttttaaatatgtatataaattatattatatataaatatatatataataacaacatatataaatatatatagtcctcttaatcgggttgttcgagttagttcaagttaattggggggttatattttcgtcgaattttttagtttacatttacatgtatattcccatattttttctcaattttttttgccttatgccctatcataggtccgaccatgttcatatgcatgagacatctgtgaccaacaggggtcacttggtcccaaatggccaagttatccagcgacatcctcaatgatgatatacccatgatcacttataacaaagagatcctcctcacccggacctaatatatccaaggccaacttatacttgtcattttaatatccttgtggagtacttaagaatatctgagggcttcacaaggaccctactgttagaattatcattgtggactaatataattataagcttaataccataaacacaatcattaactatgtgctcaatatttatcaacaatcataataggatggttaataataatttattatgttaagggtacatgagagcaccctcataactataattgtcccaataaattatagtatacattattgaactacttaagcccaattagtaaataactcattatggttagaggggtgtgacatatatatatgtgtcttaagtgaaa

SEQ ID NO: 318095 - DNA, 1351 bp, Cannabis indica
tgcattgtagaatcacccataatgatattagcaatttaaatttaatttctagataaataaaagaaaacaaatataacacataaaaaaaatcgacatcttcaaaactactaatataactattatcccaatatcccacaattaacccgtaagaacgaccctttaaatggccatggctaccgctaactttgttttagaaaacataaaaatacttgaaaccaaagaaaattttaaacataatgaataaagaaatgtaaataaaatgatcaatttattaacaaacatatatgtttattcaaatcctaaaccatataaaaagaaatcaacacggtataaataaaatgagaaaacttatcatcttgaagctttctcaaaaaccaaaagcacatcattgactccacttctagagaatgggcggccagagaagagatcaatttgctttcacgttttgttgataaaaagaatgttattgcagtcaattcacaagtcttaatagccaagaaaacattatatatggatcaaaaactaaaaaagtgaaaagaaaattctatattaatgttcgtcatatttaccaaaaaaaggttaaataaaaaataaaataataataacaataaattaaaaaatcaacacggcaaaaagaaagtctaaaacagattggaaaacttattaatttgtagagatcaaatttgaatcctgcaattggtcaaaaatccaacaaacatttattcaaagcctataggtattttgaaatatagtcatttattataaaagagaaacgtgtatataaaacaaacaagattgactgtgaaacggttgttgggtaggattatcggtttcggttgagttcaaaattaaaaatacctaaaattacaagtttaaaactatttctcttatcttcttcttcccttcattctcacatttgcaacaacactgtccctttttcccgctacaaatcagttctacgcgaaaaccctaactccatttttgtcttctcttcatcttcaatgccagtgtaccgcattcataactccgagataagagatgttaagttttatggaattggattaatattatatgattttaaaaatggttggttgtgttaaccatgttgttgtttttatataaatataatatatagaaattaatggcctcgatctggtgaataaggatgaagaagactattaattagatcgtgtagatatggattttgaataatccacgagcgagacctagcaaaccccagttcgatccagcgacgcttgaaaattttagtcgaactcttttaagcttccactcaatctaggcgtgaataatttttggaatattttaagtttaggttgaatagaaaagttta

SEQ ID NO: 318096 - DNA, 1310 bp, Cannabis indica
ttactatacaaatcgggaacatgactgtagcgatatctttggtggaccatggagcctcctccaacattctttacaaattaacatatgaaaagatgggggctccaactcattgcaagtgatgtatagcttactttggccaaggcattacacctgttgagtatatcagattaccatcatagttggagaaaatttgactacaaaaacattgataacatagtttgtcgtgattaatgttcccttgaccttcaatgcaataaatctatctaccacctatgcctcaaatttccaacaaagcatggggtggcatgtgtgaggggaaaccagaagtttgctcgtcactgttaaccattggccctatccaaggccaaaaaggagaagatgctcaccaaaaacccgaaaaacgagcatagtaaggggcaatgaagtctatcccaaggtggggacacaaacttagatcctcactttagggaacctacaagaagcttcaggcctgtagaaaagttggaagaagcggaggttgatcccacttttccaacaagaagactgaagattggaaaaggcttggctccagaaattaaatcaattttggtagaattttttaaggcacaccaggacctttttgcttgctcacatggagatatggtcataatcgatgcctctgtgatgacccatgtactcaacattgatctaagcattcatccttttttaacaaaaaggcagctactggacaaggagcgcacctaaacactcaaagaagctgtggaaaggctgagcgccaatgacttcacaacagagatattctacccacaaagggtatcaaaccaggtattggtgactaaacctaacaagaagtgaaaagtgtgcattgacttcaccaacctaaacaaagcatgtccaaaggactgctttctactcccaaaaatcgaccagcttgtagatgcccaaactggccatgaaatcctgagtttcatggacgcaattaaggttacaatctgataaagatgcatccatcagatcaggagcacactagcttcatgacgaacctaggcctatactactacgaagtcaagccctttgggctaaataatgcaacgaccacatatcaaaggttgatgaacattctatttagtccgcaccattatcctacgcttgggtagaattttgtcgaaagtgtgcttggcaatggtcacagcaaaattggcaataggtctgcctgtaccagtagggtttgggcagcccttgggcagagtgtcgaacgttcagatggattatatacatctagttagtaggaaggtaacacctccaccatt

SEQ ID NO: 318097 - DNA, 1252 bp, Cannabis indica
tgaaaagaatggaagatacatcagtatatatacagagggaaagagcaaataagagaactaaattaactaactacttgaacacaactacctaaactaccaaccgaaaataacggataaaactaactaactacagtacaaaaatgagtaatctgatatcccccccttaagatggactgtagatatcgtatacaaccatcttgcgaatgtgagatgaaagagtagtagaagagagaggcttagtaaaagcgtctgccaattgtaatgtagtgatcactgggataagtcaaatagttgaggctttgatcttttctcgagtgaaatggcagtcgagatcaatatgcttggttcgttcgtgaaaagttgagttatttgctatatatatggcagactggttatcatagtagatgaaagcaggagcatgttgactgatttggaaatcagtcaagagatactggatctaagttatctcactactggtgctggcaagggctctatatttggcctcggcagagcttttagaaacaatagtttgtttctttgttttccatgaaattagacagtctcctatgaagatacaaaaaccagttatggatcgtcttgttgtggggcaagcagcccagtccgagttggagaagcctttgaggtgtaaagacgaattggaactgtaaagaagaccttgtccagggataccttttagatatttaagaagatgatgcacaacttgcatgtgtgtagtgtgtggagatgacatgaattgactcaaagtgttgatggcgaattttatgtcaggccttaaaagagtgaggtaaagaagtctgactataagctgtcggtatgaagagggatcatccaaaagatttccttgttggtcatcaagcttcgttctgggatccattggggtttttgcaggtttacttcctgtgtagtcagtgtcttcaaggagttgtagggtgtatttttgttgagacaaaaatacaccttctactgatctagcaatttcgaagcccaaaaaatatttaagtggtcctaaggccttgagttgaaacagggcattaagggactcttgcaactggtgaagaagttgaatgttgggacctgtgatgataatgtcgtcaacatagacgaggagtgcaacgaactggtcattaaatcctcgtgtgaataaagtgtagttggcttgggattgggagaagcctgttgtgagaagagcatcagagagcttcttataccattgtcttgaagactgtttgag

SEQ ID NO: 318098 - DNA, 656 bp, Cannabis indica
agatctattggttggttctggtttatatgatggatcatctgacaaatatttgtggagatcggagacatctgcaaagcctattggcacttcagtgtttgaagaagtagaagaatcatacaaaacatttgccaaggacaatgatatctctctaaaagatcagagagtgaggagagtggatcacaagttgttacatgatttgttaaacgaagcactctcaactgtacttgaaccacatcgtggaatctcaacagtctctaaagtcgaaagaaaatccatcaactcctcaagttttccaactttgcatggaaacaaattgttgaactgtgtttgggagattatatgtgatcatttatacccttcgacggatagatcctgttattcactagaggatatggtggcgcgagacctgagactgagtccttggactcgagaggtggatgatgaaggtactagtttggggagagaggtggaaattctgatcctgggagatctagtggatgaaattttgaaggatatgaagctatgattgaaatcaagttacaatgacatagagtggagtggagtggagtggggtggtgtgtatatgagaatgagaagaagtaaatacaattaatggatatggaaaactactgcagctgattaccatatatatatat

SEQ ID NO: 318099 - DNA, 1764 bp, Cannabis indica
attatcatttttttatccaatccatatatctagaaaatatttttcattgttgttttctttttaaacagtaaaatagaaaaggtatttatatttcttaaataattactattgtgatgtcgttaactattgtagttactaaaaaaatatttttgcttataaaattaaaaataatatggtcaaactaaaattataattaaccacactttgtgaatattattataatttctttttataagcaacatttaaattaaatatttattattaaaaaataatattgttaatttaataacatacaaaaaaaaaaatatacaactaaaaatataggtaataaaaaaaaatattaagaatataactaagtataattgcacgtaatattacttttgtatatatagagtaatttgtgacataaatacttaagtttaactttcgattgcaaataaatatttaagtttaattttttgcggttaataatacctaaattataattcttaaattgaagaaggtaccaaactgttaagtgtcatgtaaattaccacctactaataattctaatagtccagtataattttatttctatttaaaaatcatttaatatactaagaattaactcatatactgttttttttaatttttttttttctaaatgtacggtttgggtttctaatctaatgatttctatgtaggttattatacgattttttgttgcgatttaggttgcagcgctagttgcaataggggtttctatttaaatactgtaaaattataaaagaaaatatatttcaaagtgttaaaatgaaaaaaacctctaaaaaaataccacatgtataataagatgatatttatcagtcaattacttataaaagttacataaatataatataaatattattaccattaaaaattaagtttatttatttaattatttgttattaaaaattaaactcacctcaaattaatctatatatataaatagaaacatgttcatttatttttctaactagatgaactagtgattggataattgaataattattatagagatctaattaaaagataaaaaatctcaagtcagaaccacatgcccgctactaattatagccaaaattaattaatataaaatctaaagctgaagaagatgtgatgtgatttattctttgtagtgattactagaaaaaagcttcgtgtgatttgcttacagtcataagtcagtagggttatatatataatattcaaccatttaaaataagtcaactgacataatttttggggtacaatatgaaaggcaatcaacttttagaagcaaattgaatggctcaaattgagaggttttgacttaggttacgttcaccaattggtttttgctaaggatcatgacgacaacattttcttttttctcctttaaaactcttgtaccaaataaactgaatattaagtgttaattagaatcttttattataatatattttacttgatttttataattaaaatcacatacggtaataatatttttagaatttttttaataagagtatttgttatagctataatattatatctatataaatttttaaaaagttttaaataatttataatatcgaaaatagatttccagtatactatatgttatattttaccaggatctagatttactaccatgtatgttaggtattctctacctacctacctgtgtcggtttcaggtacaggtacccttttgttgaaggtcgttcgagcttttcctgggagtatggcatgggttacttca

SEQ ID NO: 318100 - DNA, 968 bp, Cannabis indica
aataaagaggcatttttcaacttacccccaaaaatttgcccaaaggcccagcccaatgtctactcttccagcccagaccgtgggccttttccatctagtcagctccagatgtcgcacctggattcgttccagcatatgagtcagcacccgcttggtgcttgtttcttctccagcacatgcgacacttggcgaattctgattggtcaaccgcttcctcttcttcccttcaactctccacacgtgcaccacatggcatccatctattggctgcagctacatgattctacttgattgatgaatgcatgtataagatcaatcaatacaaacttttcacaatcaacaaacataaagatgataaagattgggttgtttatccgatctaatctgtatttttttggtcaaacaatatttaattcgtactaagtgcggattttaaattttatatctaattcaatccgcataacaattgaaattcaatccaatccaatccgtaataatgcagattggatcgatcattttggatcaattattttatttttaatgttaaaaattatttaatattttattaaaaatttaaatgcaaaaaaaaaaaaaaaccctacacacaacaataagtagcacaactagaatttaagtttaacacactaaaaaaactattatttcttttccaataatatattacagtacactcttataggagaactattaaagttcatcattaccattatgtttgcagttccacttaatttgagaactatttgcttgaagctaggactcaattgaaaatggaattctcatccgttttaatacttctacacaatcatctctatccatttttatttagtttacataaataacaaactaaaatatgacttggcacgatcttctctttttgaggctgaccgtatttttagtggggactccttaccttttgtttttgcatctttagttttggatgatttagttta

SEQ ID NO: 318101 - DNA, 699 bp, Cannabis indica
ttggacatccacataattattaatatttataacaataaatacttattataaatttatgacaacaaaatgtcgaattaataataaaatctttattctctattttttatttaatctataagtattcacattattctcaaaattagatccttactaaaataatgtgaatatttataaattaaataaatacttaaaattgataaaataataatgtgaatatttatgaattaaataattaattgttgtaacctactgttaaacattatcctaaatactgcagagaccatgggcccatgtatttcaggctcccaataagatgcggaatttacactgtgtactgcatttcctatttttattacatttttattgttacacgtatataatgattttttttactgcttaattttttttattgtatactgagtttttattaaaataaaattttgttcctttttattgatatttgtcaccccagtttctattgtaaccattttcattatatttaaagattgtaaaagttatgatttgattgttcatgtaacttttgacaatatttttttaattatgaaaaatgagaaaacattcttttacaggtttgttttaaatatttgtacttatattaaaaaaaattactttgtttttaattctatttttattgtctctccctgttcaacttcttcttcattttttcttttttctttt

SEQ ID NO: 318102 - DNA, 552 bp, Cannabis indica
tggtccagatgctttggataaggttttttcaaggataattggactgaaataggtactaaatttgtttggcagtaactgatttttttgatatagggaggacgcctattgagctacattctattgtaatctccttaatccgtaagcttgataatccagggaaggctgtggactatagaacgattgccttctgctcaacaatttgtaaatgtatatcaaaacttttgtgttctagactgggcaatgcttcttccttggatgaacgctccctcattttggttaatcaaatgggagaaagtatgtcatccaaaggcttatggaggttcggggtttaaagatggtgataagtggaatcaagccattcttgccaagtatgtttgggctatcataacaaagagagatattctttgggttaaatggattaattacatttatctgaagaacatctcttactggtcctatgagttgaaacaagactcaagttggtattggcgcaagctctgcatattgagacctaaatattcagaggctgatattatttgttgggttttatgc

SEQ ID NO: 318103 - DNA, 1338 bp, Cannabis indica
gttctttttttaattttttttcatgaaatattaaataatttattattaaaaaagtaaccgatccaaaataaccgatccaatccgcactattgcggattggattggattggatttaaactcttatgcggatcggattggatccaaaatatgaaatccgcacttagtgccgaatggaaggtggttgaaccaaaaagtagcggattggatcggatgaaccacccctactcaccaggtcaggtcttctagtgacctaattaagagccttgtgttatatacttaaaactgtttattttggtttacacttaatttttagacaaaatttacataagctacatatatatatatatatatatatatttttttttttgaaataaagaaaaaatttattaaaaatactcgctgttacaaaagaactcaaaaattatggacaaatatttgtccaaacacaatcttttaaattagtaacagaattgtcagaatgtgagcaacactattcgctgattgcggaaagtgctgcaagaaccaccaccaatagtagcgaataaagaatagatatctaataaaataaactgaaaactaaaattaatgtcaaacttattaatccaaccaatcaccacatgagaattactaattgttagagaaatttacataagctacatattatcccatcaaatttacaattttatctttactcatttttttcaccgtttgtttttgtttataaaaattttacagcatttttattggaataatattctctttttctttttatatatttttccttcattctttctcttttttctcttaaattttaaaaataatttataatcacgttgttacacggatgatcttaaaaaaatatcattataatctactttcaatatgaacatttcaaattgtgagatgtatatattttttcgttatctttagaaaagaaactacttgattactaatacactgaatagttactgttttatagttttttaaatcttaatgttgcccctgatttcgcccaatatacgtggaccaaccagacagggacacgtggatcaagcaattcacaatatttgctaagtcttttatgccacaaggtaacgtcccggacgtaggtcccggagaaggcacatggaacttaaggtgctcccggaggctcacacaacgctaaggcatctccgcgaggtgtcaggcttctcctgagcaatcaagtcgcattaaatgccgcaggggaggaagcgtgttggaactgcaacacgcaataaagtctgacggcacgacctccaaccagcagcgccacagtaatgatcatttaagtctagcgacggctacactgtgaagagt

SEQ ID NO: 318104 - DNA, 1358 bp, Cannabis indica
gggaaattcaacgattcccttattccatgaagcctaagtgagaatcatgggaaggatgcatgcttcactcttctaccaaaactcccaaaggaaatcatacccagatgtcccactaggggaggtcagcaatctgagggcaagccaccatctccgaaggctggcctccatctccaaatgctggcctccatctttgaaggttggccaccatctccgaaggctagcctccatctttgaaggctgccctccatctttgaaggttgtcctcattatacaaaggctggcctccatctcatgtcaagcaccaggtgccagtaatctgcccaaacctttggtggcaggacagttaggggttgtcattggcgaaccccatattataggtgagaccaaaaaagttagggagcgctatgctcgaacactccatcatgagcctaaaagtgactttttggcgagcaaagaaccagactctaagcaaacaaagcttggagagcccacaatctctttctcaaaaggagatcctacccaagtcagttcccacgcaacgtctctctggtcgttactgcataaatggggaatatgactgtggcaagatacatggtggacaataaagcttcttcaacattcttttcaaatcaatatattaaaagatgaggcttcacatcgctgacttggtaccctacatttaagtgataaagggcctccttggccatggcatcgcactcatcagttatatcagatcccttcactgttggagaaaatccaaccaccaaaactctgatggcacagtttgtcataattgacattccctcgacttctaacaccatgataggctgaccagccttatacaacttgaagtcagtaacatcaatttactacccctgcctaaaattccaaacaatgcaggggttaggatgttgagagaaaacaaacaatctacccatcactgttataacttgcccttgtccaaagccaagaaaaagaagatgaacccactagatcaggagcctacaaccatcatgacagacttaggcctgtactgctacaaagtcacgccccttagggctaaagaatgccagggccatacatcagaggcttgtgaacgaactgttcaatgatcttatctgccgcaacatggaggtgtgtgtggatgacatacttgtcaagtccaaaaaggctaggggcatatggagaacctagacaaatgctttaaagtcttctatagttacaacatgaatctcaaacccagacaggatcaaagccctttcggatatgaagttgccgaaaacaatcaaggaagtacaaagccaaacagaatgcattgctgcactaagaaaatttgtgtccaagtctacaaacaaatg

SEQ ID NO: 318105 - DNA, 1133 bp, Cannabis indica
gtgtttcaaataatctcaacaccttgatatacaaatcaagtgctagggcataaaacccaacagtgctaggggtagttagttgggattcaattccaagtttaattaaatgatctttgaactacatatccatatattctccacagtccacgagtcaatcttgttagacttctgatacagttctaggaccttttctcttatgaatttttttgtcctctttttagtgtaacatgcctctatttataattacatattcaggcagttaattacatagcttattgatctctttacaacaattatcccctgaaatcatggggtttgattacatttcacgtcaaataaatgtggttaatatttaaaaattacacagctgtgataggtccgcttttactgggttaagataatcgtgtattaagcatgttgtaaaccgtaatgttctaagatgcctatataggaacacgctatcaatatccttgatagcgagctagagcttttcccacatcttctaagaggttaataatgttagccttgtcgcttctgcgagcttggcgacaaggtgaacttcaacagccaacgtcatttgaatgttaacttctattcaagataactgactcgttgatactagttatctcattgaaagatatctgaagctgattagtgaaagtatcagaagcgtgccttcctatagcgagatggacgtctcgctatccatcacttaggttcttctagttattgtacttagttagtataatgtgtattatacgctaagtgtattaacaatcattatatctcgccttcgtctcttcatacgtaatgaggttgatgtctcgccttacacatccaatggcatatgacttctcgttaacgtatgagacaacagtctgtacatctttatctcgcgtaagacattatagtcagcaagttataaatctactctattatttccatattcatgagttatttcattttcaaatgtaatggttaccattacactcattgatatatattttcccaacttgacacatgtcttcctttgaaatgatagttgaatttcggggataacataggtttttaggcctaaaagagtattttttttgccaaacattatgatttttcaacatttttcgattctgtaa

SEQ ID NO: 318106 - DNA, 909 bp, Cannabis indica
tataacatattttttttatataaattaaaatattatcattattataatagaatctaaataactcaaaacactttaaaatttataatttaccaaacactcagctcaatttttttccacagttttgctacagctaattttccccacagcacaactacaactgtttttttctacagcacaattgtgccaaactgaccctaaatttaatcggatttgatttgggttttgactaggcagatttggactagtaccatgtttgtgacattctattgtggggttagtaaatacaaagaagaaataaataaataattaatgatacgatgatttgagaatacatttgtactggtttagtttataataggtgggtatacaatgttattccaatttttgtccatctgacgtggcatgttcaggtggccaacatcaataccgcgtaggagtacaactcgccaacaagaaagtcaagccatctactcaatactttaatgcattaatgaccaaggggtcattatgtgagaaattaacttgaacaacatttccttctatgaaagagatagtgggttctttgagctttggttgcttggagcctctttcttcgatggctaggatatcacttttaggctattgatgaagtgtccaagcatagcgctctctagccttgttggtctcgcctgggatatggggtcttctgataatggcccttaagtgatccgccactggaggtggcatagggtctccatttttggcaccttgtgcctgagtttggtcgttctgcacatagcaatgcaaactgggattattctttcttataaggaatttgatctccctcttcaaattctaacactcgttggtgtcatggccgaagtcattatgaaatcggtagaacttggacatgtccctcttgctcatctc

SEQ ID NO: 318107 - DNA, 816 bp, Cannabis indica
agttcagtttgatacagataaattctaaccttgaaaaatagaggtaatagtctccaatatcacatttcgaataagtctgttagtcctaattttatcaaatctatttactcattcaaaaataccacatgttgaaacattattggtctaaatcatattttaattaaaaataatttaaagtaaaaaactacataaattatttaaaaatcataaaaaaaaatatttttttcctttttttttttttggttcttcatcttcttcatcttggcacactctgacccccaatcccacctccatgcccacaaataaccacacccaaacaccccgacgaagccttgacatcgaaattcctgacccccaaccccacccctagccacacatcgacccccaccccacccttctctacctcttacttcagtgttagagccatgtcgtcaactaatctgatggaggccatgaatccttgattactgagtcacatcccaaaccagaaccccactagagaagctattcgagacatgggttcagattttgaagcatgcattttcacctttccaagtcagtgatgccttatgggcccaatcgaacccatatcttgtcttcgatgtattctactggttgattgatgaaggctcagatttagtctgctttgaagactaatgagccatgtaatatttgatttcttgggtaattaattttctttatacttttagtttattttatttgccaatgggaataatttatcatttcaaatatttattagtttagcggtgtatgagattttttttagtgacaataaaatttattatttattatttt

SEQ ID NO: 318108 - DNA, 897 bp, Cannabis indica
taaaaataactcagttaaaaaaaaccgatctcacaaactaaatatatactgtaatattttatttataataaatgataatattattggtatttaaatttattaattaattcaaaaattctattcaaattaatataatagaaggtaatgatttaatcctaccctttttaaagtatcaacattaccctcctcaagggtagttataatactaagggaataacattccaagctaaagactcaaaacaaacaaggtaatgtttcacattaccatttccttgttaacattaacccattccaaaacagagaatacctggtttccctaagaccagagagtaataactattatcaattattttatgatgttctttgcatatttttttcttaacttttttctaaaatatttcgataaaataatgttttgtagatattagtaaaaaaaaaaaaaaaaacataaaatgtgtaatattttctactttatattattgtaaatttgtttagatgaagttaaaacatataatattacttatttaaaaaataaaaattataatcttatgtctatctttttttaaaaataaaataaaatcgataattggtattataaattgcttgtaaacttaactaaatgataaggcaagtaactacaaaacatctattttattatacttagattaaataattataatagcatataagataagtagtaatattcaaaattaagagagaaaatggtgaaacactaaccatcagggaaaaaaataaaggaattatttcacaaatacctataataacaacaaaaaaaataaaaaataaaatataaaaatacggttggacggaattttaaataattttacgatttttttattttatttacagaaattaaatacggtctttttatattgt

SEQ ID NO: 318109 - DNA, 833 bp, Cannabis indica
gactactgactgtcacagttgacgattcaacattcaaatcattactttgcttattaatgcttgaaaccattttaggttggtttggaaaaggtgagggaaacacatgtgggtgtaaatatctttatgtgaagattggaatatgctggggagtctcaaaagagctaaaattttggtaagggaatgaagagattggataatttggagaatttaggttaaattgagaatattagaaattagaattttgggggttgttaaaaggagaattatggttcaattgagaaaattgaaaatttgaattttgagagttagtacatggaaaattttggttaattgaaaaatattgtaaatttgaattttgtgagttggtttgtggagaattttgataattttggttggattgagaagattgaatgattgtattcgcggagttggtatatggagttttggaaatccatttatgaatataagataatgttgaaaaagtggtttggaaaatgatatgaaatttgcgagaagaacaaaaaatagagaaaatttgtgataatagattttgtaaaaaattgtagaaatggtgtagaaaaagagtaaaaaataatgagtatttacaaaaaaacaatatagttgattttttttatttattaaattatttgaaacaaattttaaaattgttactattgccctgcatttaaaattaattttactttcatcaataataaaaaaattgaatagaacttttgctcttgcaagtttactccaatgtagagcgttggagctgctctaaacaaatagttgctcgtaaaaagaatgagaaatttgattttatatacttaaaa

SEQ ID NO: 318110 - DNA, 2106 bp, Cannabis indica
ctatatggaagctggccatttttgtgatataagtttaataattagcttttcataagaattaattaagtccttaacctaacataagacaaaacaaaatattttagctctttctctctttctttcctacggttgaagcaaaactagcgggaataaaagattttggttcattcaatctcagttttttagcaagatttttaggggatttggcaactagaaaccagaggtaagctctttcactctctttgtttgagttttggaaggtttggttaggtttgatcttgcttatatggaatttaggatctgtttgatctatgccttgttctggttcgacttctgagttatattttagttgaatttagtttatttgggtgagttttgttggtttgtggagtggttgagcaagtttgagtttgaaaacacaaacttggctcaacaatggtgctttgagtttctatgaatagttgctactatttttgcttgaaatctgttctaggatgatattataggtgttctaaaaagtttggttgagtttgagaatgttttgaaagagatatgagggttttgtgcagggaaccggtcaaccgattctgctagttctgtagaacctgttaaccgtttctctaggaaggaccctaggaaccatttttttgtttggggaatccgatttaccaatttgggcaattttagagccttaatttgatgtttcctcgatatttaaggtatttccttgttatttatcaatatgaaaacttttagttttgagtttaggtctctgaaaaggattttagcaagttgtttacctgtttatgtgattgtgccataatgcctccattcaacacatgattttccattcatgtcgacctgcacacttgagtttggaaatgaggtaagactagcatagaatatatatatatatgtgtatgtgtgtaaattccaagttgtgtatgtgattcatatactaccaacactagtatggtggcggtactgagggcattggtacaatatatgatgttcaaagggtacgatccagtgttaccaacactagtacagttaagtacgtagtgtatgtggtacaacacacaggggtactcgaggtacggttcagccctaccaacactagtacggtagcggtacttagtgcatgtggtacaaaggtcgtacttttattaagaacattcttgatcatctgtttagcctcgtggataggtgtatgagcgcccaaatacaagttagaaatatattatatgttttaggcttttcttactgagtctgttgactcacagatattgtttcccatgtgcaggtaaaggaaaggctaaggctaaacaacagtgagtccagagctcgaggatgattgtacatgtcaaaatggtgcgccaaatattataatgaggctgttcaagtgctaaaaggaaagagttcaatgaactggttcagggaaagaccatgtcggtgacagagtatacaacaaagtttaatcgacttgcaaagatggcttcgggcatagtgcctacagacttcagtaagaaggaaaaaatacttggcgggtttgaatgccaagattaggcatgattggtgattactacaaatgatacaacaaactaagctgagatggttgagaaaactctttgagctaagggtgcgatggaatttcttcaagagccccaagggactccaagtgttggtgggatcaccacccttcctacttctggatatggtaacaatggtggtgattccaatgttaatgaaaagagaaagaccttcccgacatcaggtagctcgggtcagaataaaaggtttcaggggaaccaaggtagaggtggactttaattttgtatatcttgattgcccttgttgtaagaaatatcatccagaggattgcaatcggacgacatgttttcaatgtggcctggtcgagcattttaagaaagactgccctcagatgaaaaagaaataaaagaggcaagaggcgaaacccgtacttgctcgggtgtttaccattacccaagctgatgttgcaaccagctcttttgtggtaacaagtcaacttcctatcaatgattcatattttactgtattgtttgactctggagctacacactcata

SEQ ID NO: 318111 - DNA, 1704 bp, Cannabis indica
cttatttcaaaccttcatcaactcgagaatttgaccttgtgcagttcaaagcatgttaaaatctccaatcctcacttgaaaagtttaaagttgagggttaatagcatttctaaagatgaaactagagtgataattgaagctcccaaattagtatcattttgttatgaagggaatatcaatcatagtatatcaatagagtcatccaatttgttggatggaaaattcatttttgttgattattataagaattatgacgcaaattggtttatcgatatgatgagctttatggcgaatctcgattgctcctggaatatagtgagcctgcatattgattcggaaaaggtgtgttttttacttttattctttcttaaatgattctgtgctgttatttcaagtttatattatttgtatattttgatattttaatacattttcttaaatctatacatgaaggctctcatattcccagaaaaaatgaagaagatatgtcgttctcctttagttaattgggagcatcttagagttttcactacatgtaaactagagagggaatcagacttgagagatgctcttctgtggatttctccttctttaaagagactatctataatggaaaaggcataacattttaaaccatggttttgtgtagggatactgtcttttattagttttctttgctaatatctgcatttgtactttgagtattgtgtttacttcatttggactgataaattggctatgtctactttctttacttataactgtgtcccactatatgtttttcagttaaaagtaaaagcaaaatatttttagaattgtgttttccttgaaattcaattattaaaagaattgtaaacaaggcttacttgaattgaaacttgatagtgaaaaagaaatataagggaggggtgttgtgttggtaatatatatgttgagattaattaacagcttcaactagcatgaaaatcaattataaaggttcgaacttcttccaaaattatggagagtctaattctctttgaacttccataggagtcctcttccactatgacaatagcaatgttacaatctgtgatcaattacagaaactttaagatcaaaacaatggtgaaaaactccccttgtatgtttgtatactcatataggaacagttaaatctgtaaatagaaataaataaggctagtatgtatgtaatattaatttatttgttttttttttctgtcagaactgagtaatatcaattagttcaattttttcttttatctaaattaacattatgaataattatatgtttatgtaagagggaaactcaataactaatacctatttattttattttttttgaaaagataactaatacctaattaaaagagaacaaaatgtaaatttttggtgcgagcccattttccaactctctactttaagaaaagcattaaccactagttgttcggtgcggtttgggtgacgcaccctatcgtaggtgagagaggctacacgaattggactttgacgaacattcaagagcaaagtaaaagctctctcggtaacacccaaagagaggagccaccttagtaggtaggccctggaagggccagctctaagcataggcgagttaggatccatttattttaagggtccaaataaaaaaaattacttttatattttttaataatttttaaaaaatactatttatttttataataa

SEQ ID NO: 318112 - DNA, 954 bp, Cannabis indica
taaaaatttaagccgtaaaattataaataaataaaaaaaaaacgtatttataaaaattctcctaaaaaataattaattatataaataactatattttatatttaatattttgttttatttaatataattatatttagttggatttttttatattgataatatttctaaatcacattaacttagtgtttacatactataatatatatatatatatatatttttgcatataataatatttttaaattatttttaacacgtgcatattaatttatactttaaaaaaatagataaagacaaaatactttgtatattttatattgtcaatatcaataaatatgtttattaatatttaacaaaaactaaaatttatcgatatattgtgattacatatttaatgcaatcactaaaatacctttcatataagcaaaggtcttgtcttttgacatgttctctgtagcctttgtggttgttttgggttcataatttatcgatttgtcgatattggttccctgattttgttttttttttctatttttgtctctcttttgtctattgttctggtttggatggcctcaagtagtcgaatacaagaaggtgaggatgatggggcgaatatttttataaagggagaggaagaggttatttgtcatatgatgcgatagcaacgagcgagaaagattatgatgatcgatggtgtattgtgggcagattcttaactgatagagctgttgattttgatactatgcagcatttgatagcatcgctctggcagctggggaaattaatgctcgtcaaagaatcggatactaattgttatttatttcagttctaccatgagttggacatacaaagtatgattgatcgaagtccatggacgtttaacaagtttttattagtttttagaagactgcagaggggcgaggatccgaaagaagttcaactaaaagaggctga

SEQ ID NO: 318113 - DNA, 3349 bp, Cannabis indica
accaaaaggttaggtatcaaaaggcatgactataaacgggcataattatttggtaacctacttgtcgattgtctgattagacattgagagagatatatagatgtcgagttcgggcatcagagttgcctgattaggcaatgagacatgtggatgcagggttagagcatcagggttgtctgattaggcaaccacaaattgttactttatgaggtaacagatataatatatattattaaatgggtattggtatatcattaaatgtttatactgagataattttgaatgaatatatgtattgacttggacttatgcataggagaaatgtacgaacatcgattctgaacactttgtcaaaaaatgaatatgacttctattattagcacaataattttttattgtcgaatattgatgtttgtttgtgactgatgttagtagtgatttgaattttatcctataagtaatgtgtaatcatttgatcctgattggctgagtataaatgataatatttgaataatagattatatgattgttgttattactttcttactgagtccttgtgactcacgggtgctacgtggtgcaggtaataggtagagttatttagacaaccatgagttaaaaattttctccagcaaatgtacatatcagcttatccagcaagtggtgctgagttgtcaagaactgtattttaaatgttctgaacttttaaatatattttataataatacaataatagcgtgtcttgtaatattttaaataggggatccgtaatcgtaaaaagagactatgtcatgattttataatttaaattagttggtaaagtttttattaatcataatttatctaaactactagtttattattataaactagtttataaacgcacacacatggcgtctctaaggattaggacgttacaatatggtatcagggcagccaaggttgaaaaaatcctgaagactagctagatatgtacatttatggtgaagacaagctcgactcatagatagtaagtattatttacccattatataattaattattatctgatatcgttagcaatatgtatatagaataagcctgagttaagttaattgtaggttgctctgactatgtattaattgagataatccagtatagctatatgactgattgatatgtagaggaatatttattagtattaatgttatttgagaattattaacagtgcaaagcaatgactggtaaagtattgagtatagaatccaataagaaaatgtgtgcaattcgatggaaaaatttgacagtttaggaatgctgggagagacagtaatttatcgctaccatgatcatgaagtgatgtgtgttgttatttaataaactagttgacaaaacaaacaacttaaataaatttataaaacagtaagctggtttgaaagtaagatgagtatttggtatgtcatgtgggtcatggaatatgagaaaccattgagggtgattgctcaagtggtttaaagaatgtaatcttctttccctaaaggtggtttaaaattcctgaaggtagaacaacagataagtatgattgtgtctatccgggatttgaggtgaattgaagattatgattaagtgaattgtgctattttgtgttacagaaaatatgttcatatagtagagaatagatcccaagaagcatgaattgaaccatgttaattaaggaataactcaattaatgatttataaggagatgatgacaagaatactaatattgttaagataaagaagactatctacattgacagttatggtatgacgatgatggagaatacttttgaagctctaatggatggtgaatcttgtatatggagtagccatagaaattctaagaaaggtaagactcactcagaaaaatagaggagcacacaacatgtgaataaaggaaatacacccaagtgattaagatatatattaatgagattgactgagtactagttattaatgataataacatttgggaagattcttggaggcctccactctatattcagtgaggtaggggttataaccccgatgattgaaaggaggaatttagatgaccttctatatgtgggtctcagttagaagtattagattattgaggtttatgttaaaacgaaaataagacagctgataagcttactgaatgtttgatagtgaaaggtgttttcctagagaggaagattgtgtttaaatttattttatggtaggggcttagaccacgtattatattgttaagggaatgatatgttgttacctattaaagaattgattatctcctataagcgagattaatttctctagcgaatgtagagatcgtaaaatatatatatattatgggttactttattagacgaccagaaatattgggttacttaataaagtaacattgagagtgataaagttattactctatgaacctgttgtagaattaatacggttgtcttattagacaataaaagggtaattgattactttatcaagtgacaaatgaatgttggttattttattagataacagagacgttgttgttaataactagtatatataagtgaatataatatgagtttaaaagtagatggttaagtataagggtattattgactacgagacagtgatggtaaagtacgaattgaaaaggtgaaactttggtgataataacggtaaaagaatacaagaatcttagattctaatgaatcagcattgtcaacgggagactcactataagctaatatggtagttcataccaagagattgtcagtaaaaataagaatgtacctatggtgtgtacatttctggatgtgtttgagaaggttatcaagatcccgactgaagtaagaagggaatttcaggatcaaggtatgatctttgatcaattattgttagttgaggaattgggaaatggatattctcagcttagctgtgggtactcggtatgagtagtattacctttatcgtatatgttgaatcagttaactttataatgatggttacgtgtaaatgattagaaaaattaaaagttgtgtcagtttaagaagaatcgatacaggttgaaataagttgagatgaataaggtttgaattgatgtcaagatagggatgttgagattttatgccctaaataaaacccatttcaatctaatctgatttgttatcaataaaacattagaagtcatttatgtttacatgtagttttcatgtttatggttgaatatatacaaaatctgttaagtccagaacatatagtcatttacaattacaatgatgtcaacacagtggaatgtgattgttattatatgcttcaaaagacatagtccctgattcatcagtgcactgga

SEQ ID NO: 318114 - DNA, 1064 bp, Cannabis indica
cctaaatacaataaatgattgttttttttttttttgtgaaaaaaaagtaaacagattaaatcaacaacagattgtttgtttgaggtaacaagaataaaagaatcgtgtacagtagacctcaaagaaaaaatatgcacgtacaataggttctaaatagataaaatgccatgttgacatgttgtgcctgtgttgaaggagacgatcatggacccatacaagtactgtttagattactacacaaagaaaaattggctagcaacttatccaggaacagtgtacccaataggacactaaagttagtgggatgtaccgcaagatgtgaaagacattatagtcttacctccaaatgaaaggattaaatctagaagaccaaaaatattaaggaggcaagctggatgggaaaataatcaacatatcaagtgcaacaaatgtagggaactgaggcataactatagaacatgcagtagaaggcatagaaaatagaagaaaatacaaacaaccacagaacaactgtggaacaacatgagtaaactgaatatacatttgagcgtaggatattgaagaatataaatttcatacataactaaggtttagtctatttttataaaaaaaaatgatgttaataataatttttcatactttacaagagcttttaaagtaattggatactatattgaatataaatatgaattattcattaataaagtttaatttttaattaaataatgcaattattttcttcaagattataacaaaaccataatattatgaaaatctgataaataaagtaaaacaactgtaaaaaaaatagtaaaacaataataaaacaacaacaaaataactcaggaacattaatatatatattgaatactaaataattcaacagaaatatatttaacataacaatctaaaaaacagaaatataagaaattacatattgtccagaaaacactaaaaacataaaaagaccaatgtttgttctaacaaactatttaaacactgctaaaaaactaaagcaacaacaatctgattggaaaacaacaaatcatttcttctgaaggttt

SEQ ID NO: 318115 - DNA, 1053 bp, Cannabis indica
aaacagaacactacatataataatatataaaatattacattatattgaaactttaaaccctagatgtagcagtaactggaacatgatgagcagtactggtcttgaggccggggtcggtagtaactccgggctccctgaggccgtaatcggtgtctcggtaacccgggccgtacttgctgctgaaaacaccggcatgaagcaacaagacgtacaaaagctcagtgaaagctaagattattatgaaggcttctaacaccctcagtctccaacctctgtgtcctcctacgttaatttgcttacaagccaacctgttttattaattaatttcaaataaataaataaataaataaaacaaaaaacatatgatttatgatactcattataactctaccttaaattccaaattgtattacacacttaatgtaacaattttgggcctacaaaaatttatattttgtaggtgaaaattaaaatgatttatggttattttttttaaaaaaaaatacaaaactatgacaaaatagaagtttagccaaacgaataataaaaaaattagtggtaattaaaaaacaatataaattaattataaattaaaaaaacaataaaataaagtaaaaaataaaataataaaatgaaaaaggaaaatgattgcacaaacaaaagtttgtttataagtatacttacttttcctataaattcttactttgcttataagtatacttactttttctataaattcttattttactttaaatttttgccattttgctcctatttttttcaaataatatgttaaattcataatttcgaaagtgtataaaaaagtagtatttttaaaaattgggctggacttattaagttgggccctatcacaggccctagaggcccttatcaaaggacaagcaaccgcagtgtcacatggagtaagatggaaaaatgcctttttcatttatcaattaactaaatttacttctaattttatatttatttaaaatatatctttttttagatgtattgtacccaaaatatcctgacataagagagtcacatgga

SEQ ID NO: 318116 - DNA, 685 bp, Cannabis indica
atgtgtagcacttttcatcataatagtacttcgggtgactaaaaatcctatttattctatctaataagggttcgtttgtcacaacttttaaaaaaactaaaaacttctttttaaaaaaaattgtttggtaaagagttaaaaaacaacttatttaaagatttatgaaaaaactacaactaaaaattaaaactgatagaaattagagattaacttaaatgatatttgttacagtcatgtctattgagatgtttgttgtctctctataatagtattttttccaaacctttgagtgggtttctttgttttttaatggcttctaccagtggagtgaataaggaagtggaacaaaaatggaaaaatatatgtctagatgatgaggaggataatgagattatttatgaatttataggaggaggtggaagagctcaattttgacgatcgttggtgccttgttgctcgtttattaaccgaaaaagtgtcggatttcatgatctttcaaaatattatggcggatttatggaaaccagggaagggaatgtatgtcaatatcattgaacaaaatagatttctctttcaattctttcatgagattgatattcaaagagttctaacgggaagcccatggacgtatgatcgaaagcaattaattcttgagcgattacaaaggggtgataatcctaggaca

SEQ ID NO: 318117 - DNA, 1179 bp, Cannabis indica
ttaagattaattttaaaaaattatttaagtttatattttttttaataatggtgtatttataagtttaagggtgcaaatatcactcccttctaattaaactcttaagttataatttcttaaaaagacagaaaaaccctcaagttattaaaagaaaaaaaaaactgtcggaggaaaatttcatcggccgtagaggaattttctgatggcggtagaagaagaactacagtttgactttgaggatggagaaagagggagatgggaagagattcgtgcgacggaagagatctggtcatcggatcatgatgacaaagggtggaggagggacctggatttcaatgggtctccgacctggatattcaatatttttcttgcgaattgttcttagaatcattattggatttaagttcaacctttgataaaaattagcatttattttttccttttttgcggccaaaaccctagaaatactgtgtttatagagaaatgatgattaatttatatgtgtgtgtttgcagacatgctcgctgaattgtctagaagagagaaagaagcaaatatcacaccggatccagatattgacgtctttatgaaggtaattagacttagattacgaaattccattgaaattataatttcaaaccaaggcaaaaccctctctcatcatggctcaatttcatggttaattagttctactgttctactaccattgaatttttgttttgtttttttttttaatagggttgaatttttattattatcactagataattataattatttaaaaagaaatatgttaatctcttaaatcctaaaagtcaaaataaattaataaataattagcatgttaaattttatttccacttcataaaatgataagtatactttaatatttttttttaaaaaattaataattactcttaagctatgtttgataggaaggatagggaggttggagagttggtggaggatgtagaataaagagggagatgatagtagcaatcttattaacttgtttggtgaaaaggatgaagtgaataaaggataaaggaaattttatttacaccttaaaaagttttaaagacatctcattttattaatttttattttaaataaaatttatatttttaattatactaagtttttttttaattttttttcttctaattcatattcttaaaa

SEQ ID NO: 318118 - DNA, 726 bp, Cannabis indica
aaaaaaattaaccttatttaatacaagattaaaataatacaataaatttaaatatgaaaataaaaaataatgactatcattaaaaacttaaaattaaacccaagaaattgccctccatatttgttgaggagcatattcaattggtgcttcagaccatttctaatggttgtattattttagtgtgtattttttactattttaatgtaaattttattacttttagtataataactctaataattgaataccaaagatgataccaaatataaatattttgtttaaaagatttcatattttatattatttaaattaataactcttatctgtgtttttagatagtttgtaagtgggccgcaacgaatgcccaatgtggaagtgaagcccattcctcgggcccaagaatatcccttgggtagctcgtccatctaaatggccaaatccggactctacgttcggatccatcaagattgtttgccaaaaacaaaattagagatgtgaagccggaacaattgacaaatacttgacaagagaacaagtggaaaatagaagaaggatgttcccaagagacatctaggaacaggatacgaaagggcgtttcagaacctaagatcacggaagccaacccacatggcattattttggcacgatccatagaaatcaagtagtttgtcccctgtgtaacaccacagaatggtgttgggttttatgccctaaataaaactcttt

SEQ ID NO: 318119 - DNA, 589 bp, Cannabis indica
acataaagtgtcactatatcctaatattttattaaaaaaaaaataatatttaattattttaattcaaattttatatattataattaataatttatattaattatatacaaatacaattaaatataataataataattttaattaatttaaatataatatctcatattttttattccaatttaactttttttaaaataaaaggaatttcattattgtctttatttcagggtatagcctaaatcaattttttacaagttctcaaatcatttcttgaaaaaaataagattgaaccatttttttcaatgtaaatgacaaacagatcccatcatagaacaacaaccaccaacagatcaaaaaacacaattttatacagaaatattaaaataattttgattaaagatacaaatactatactaaatattaaccaaaaaatccataaatgaaaaaaagaatacacataaagattaattactaaagccatttactaaattaaaaaataaaataaaagacaaaaacaattcggcagatgcaaacattgacgaagatatcgccgatgcgaaccaccgtcaccgtcgatgtgaacccccag

SEQ ID NO: 318120 - DNA, 2324 bp, Cannabis indica
atggacaaaaatagatgactaaaaaaaaaatgtaactagtttagttataatacctctacgttagactactattgcgtattaatcagacaaaaattgagttcaaagttattattttgtattattttaaaaaatatagattttgaattatcatttaacaaattagaaagttcaattaataacttttacaaaatacagattcaatttaccctcattttttctcaacaattaaaacaattattttagtttaattacattatataaaaataaaaataaaaacaaaaagttacaataatttatttttcctggaaatttatagctaattatgatttttatcctataaacattaatatgtattaaattatgtctcataaacttttaaggttgtatcctcttaatttattgggattgttggatttaataattttttttttaattatagtaagaaaaatctattatggatgaaaatttagggggttcgagttggtatatgttaaaattcgatggacatgatttagtagatattgaagtctagagagcatgatctagtacatgtcaaaattgagaagataaaaaatataattaatctaatattattatatagaaaaatactaaaagatacagtaatatctaacacttttttcatattgttattattattaactaatcataaaacattacctttaaatattatccttctcaataacaatactctataataacacatagtgtcttgattatattgtgaaactagaatctagatatttgatgattaatcttaactgataacacttgccacgtgtaagggaaattaagagtcacaataaaatagtttgattatgtatttatggaaaaagacaaaataaaattgataatacaaacaaaacatgtaaataaattaatcttattgactagaatttgactgcctttaaatcttaaccgacatgttttttcaataaaaaaaatcttaacccacctattaactgaaacgtgtcaacttgagattcattcttcttttcatgaaaatttagtcgacatcataatttgttcacaacaaaaaaaaaataaataaaaataataatggacatcatatcttaaaattttattaaaacatgtcaacttgagattcattgttctttttatgaaaatttagtcgacatcatattgttcaaataataaaaataataataatcgacatcatattaacaccttaaaattttactaaatcaccccattaatatatttttcatttttacataaaatatatatttttaattttatatccatttattaaaatactccattagtccattaaatttttttacattatatattttcaaatttgtatttatttatttaattttcttatatatttttcataatctgaaaaaaatagaaataataaaatatattttaaaaattaataatgaaacaaaaagacatatataagtttttttttcctagtattaaataaaacttgttaaaataattatttttgtaaaaaacatttatatgtatatgtaaaactacaatatacatatatttttttttattctataaaaaacttctttctgataaaaatatcatgcaacagtgcaatttcatataataaaatatcttaataaatgtgattaaatctatcaaaaaaatatcttaatgaaattaacaaacaaaatattaaagaaacttgtttaaaataaattaagaaaatttattgtactatgttgttttttttttccttaataatgggatatatctttatatatttagggtacaaatattatttattttttaattataataacaaaaaaaccagaaatttttcaaggaactatcaatttcacttttaagaaaaaaaaaatatcagcttctgtaagattgaagatacaatttggactatctttataatcaccactaaggatggtaaaagttgttgctttacatttttattaggaaagaaaaaggtattagttgctaatttaagctacttatcaacttatttgggtttgaatatagttcttaatgtgtgttaatttctcatatctttaccacaaattgaattagtatcatttacttatgggctattttcaaaaatatgggaaaaattattaaggttatgataaatatggcataaaaagtaaatgccactaaatatggcattatctaaccaatcaaactaaaaatatgggtttttttctaaaaaaaaccatataagacattaaaaagaaatctgaatttaaaattcataaaaaaaaaaaaacttaattaaattaccataaaaaatattaaaattctcttcatattattttttaaaaaattaaaacaaa

SEQ ID NO: 318121 - DNA, 608 bp, Cannabis indica
agtagctactataatataaacactataaattattcacacaccagacaatattttagagcactcttttcaagtgatcatctatattgtttcaaatctttaaatgaggcaaacaccataccagaaacaagattttgttcattcaacgtttttgtgcccgttttgagtgattatcgatttgcataatgttagagtatattgattgcttgaattagttagaaactggttataagttggttggttgttattgtctagctatctgttcttaactaacttgtatagtctcattgtaacggtttctgttattcttgatctaagtgtaagcttgtatgtaagtcatgattaatggctttgttaatcaatgaatcaattcattctctttgttcatctttcttctctcttttctttcctgtttctgatttgttttcttttggttcaataatgtcgagaaggtctaatacaaaataatatatatatatatatatatatatatactagtaaaaaactacgtgcgaggcacgtatactaaatttatgctagttttttttctatgttatttgaaagtgatacaattaaaaattaaagaaaaatattattaattattaggtgag

SEQ ID NO: 318122 - DNA, 2008 bp, Cannabis indica
ataaaagagaaacgatattaccagaagaaatttttaggttgagtcgcagactaagtcgctctctttaagaagttcgtgagcattacccaactttgtgcaagaagtctgaattttcaattctatatacttctaggatagaacaatccaatcgtcgtacactatatcggaacaccactgcactacaacgaaccgtcaaatacactctctttatacgatattgcagagggagtttttagagaaaaattgtatttcgtttttttcaatatgaaaaagatataattttcctatctgttcaatcgcattatataaaaaaatagactgaaaaaataaaactagaagaattatatttcctaaatcgtggagttattgtttgaacgtgtcccataaaactgatacgactaagtattcagttttaattaaacacatttttcaaataaataaaataataattattttattaaataaattttctataaaaaaataaagtgtgacaccacaccaatcagttatctcagctcgaatcgatcggacggacaacgcgagcgcattggatcaagtgtgtgtcttcacccatttgcacaaaattgggtaccccttgaggccctatccctagtgtcataattgcatcttatatacccttgtaaataagggctcatatcctatgtgggactctctctatatcctctatatcacacgcacacgcacacgcacacgcacacgcacacgcacacacacacacacacacacagggaaagtgtcatattttgtcaaaaattcactcactttgtaaaaagtttcaacaatctcccacttgaatttttaaaaagcatttccatcttccagtatcattcaacgataagattgagtataaacaaatgtatctttcgatttgaacctttgcatagtgaatacgatttagattttactagagtgactcgtagtcttgaactttatctctaagatcgtaccacgcaacaaccttttcaagggagtagccaaaaagccagtctgttaatggccatacacctcactcccacattcacatagatgagtctatcaagagtactcatgtagctcaaaactccatttcacttggagtatagaactcattaagagcttctattaattcaaccttacatcgcttcaggaattcatgcttcacttttcatataaatatagcatgatcttactcgttattactcattgaatctatttcttgggaactccagtctataggtcgagttaccattatgagtgattcatcaattcaggggtagtagtcacattcctttttgatgttttaaggactttctctctagctaaatctttcgctaaaggattagtgaagttatcatcaatgcgtacatgatcccatctaatagctcttttagagagaaattctctagtagtgttgtccttacgacatatttgtcgtctcttaccgttataataacagttctgaacttttgaaatagccgtggtaatattgcaatggatcaacccagctggaataggtttttcctataaagaaatctcagctagcaggcttctcaaccaatctccttcttcacaagcagtagctagtgcaatcatttttgtctttattgtagattgagccaaaatagtctatttcttagacttccatgaaacagctccaccaattacgctaaaaatatagcaaatggttgccttggagttatctgataaagtgttcttgttaacatcatcgtaccctttcaggacaaatgcaaacttttgataatgtaatttaaggttcaaggtccttttaaggtatctcatgaccctctcaataagatgtcaatgcttcacactagatctactagtaaacttgcataacaataccacaacatacacaacgtcaggtctagtacaatcagtggcataacgaggactgccaatgatgcttgcatgttcagattgtattacaccatcaccagtattcttaaataattttacatgaggatcatatggtgtacaagcaggttta

SEQ ID NO: 318123 - DNA, 1313 bp, Cannabis indica
tattcgttttttttttttgaaacagttttttttccttttctaataatgaagcattgaaaatatttacaactctagaagataagtatgaactacaattatttgtatagcatatatcattttccaactaatgtaacaaagcatatgtatcagtttcagcaaaaaaactaatgtaattaacaaaaacaaaaatgtatgcttcacaataattgtagcccaattagatcacttaccattattaatgaggcaattaaaacccatgaaaatgatgtaagagagatgcaatactatattttgtgaaaggaggaattaagttcaacaaaagtggctcctctttctttataatatgctcctgtgtagagaaagagaaagattaaaattccaaagtaagaaatgatcaacgcagtaaagtacagtgtggaaatttataggaaattgagtgatgatttttaactttaggcaaagacagcacaaaatccagccggagaatttgtgatgagatgggactttgtagagacggctgataaattttttctcttattttttttccaatctttttgccacttaccatatcatttcctgctaataataattttagattttgaaggcaaagatgtataaaaacatgtcaatagctgtggctttttatatataataaataatgaaaaaaaagaacaaactgtgagacgagaaacaatactgtacattagatgtatgtgtgttgtgtgtccatatatctgataagttggcagctaagcaattttgtgggattattagtttggctgtttcgtgcattggaaaaggcgaccccctatgtgccaaagccactgcataagacaaacttacagccttggattgggtggttcttccggattgtttcatggccgtttttgggctttaattaaatatagatttcaaatataacataaatataatattatacacattgatgcactttggctttctgtttatgatataaactgctccagatatatatattattcattgtgaaaaatactaaaaaatgtatctagttaatgcaccttaattaaatattttgtctcgtataatttaatataatattttttataaaatattactagttacaaaatattatctctaacaagtattaaataccactagtatctaatagctagccatgcttatatattttaacttcacgacaacttatataaatttaaactcatgttaggaatacactacattgaaactaaatgtataacttataaaaatgttaagaggtgtcaaatgctaaaaaaaaaatggcattttgttattgatatattttaatatta

SEQ ID NO: 318124 - DNA, 1752 bp, Cannabis indica
tgtagtttcttggtctgagatgaatcttcccaatttgagttgactgctaacttggacatcattttgcttacctaaaaattaagaaactacacctttctcgtttcttttaaatggaaaattattttcattaaaaataacatctctactagttacaattttatttgtttcaaccaagagaagtctataaccttttacaccagtaggataatccaaaaatatgcattttattgttcttttctcaagcttttcttctacattgtgtgcataagtagcacaaccaaatattcttaaatgagacagagatggaggcttacctgtccacagttcttcaagagtttttagctcgatttttctattggggctcctgctaatcaagtaataggcagtatgcagtgcttctctccaaaagtgtttccttaaacctgcttctaataataagcatctaactttgttaagtaaagttctattcattcgttctgcaatatcattttcttgtggagtctttatcaaagttttatgtcttcaaattctaaactttaaacacaaataagtaaattcatcattcacaaattgtaatccattatcagttcttaatactttaattttagtattagtttagttttcaacaaatattttccaattcttaaactcttctaaacagtcatttttatgtcttaacaaaaacacccaaacctttctactaaaatcatcaacaatggacaggaaatattgtttacctccatgtgtttttaccctgctagctccccatagatctgcatgaatgtattccaagacagttttggctttgtaattgtaatttgagttgattctatgttattttccgtgtacaaatatctcacaaaatgataggttagcatgattgtaattctttagcaaaccttgtttagatagctcaactatgccttattcaccaatgtgacctaatttggcatgccataattttgattatgtattgcatttttcaacagtagcaacatgtgcaggtgtcacagtctttccatcaagataatacaagccatgtctcttggtttcttccaacaacaacaaccactgttgtgatcacagagtttgagttcttgaaactttgaattcttcctgtgctctgataccactgttgtgattcaacaacactaactcaaaaatgtaaatgatcaaataatcaacaaccatgtaagcaattaaaatcagaaaacaaaacttataagaaaactagaaaaatatgagagaaaacacaagaaatttatcctagtttggatctcaattaaaatcctactccagctgccccccaaggagtttctccactaagaatcaacaagttacaaacaccaattgtagtacacaaacaccaagaactatcaatgacagaaatggctctccaacactcaaacttagagcctctcaacctatcatgacagcttgatctccaaccatttctgttcttgatcttctctcattctctccatacttttctctctgtcttagtctctctcactcttctccgaatgaattgaaaagaggagccctaaatactgttagtagctgacatgtccagcacttaacagcccaacaaattagtttttaactaacataactaactttcccaaataagaaaggtttataacagaaaacagttatgtaacatgttagaagacaaaaaaaggtttaattttaaatggattatattccacaattcattgcattcctatatatattatatataataatatataa

SEQ ID NO: 318125 - DNA, 522 bp, Cannabis indica
tagatctaagatcctgataaaattaatttccaacagcaaccatgtatatttttggacttatattattcctttttaatttgagatacaatttcatatatcttaccctacaaacaactcactttattcttttccacattcaaacaaattggtagagtgtttataaaaggaatggatagctttgttctattttgatgatgtcatttgtttagaaaaattctaagagatagcttaaggtgtcaaatacaataaaatgtgacatattgttattatttaatatcggttcatgttgttgaaaattattaaatactacgcaagtgcacgcaatcaagtagtatactcacgcaagtgaggtcgaaccacagggaattggattaattactattaaactatacttataattctatttggcgattcaaaagtatatatgatttaaaaagaattaaagtaattcagaaaatttaataacacaatttaaagttgagcaagatgagatgatagggaggagaatcctgttgttgttta

SEQ ID NO: 318126 - DNA, 1029 bp, Cannabis indica
gacatggtttgatattctctaaaaagtctatttttcaaaaaagtctattgttatcttgagtgtgtttgtttggtcgattatggagcctgggagcaatcacgaaggtgagatggaggaacagtatgcaaggctgaacattgaagatgaggaggaggacagcctcgtgtatgaaggaggggcggatgatctgcaggagattgatgacaaatggttgttggtaggcagattttaaacgcataggggggtggacttccaagctatgcaaaataaaatggcgacattatggcagccgggaagaggtatgtatgttaaagaactcgaaaacaatctgtttctttttcaattctatcatgaagttgatattgaaagagttttggatgggagcccttggacttttgatcgtgtgccattaatatttgaacgtgttcaacaaggtcagaatccgagaaccatcacactaaataagcttgacttttgggttcaaatacacaatctatcaacggggtttatgttggaacgagtggtgcgggaccttggaaactatgtgggaacttttatcagagcggatccaaacaattttattggtgtatggcgagattacctacgggttcgggtacgaattaacatcgattgcccattgaaaaggaagaaaaaagtggagaagcaaggaggggtgttttgttatgctaattttaaatatgaaggactgcctacattttgctttatatgtggcgttcttggtcactcggaaaagttttgtgagcaattgtttcatactcccatggagcagataaagaagccattctcgctggaactgaaggcagcgctgaggagaaggaattacgcttctggggagaggtggttaagatccggggtggccacaaaacatggaggtgttgctttctcagtacacacggcggcaggggagaataacagagttcacaaagggagtccgatgatgcacgtgcctgggaattctttccaacagaatcaatcagttcctacaattgtgggatcatcttccaatca

SEQ ID NO: 318127 - DNA, 1363 bp, Cannabis indica
aaagatcggttttagatctttgttgatgctattttttcctttgggtttctgttcttgtatttggctactgcaggtttggagcttgaagaaggagcagcagtgggttttttggaagctcaagataagagcttgtagaagaagaagaaaataaggtttcggctactagggttaggaggaattagaagaaagtgttgctagggtttgctgaagcaaaaagattggttttatactgccttaaacgacaatgttttgagggaaaaaaggactcttgatccgcacaagaggcaatggtctattttgactttggttttatgactttggggtttgttggtgtaggggcatttcaggtattgcgaattcctacagtggtatcagagcttggtgaagtaagaagattaaaaaacacatggatataaagtcaagaaacatgaaagatcataaaaacattgaagaaaccagatctgtaattatcaagaaattgataaacaggataatactaccctaaaatacatgatgttacattcttacttttattatcttgttcaacttgtttaacatgagtaatattagagtggatgttgacaagtttgatggattagggaattataggatttggaagaagaagattagagctcttcttgctcaaaaaaaattacttaggattcttagtgaacttatagaatgaccagaaaatacttctaaatctacacaagaagaaatacttgaaactgctactgggttaatcatttttaacttgtttgattctattatcaagttagttgacaaagatgatactcaagcaaaaatatggagaaagcttgaagattagtttcacaagaaatctttgattaataagatctttcttcaagaaagaatctttggttacaagatgagcactagcaagactcttgatgaaaacctagatgaatttctaaggttacatattgaattggcaaattttggtgaaaatgaggcattgagttatgagaatcaagccatatatcatcatcttaaactcactacctgaatcctacaaagaagtgaagaatgccattaagtatggtatagaacaaaaattactctagaagaagtgatctcagccttgaagtcaaaggacttaaagatcaagaatgagaaacatggaagttctaatggagaagtaaacttcagtaagggaagaccgaatcaagagaaacttgggcacttcaaaagtagaagttacagtggagatcaccacaaagaaaaacgtcactacaagggaagatcaaactcaaaagaaccacctaatcctacaggatgttactgttggaaatattttaccaggatctagatttacaaccatgtatgtttcattaacatccta

SEQ ID NO: 318128 - DNA, 1374 bp, Cannabis indica
ttttttttttcataatttgataagtatatttaaatgaaataagaaattgaaggaggcttgcacaattgtttaagaatttataaacattttaaatattgttatagtgcaaattttttgcttagaaactcgagactaggctcctataagagtaacacgtggactcacttcccttgaggattgttgggctatcaagaagcgactcctcgagaatgaacctcgcctgaaccaaacttacaagatgatgtgaccatgacaaagtgtaatcgcattattacgccccgcgtaatataaaataagtaggaccaagaagtgattatgcaggttgcacatataccgagatatatgtgatagctaagtagccttctactgcgacttagtaaagattagtttttacgtagcgaattggtccaaataacccagcgtactcgatgactcgataaggactcgcatgtcctatgttatcaacgctgataaggtgtctatatgcgcaacttgactagaacgcacataccttaatacgaggtccgttagcctcccttagaatgttaaaacacaccctactcgtgcgagcttgtgcaagaatataaacaggcaactcgcgctatggaagttgcatacgttgttgtattcagtgaaatagatttaaactattcttcatttactatttttcatttattataatttaatcttaatatttcatgtgaaacagttgtataactgattgagttctatgtatctaaaagaatacttgctttgtatataaaggagtgatccaacatgaataaactaagacagaaatcctttgtaatagtggactaagcagatcgtgatctgactaaaccactatacatctttgtcttcattgtttttcctaattttctattgtttgggcagcctcgttcgaatactcgctattttagattgagtactcgctacttttttcgttaaatattaattttttattttctatttggtattgtctaaattcctccgaccacatttggcgccgtctgtgagaactttttcttttgattttggaggaaaatcaacatggttgcgaaccagacaaacagaaacaacaacacctgatctttcaatgtcggaacgatgaatgtcccacttagtgatggaactaatcttattgacacaatcaacgacgtgtgggacggaccaatgtcaagtgacccctctcaatttgttcccagaaaatgctggtcacgtgggggagacatcgacaccggcaaccattgtcggccacttcccgcctatcacaccaaccgtagcctctaaaggaattatctagctgatgataacacaatacacgaccatacaggaacaaatacgagcattgcaggctgaagttgatggaagagt

SEQ ID NO: 318129 - DNA, 1999 bp, Cannabis indica
ttaatcaacatacttgtgagtagatctaagatcctggtaaaataaattccaacagacgaaccccggttgttgttcctaggggttggcaccaaggattcatcattcagttggaggtgcctatggagggtcctcccttggaggtaggggccgattgttcagatctaccgagacgtttctgccatcttggccaactatagtggccagattcgtggtgcttgctatggtgacaggattgaccacatctatagtgttcgtgggaattctagttatggctagaacatgaacatcgagattttccatctgcgagtcttgaggggaaccaagatgtagatggtgcgattggggttcttcgcgtattaaccatggtatttgatcagacacgatatccatactctcaatgaaaacacaaaatgacatcaaaaagtgatcaatcgatagcagggtcgtatgaatctgatgtttgccacatattaaacgacaagaacagtaaagtaaataagacaaggattttttacagaggttcaacccccttagttagcaggtaatgacttactccccttttggttctattgataactagagataatactattcagatcactataggtgggatctgatatagctctgcataagattacaaagcatggatcaagtaggtaaatcaataatgagagagatgtattgccttagaggcatgagagagagagagggaggaagaaagaagccttttgggcatgtagaagagagagaggaagagaggctagagttttaaacttagagtgttggaggctagaatcagacttagtttttctaggttagatttaaggcctttatataggaaagcctgaatcctaatttacaattgaaacccttagatgtttacatattaaattgattaaatacaaaagattaaattgccccttgaaaatagatattttccatcagtttgttgggttgttaagggtccaatttgcaagtagcttgccgtccacgtatcaggatgtacatagagtcctaccgggataatcctagccaccgatacactgcaggatatggtctggttggccaaggtctgtaggttgaggtctggccggccatgctcctgccaggacctggcaggtcatctgcctgccaggatcctgctggtcattgtcagttttaccaagaggatgccaacttttggatgtggaggccagcctttggcaagtggaggacagctttgtacaacgtttccttgtggaggtcatgttcccttggtcgaatggaagctcccttggtctggaagtcaccttctagtcggccagcttgtgcccagatcctggacgaccatacaagctcactctagtcggcctataggcttctcttggccagtcagacatgttggtacagcctcttgctggctcgcttcactcatttcggctgctgcttgacggttctgccctaccttgcatggagaccctgtcttgctattggcaaagttgtattctacatatactctatcttcggcttacgtgcaaatgccacgtcaggtggacaaaatttgggataacaattttcatgacttttatcttttccgaaatagtaaaaactgttccttagataaactttatgtctatgtgtaacgccctaacaattaggcacgtcgtgacaactaattatgaaacactaatcccctaaactgggaaagaaaagcacgggaaattttaactttaaactaaaacagaataaaaataaaacttgtaatagcattaaactttacaatcaaaagcaacaagtttcgggatcacaaaaatcttttacaaaatattataagtcttttcactagccgacctaagcggcaaaatcagagttacaaaagtacaacactggtagaccccaatccgcttggtctagtgtggcctgaacatttacatacattgtccagctctcgcactcatggctgatcagcgactgatttaccctttcctgcatagtagagcacccgtgagccaagcccagc

SEQ ID NO: 318130 - DNA, 513 bp, Cannabis indica
aattaaactatcaggtgacttttcaagatatgagagtttttttttgttataaattgcagtcaaaattcaagtcactcagctgaaggtactagatagtagataatcatgagaaccaaaataaaaacttaaaattaaaatttcttattattattttattccaaataacatgttaattaagtcaagaatgtaatcaaagtcaatagtgaaaataacaagagaaattaaaattataattatcatttcttggagaaatcaatcaatagaattcaatgtttcttacctttcttagctttttaatcagatgaaataaacttttattaattttgtcttcatcagcagaaaagatcatgaagaagaagaaaatgataatcacaccaaaaaaatctaaggaaaattataatcacaccaaaaaaatatgaggagaaagaaaaaatagttgcagagtagaggattggagttgattattctcttttggatattttgtgtgaataaaatttaaaaatggaaatacct

SEQ ID NO: 318131 - DNA, 1161 bp, Cannabis indica
ccatctcatttctctcatataatcagcattaatattattgtaacaactatatttcatatcttttgaatcctatcatcaaattgtgtaacaactcttttattaaactaataatgtgtgatcaacacaagagttacaagtgacaacaaattgtaactcctctccaagttacaacatgtatgttacaaagtgtatattaaaataataggtcacatatttatttaccatacacttaaaatatattatttagataataatatatttatcacattttaatctatacattattatattaaataatataacatttataatttaaggttttgaaaataataaactatttttactctacggttttgtgagcatttgggctcgccagtgacaacactattggtgatgtttggagctattttttgtgtctttgagtttgcattgaggtataaatcactttaaaataatatcttttagcttgtattgcattatttttgtgtttgtagtttcttttgagtgtgtgtgatataaaatttgaatatgtgcggtcgtgtttgaaaaattggttatagcatgttgaaaatcaagtaagcattaagtttatattagtataaaattaagtaggtttaaaattaggaaaataatgttattattttagttgccatgtagtatagtacaggactaaaatttaatgtttattacttttttaactattttataatgtaattcatattgtaggttgttaatttaattagtgaggatcgacattggagggagaaataaaattttgaatattgtggatctgattatggattgtgtcactgcggctgagtatccttttttggtaaatggtaagccaaggggttgcgtgattcctacaaggggtttgaagcaaggttgtaacgccctaaataattaggtacgctacccaaaatgattatgaaaccctaatcccctaaccgggattactaattaaaaatagcgcagaatttaaacttttatattaaacagactgaaaataaacttgtaatatatttaaacttttcaaacatagttgggatcccaaaaatatttacaaaattattacaagctttcttactagccgacctaagcggcaaaacagaatacataagtcaacactgctagacccataacccgcttggtctgaagtgg

SEQ ID NO: 318132 - DNA, 960 bp, Cannabis indica
ctattttgacttcagattttattaattttcttcatcagcagtaggaacatgaacactaagataagaatcataatcacaccagaggagaaggaaaaaaattgaaggagaacaaagaaatcagaggagaataaaggaaatcgcatagaagaatgcaagccacgatagagaatagatggagtttggatattttgagtgtggattttataaatagaaatattcttttataggtattttattttttccattttttaagttttttaattttttttcggactttaaattttttcattaaatgtccatatgttttaaaatacatttaaaaaattccatatttatgaagaaagcccaattttaatcaactaagtggcatcaattttatctcgatcactcttcattagaagaatctcaccatatcttgattaaccattttcatgcaaatcacaaaaaaaaaaaaaaaaaaaaaaaaaaaaaaaaaaaaggtagctagatagattttaacccagtacatatcagattgagctagaaacacattagagaaatacttgagagaaaaataaaagaagagaaatttaggacattttaatatattttttttctcttagattttaacccagtgcacttaatgaaaattttaaaaaactacaaattagacaacatgttttggcgaaaaaaaaaacatgctgtttttcttttagaaaaatttataattttgtatacattatataattttattactctatataatacaaaataatttatttacatttaattatatattctatattagatacataaatataattttgattttatatactataagtaattaatttttctttaagtcttatataaataaacaataaacatacatatttttccttacaacaaaaaaataaaataaaatatgcatattttgtttataaaattatatattaaatatattaaattaataatttataa

SEQ ID NO: 318133 - DNA, 2718 bp, Cannabis indica
ttactaaaaaaggacaatatttagtactttagattatcaaaatatgttttaaatttttaaatatctgcaaaataaagttagcaagatcacagaaatagactccccctagaaagcacaattaacatataatacaatgctaacattaacaaaagtttaacacataaaccaaactcaactatccctgaaaaaagggtccagagttgaacacacaaaccaaaaattaaaacctttactactcccccttttagtttatctcaaaggccaaagaactcaaagataaaagaaatagaacatgttattatccaatcagctgcaaagcaaaccacctcttttaaagaacatgttatcaacatgaatttactgaacttggagcagctgaatatcaactcaattaaactcaaaagaactatttccaagcaagttaagataaactgcaccttttaggatggaaaaagttcagctcagttgagtcacttgagaattttatttttgatttttgaagggcttgccaatggagttaaagatttcaagtagatccaaaattattaaactaagcttcacaaaggagaagaaaaaaactatttcgaaaaaaaataaaaaattttgggaagaaattacttaaaaaattggtgaacacctaaagaacactagaaagattgatgaagaaagattctcaagctctcaatctctattttgggcgtgtgaagccgtgtgaaaagagaatagaagagttctacaataccctgatacttaggcgcgctagagtgatttttaaataattgtccccatctttgctaatcaaaggattttcttaaaaaggcaaaattaagatattttatttatacttttaaactttataaacacacacatatatatatatattaaatcgggatcctgtgtttaaactttacaatcatattcaaaataacttattacaaacatgtcgcacaacgactacaaaatacagcccaactcgtcccgagactgaactctctaggtcgcaccgtttcgatttgtacaataatcccttgagctcagaattcactactttcatctttgacctttcctttacctacacatgaaagtaatatctgtgtgtcaacagactcagtaagaaaagtatataatatacaatatattatcgatttgtatctaggtgcccatacacctatccacaaggcttaatagatgagtaagaatattctttactaaggtatgaccactgtaccacatgcattacgtaccgctactatatgagtgttggtagggtttacacagtacctcgagtaccacttagtgttgtaccgcatacactacgtactcaaccgtactaatgttggtaacaacgtattgtactcgttgaacatcatacactataccaatgcactcagtatcgctaccgtgctagtgttggtagtatacgaatcacaaatagcatgcatataatacacatacacatattcatatataattacattctatgctagttttaccttgtttccaaattcaagtgtgctgagcgacctgaacaaagaatcacgtgctggatggatgccatatgtcacattcacataaatgggtaaataacttgttaaaacacgatccggggacctaaacttacaactaataatttctttgtcgataactaacaagtcaataccttaattattgaggaaacatcaaaactaaggctctaagaatggcccaagtcgataaattggattttttgggatcctgcctgtgaaacgattaaccggttcaagagtacctgtagaaccggttaactggttcatactagaaatcccaaatcagttcgaaattcaaccaattcttctccaaactctgtcaaactttccagaacaccttcactaacatctagtaatagtttccaagtagtaataacaagaagaacacacaaactaaaagtgccattaatgaatcaagtttgagttttcaaactcaaacttgctcattctcctctcaaaccaaccttaccagcaacaagaaacctaattctattcaaaaacaacctgagaaataacactagaacaatgttaaacctaaacagccactaattcttagaaattacatgataaaaccaaacttaaagcttaaacaacataaaggctagagttctagggtttaccttgataaaatccttccaaaactgctaagtaacagtctgaattccaacaagaattaatcagagcaaaagagaagaaccctaggttcttggctccttcttggttcacaaaaagagggagaaagggtaagaatttctaattatttcttgattttttcttaattggttaattccaaaaataaacaaacttaggatgaaataataagtggccaactgtcaagccaaaaactagccacctccctctagctaaaatacccaaaatgctcttacttacactttaagtaacctataggcgtaggggtgaaatgatccaaaactataactccgcctaaacccgacattcttatctcttatgtttgtatcactaagaataaggttctaaactgaccaatgtgactctaattgtaatatcccgataagcctaatggtaaataattcaagtttatatttatactatgggttaatcaggtaattagtaggattatgatcttactaatctatttcagtataaaatttaaattttgctataagtgattaaataatcgtaatttgttaattacggagatttatatagc

SEQ ID NO: 318134 - DNA, 1554 bp, Cannabis indica
aagtatttcttgtagaagttaagcgaagtgatttgggaggttaaaaacttagtgtttgtatcggataggcatcaaagcattgaacatgttgtctaggttattttccctgaagcatgccactgtgcatgctataaacatacttctatgaatgtcacccacaagttcaagaataatgcatgtaacacgcaaatatggctagctgcttatgcatggtcgaagagggaatgtgatagacatttacagctgcttcgatagatggatcctgtcatcgctgcttatgttgagagtataggattagaaaagtgggctcgtccttattgtccaggagataggtacaacataatgacaaacaatgttgttgaaagcctcaacaacgtgacagaagaattttggaaatatccaataattactctagttgagttcataaggttcacactgcaaaaattggttcgctaaccgtctacaaaaaggaaagtaagtgtgctacccctttggcaactcattttgagaaagatttagtaaagcaacacgaggatggtaggtttagaagcgtcctacgtaatggtgcacaattgtttaacgttggtagaagttatgacggttatgactgtgagaaaggtggggatgtgaacttagttcagagaacatgcacatgcggcatgtttcaattgttgaaaattccttgtccccgtgcatgtgccgcggtgcttactcagaatgtcagtttgtacactcaatcctccccctattacacaaaagagacgtggaagaatacttacgatgcaacaattaatcttgtcagggaggaggatgattgggtgcttctagaagacatgcagatcatgagagtaagtgtaccagtggggaagaaacccataggtcgtccaaggaagagaaatgcatgaagaatacagactaactgatatccatctaacagtcaaaaagttgtggaacctcgccattgttcaaactgtggcgccttgggacacaacaaagctacatgcaaggcttatttttgtattttaattgcatgcattattagtatggtttatgaaatttactttgtagttttttttttgtctgggtgtaattttaacgacattttgcaatatatgtcgatgacattgtcgacatgccaacgacatgctatgacatttcacgatatgattttcgacatatagtttttctcttttcatttgagatgtttgattttccacactttttgtgatatgttgcgattttagatgcgaaatattcagacataaatggtttttgtctcttgaagaattagcgatttcattggcgacattttgcaatatatttcacgatctttttcaattttaaacttttacacatgagtaaagatgaaaccagtgaaaatttttacacatgagtaaacacaaaatgacagaacataagtaaagactaaacaaactttaaaactagccactcataacaatttaaaagtctttactgtgtcggtgagactcgcaatacgggcataacgatccaggcttgaccggttcgccattaaaataacctaatctgcaacga

SEQ ID NO: 318135 - DNA, 797 bp, Cannabis indica
ttaccataaatggaaaaattattttgtcaactaacttgccaaaaaaggactttacaagaataatcgcactcatccactcttctggctctactagatccaaatcacccttaaaataaaaagggtctaccttttgaaccactaatataatgaatggctccaagtgatcacccacctttctgcaacgcatgcaatcccatatactgaagaaatgacctcattaacgagacaaacctattgccctctcaattctcttagatgctcaccctaattccaagtaatcttaaaagtgatagggtacgtcactttcctattatatggtaatggaggattctcattctccttagaaattatggattcttagctaagtctatcaaactatctcaaaggcatcactagataccccttactatccataacttacattgatcggaacttccaatcaaaacaataatgctaataagcatttcctcttataattactcaataatttaaacatgcacttcctatcatgcttcactattagcatataatctaggtatattacaaatataacttaattcatccctttcaaataatcgcatgaatgaggtaaataatcacatatagaaaataagctgaaagtacaacttgttgattttaatgatccaaattaccaagttgattatctttaggttgattgatttcaagatatgaattttagacttgaatcgataataaagctgtaaaacacacaaagatttacaagcttcatctgcactgagaacacatctcagccgactagtgcttgggttccccga

SEQ ID NO: 318136 - DNA, 1213 bp, Cannabis indica
tatatttataattaaatgtttagctagaacccctaaacagccttcaaagttcaaaggtttaaactttttgattgagagttgttgtgactacctattgcaactcgcaagtaggtcaaaatgaaaattggacaattaatatacaaaaaatacaattctcgtctcattcccactatatatttatgcccctactcccgtctaataatcagtaaacgttggggtagaggaatatccatcaattattgaaaacccaacaggtattcattaaaataaatagtaaaaaaaaatagaataatttaaaataaagtaaattgtggtaaaacctctaataatttcccttgtaattaatctcaaaactcaaattttggctataaacccataaaactacgatatagctagtaatttacaatttccatccaaatctgagcgttaattgccatattagattatccacgtgaacacattgtacacatgacacaatttaattggtctaacgtaaaaataaaaaataaaaaagaagtattctttttccatcatatcatatatttatttgtaatatttttttttcttcttcttcaatctatatactgtcaccaccaccaccatcaatagctaccataaccaccccacccaccattaccgaaaacaccatcatccatagccatcgtaaacaccactacctaccactaccaaaactactaccacaacctatttttcaaatctattttgcacaaaaaaaattcaacaaaactcaaactaaatttaaacaaatttaaatttaacaaacaaatatacacaaaattttagtttgaaaaatcaaaccttaattttctaaatttatttctccacaactatattatctttccacaaatctaaaaataaaaaacacaataatacccaaaagggacatttaaacactgaagtattaacaagattgcaaaaaaaaaaatatgaaaacccctaaatgggagagagaaagagagaaagaggagatcggagcagatagagagagaaagagaatagggctgagagagagaggtgatcgacttacttgggtcgggatcctcatcaacagccactggctcggtggtcctcaacgacagcacttgagtcttgatcctggtacctgcatcattgagagagaaagaaaagaatgatgagtgggagagagaaagagaagagggttgagaaagagatagagagagagaaagagaga

SEQ ID NO: 318137 - DNA, 1047 bp, Cannabis indica
attgaagattgttctaatcaatatttatagataaaaagaggacatatagaagagtaacaaaagaattaaattccctagagagtgataattaccatacaagttgtatattagaagggaatttggaaggacttggggacacattgaatggaacaggccacagagtatgtacctttgttatgtgctgttttgctgtgacttgtcggagccattttaccctataaatctatctatatgtatacacacattaatatataactaattgtataaattgatgtagaaagagtctaggcgatcgaggttgtttttttagttttgagaaagaaagtgtattccatatttgtgtatatcaatgtatgtttccattggctacaaccattgatgattgcattgatgttgcatgtctcgctaattaaatttgtgaatttagatatttaatgtgaaacatgttctccacccttgaaaaataatttagacatatatagatactttttgtcaagttttttaaggtatatatacgtgtattgatttactagtactgatcatcacaatagagaaacatggaagtacaacactctaaacgacattgaagaggaaagaaaaaaaagatatatattattttaacaacatttggatgacaaaaccatttagatcacttatttcctaatagttaataatttaggtagtgttcggttggactttggaggtaatgaaaaaaaaacaatagaataggaatagaaatggtaatggtaatagaatggaataaaaaaaaatataataacttagataaacattgtgcatttaatttaagaataaaaaaactagcttgctctcctatattccctccattcattatacatctcatgtgctaaattatttctaaacgttgtctactattcagaggctttaatacttcttatggatccatcaacatcgatcttctttgtctccactgtcaatctcattctctgaatgcatataagtattatctgttagacatttatatgtataaactgaaatatatatgtttatgtataaaatgcggaatta

SEQ ID NO: 318138 - DNA, 2034 bp, Cannabis indica
attcccagaaaatatctgagtgcaccaagatccttgatttcgaactcgtttgccaatatttctttgattagactaatcttttcaatatggtttctggtgacaattatgtcatccacatatacaattaatactgccattttcccttttctcgagtgtttaataaaaagagtatgatcagtctgactttgcatgaatccaagtgctttgactacttttagaaagcgatcgaaccatgctcgaggagtctgttttagaccatatagagatttatttaacttgcagactttagttgtattgtgagattcttcaaaactgggaggttgactcacgtacacttcttctagctcactgtttaagaaagcatttttcacatcaagttgatgcaattcccaatccaagttaactgctagcgacaacaatactctgatagtattcagtttggcaaccaaagcgaatgtttcaatgtagtcaattccataagtttgagtaaaattcttggcaactaaccgagttttggacctctcaatagatctgtttgcattatatttcactgtaaacactcatttgcaccctattatcttcttgtttagtggtaactccactaatattcaggttccattatgtttaagggcttttatctcttcgagaacagctgtcctccaatgaggaatactaagtgcctcgttgatgttcatgggaatcacaacatctgaaagactagaggtaaaagctttaaatggagatgataattgtgaataagaaataaattttaaaataaggtgttttagtacaagatctaattccttttcttaatgccataggaatgtgtatatctaattgactttttgagggaagagtacctggatcacttgagggaatcagttctatcaataaatcgagctcttgattgaggattcgtggcttgtttacttcttttggaatacactcgaatttccttcttcgtgttttgatcttgaggaggaagactttcattaggagatggatgttgattgatttctgttttagaagaggatgtagggttttctagttatgaagggaatggaatgtcaaagggtaattctaaatcccacgaccattgagcttcttgctcatgatggttgttcttcccctgaagcaaggtggaagtgaagtacgaagaattttcaaaaaaagtaacatcacttgaaatgtatgatttcatggtgagtggacaataacaacaatagcctttctgggttggagaataacctaagaaaattgttttggtggctcgaggatcaagtttactccgatgttgggagtgaacatgtacaagcacagtgcaaccaaaaacttttactagcaaagtgtttgtgaaaatgtgaggatagggagattgaataatagaatatagtgtcttgaactggagaggtcgactaggaagacgatttattagataagtagcagtaagaacaacgtcgccccaaagatattttggaacatgcattttgaacatgatagcattctttgagggtatgaaacacgagtatgcttagaaaattgacaaacatcacattgaaaattagaaacctttttattaataaacaaagaaggaaacaggtgttttaaatataaaaaatttggatgcctaagtcgacaatgccataacatgatagtttgaaaatttgaatcaaaaacaaaaatagatttcgaagtcaaacaatgcaaggaaagttgcttcttctcttttattgggtgttgaaagaataaaggccatcacgaatcctagtactgccaaatattctccccaatgatagatcttgaaattgacacgaactggacacaaatttagtaagacatctattattagaagttaatttgtgaacaaagattagattgcattttaatgatggaacataaagtattgatttaagaattaaatcaatagataatttaatggtgctaactccaataataggtgagtgagagccatttgcaatcttgacactagatgtagtagaacatggacaataagaatcaaacaaatgaggtaaa

SEQ ID NO: 318139 - DNA, 1186 bp, Cannabis indica
ctttattaccgaggtagccctcaatggctttcttttaatgaacttattcaatgcaagcgatggtgaatcgttgacgggttagctgaagtggggacccattcattgaattattaccaactcactcagtgcctctacttatgtttataaaaaaaaaataaataaatctcattgctagtaattatttgtatggtataaataaatgcaaatacattatatgctcaatcttaatttatatattgcctgtcaaaaaacagaaaaattgggatgaagtagttgatggaataattgtaatattttagaaaataaggtggagttggataatatttttatttttaaattattttatttttaaaaataaaatatattctataactcattttgttttttaattttaaaataaaagcgtaaattttatttttagttttgtttttatttaaattatgtctagattcaagttaaagtctgaatttaggattaggtccggagctgacatcggaaccggggccaaaattgggtacgagtctcgagcttgagtttgggttcgtgtccaggatccagagtttgggccgggtccattttccaagtcagtgtcgagggtctaggtccaaaatattgatgaaagaaaatacaaaaagactataattaagaaaaaaaatctatttaaatttttttggaaaggggcttttttttttaataatttccaaaaattttatttttatttttcaattaaaatgtaaaaacaatttgatagaatatatatatatttttttaaaaaaaaaaattacctttctacttaaaaaacaaaaaaaaaattaatatccaaagttagtttatagctgtttggggtgctctaagactaagatgtcacactgtatgatactagttatataagagtatctccaatgaagtgtaaataagtggtgaaaagttaaaatatagctcacttaacaaaaagtgtactctaatagtgtactaaaaagtgaagtaaattcgacacgtagtaaattttgtgccaaatttagcacaatatttgctatgatgtaaaatttacaccacaataaatgtactattttttcatttacgtttatgtcatttctattattttattagtatatttaactatcacattaaattatgaaacatttatattatttttttattatattatatattaaaataataataa

SEQ ID NO: 318140 - DNA, 1373 bp, Cannabis indica
ctcttactatacttttaataccaaacaaaagaatgaaactttatattctcctctccttcctaacttagcaaacaacataaagaaatctcactctcatctccatcattcctctcctccatccttcttcattaatctatccctcctccactccatcacttctaccaagcatagcctaaattatatcaaactttttgtataaaggctaattacaaaataaataaataaataatatatagtgaaaaatatgttaattcatgtgtttcggtgttatcataattttacagaaaaaatgattaaaaattgaaaattctaacaaaatatcataaataaaacttaacaagattttcaagaataattatgtctggaaaaatagtcagagtagttattgtcaaaaagtcactaaagttagcattgtcatcagaaaaattaccaaaaaattatcaaaaaagtcatcaaatgtcattatcgttaaaaaagtgaatggagttgtcatcgtaaccgaaaaagtagctgaaaaagttgttagagctattattgtcacgagaaagttatcgaaaaagtcatttaaattttcatcatcgtcagagtcgtcactagagttgggcgttggaattggacacacagaaaccaattacatgtataaacgaattaaaaaaatgtggcatagagaaactagttatgtgaaataaccaaattaaaattaaatcataaaaaccaattacgtttgttagctaactaaaaaggtaatacatagaaaccaattacgtaaagaacctaaattaaaaactaacacacaaaaaaatcagttacatgaattaattaaatcaaaaccgattacctaaaataattgaatcaaaatctaactgagaaataatacaaataaaatacaccaatattaccccaaaaaaaaaatagttgttatcatgtgttcataaatattgagaaaaactagttactagaagaaaaaaaaagatattactattatcccaaaattaccctaatgatgtggcacgaaaatgtcacatgacaagtataggaggggctggacaaatttaggaccatcgagaaaattgtccagaagacgttgggtggagtataaaccggacaaagccatctagcataagacatatgctggacgggacatgttgactagcattcctagcaaccaagaagacacctcactgatgaagcgtccaaccagtgaactcatggaggggaatgtccaaatttttcccaataacttaatcccttatgaataggtcaattaggctacatcattttgttgggttttgtgccctaaataaaatccattttaatataatcagatttactagttaataaagattagaaataacattttatgttgcatggtt

SEQ ID NO: 318141 - DNA, 1568 bp, Cannabis indica
tttagaagtttgggacatcttgctttaaaatgttccttctctccacagtgagaaaatagaagaatacgtttgtttagttgttctttgattgtctcaattggtggttcaatttgaattgtagctcttataattgaacttgaagaagcaacattatcagtggaatcatccttaatatcttcaactttcattttcccttatctggaacactgaagcgagccctccttgcaattgacaatgtttgttcataagcacgcagttcagcgtccagcttatccttgtcagacaagtcccaacccgcaagccagttcccaaccagaaaactgcttttatggggtctgcctgggaaggaaccagttgactgattctacaggaccaaactgaaccgatcgatcggttcagtgcaagaaccccaaaaaacaacaaaaacaactcaattcaatcccaatttgcaccaaaccttccagaccacctattcaagtcataaagaacataatccaagcaaaagaactgaaaaataacctcaaatacataaatcaccatgagagaacaaagtttgagttctaaagctcaaactttgttcaaagaccacaacaagcactcaatttagcttaaaatcactaaaattatcaaacacaaacttcagaaaactccaataaacctaatcagatcatacaacaaccctaatctagaaaataagctacaaacttaacttaaaacttacaaaaacaaagagaaaagagtgtaggatcttaccttgagttgaatccataaaaatcctagagaaatcttgctagaacacccaacaattgaatcaacaaagcgctagctttcagctaggttctaaaagaggtcgagagggagagagacttcgagagagagaaatcaatcttatttgagttgaattttctaacttaacttaattgatatttctaattaaaaaagagataactgctattatttagaaactaaggaaataaagagaatattaattctcgaaatttcaataaggacaaaagagggtagcttaccaatttgccatttttttcaccaaaagtaatcttactattaaaggatattttggtcaaatcttaaacctcaaatattcccgatgttctcaatgtctatcaaaattgccctgctatttctaaaatactaaaccataagagaaagtgactttaccgggtaaatgtcgcgttccactattaccgagcataaaatatgaaaaatataaatttcacatgttgtattattagcacgcctagaattcaaatttatccccaaaatcataaaaataataataataagtccatttatgaaattaaaccctaattatttgctaatttttatatcaaagttaagcagtcattacaattatcccccgttaaaaagatttcttcatcaaaatctaacctgaataacttcaaatattgagccctcatgtcagactccaactcctaggtgggttcttccaccttactgtttctccagagtaccttgactaaggctatggtcttattttgaaggaccttatcctttttatccagaatctgtactggttgctcttcata

SEQ ID NO: 318142 - DNA, 945 bp, Cannabis indica
ataaatgattataaaaaaaattaaattaaaaaatattctcaaatgccaaaacaaataaaggtatatcccgtaccatttggtccgaaagtaacttttgattttacaaattttgattttgattttgatttttgggtgttattgatatacctaacaaataagttgtgattggtatatactagacacaaaaaagtgcataattattatgaacataaaaaatttatgggatggctgcatatttgttgggtgaataatagtattgtttctatttagtaaatggtcaaaaggagttagatgcagaagtaattaatggaatatatatgtggtagctcacctgtttggttttgttacataattgttatcatcgcattaattataaataggttttaatatcattcatacctcctctttcctaactctaattataagtccccatctacccttttcattatgtaaataaatgttgggagttttaccaaaaacatcttctataaattgatgtttcattaacaattagatgagcattttaggttgtaaatactccagtataaattaatcttttttataaccaaattaaagcaatgttggcactacaagaaaataaaaataatgagaatcatcaagctaattccatgtgaagtttgtaactccatttggtttactaataataaattataaaataaattctacaatgcacctttgaaagaagtgtaccagtacacttttatttgttttttttttctttggtgtgagtgtagcataaagatatttttacaatcaattaaagcttatagcttaaagattttgggttcaaactcatgacctctctcttttcttatccctccctcaccactaagctagccttagtagcttacctttacctgtttcagtatctaaaaaaaaatagtctaatttttttttattaattgtatatgttgtagttattta

SEQ ID NO: 318143 - DNA, 1718 bp, Cannabis indica
taagatcctggtaaaataacttccaacacttcgttcgtgcaggtatatgtggtgctttgtccggaatatctccttcaggcaaatatggggagttgattccacgtgtcaccagcgtgtgatgccacgtcagaatgcaaaaattgggataacatttgtcccccaagtctgtacgggacttctgaagttgcgtagagacttcatccgagctgcctttacatttgaatgggtgacacatgttgggtgcgtttgttcgttattcgatgagagtttgagtaggcgtctcttcaattttcgactaattaatgctctgacttaattaatgcctcgaaacacggttttcttcgcatgctttgacggttacacttgattactttttatttcccaatatttattttttgggggaaatcgaaacgtctgagggatttcgaaatgattacctcttttcaccaggttgcctataaataaggctggaacttcttcataatttacgtttaccattttctccactaaacaaactcagagcaaataaaggaattttctccaagtctgccgtgagatttctatcagagccatccgagcagctttgtctggactacgtttaggcttcaaatagtgagtaagttttcaatcttctcttcttttaactttgtatttttaatttataagtttccattgtacaaagtacattttttcatgacttgttgcagaagattcatagaaaatctaggctcaaaattttgtagttttctctataatagtccgtacagtttcgctgcttacgacattctgcctttaatcttgcaatgctcgattctcaccttgcttatttaaagcttcgtgaattttagtctttaacccaaaaatttaaaacgcctgggttatgtcttaatttttatgcattctttgtccttttaatctgttgggaggtcctggtcggcgcttttgcctgtttattggttgatttccccgccaaacactcatctcgcgtgttatcttttgtagatgaaccctggtaagttttggggaggcgaacaccaaattgaccaggatttgcttcaacttctgtttgatgatcaacctcgtctttgtgccagtccgtcctcttccagtgacggactttctaattcaagctttaaagattaggaagtgagtagtgatcgctctcctactccagaacccgtagtgcaacatcactcttactccgagcagatcgcaggagaagggtacggccgcttcatttcagaattgaggaagggttggagacactatcttctttccaacgggacatatattgtccgaccaggtgttgttgatacccttcctgatggctgtccaagttctagtaactcggtatcccaacagttgtccctgtcgttacggttgcatggcacacacatcagtatccgtccaagagaaggatgatggcctgcaaaaaatagactatgcaaaaaattgatgcgtctgatcctcacgtagcccaacttgccatgttgacaagtaccgagcaggatctgcccgccatggaggaggatcacgagggggacattgaggtccagtagatagaagaacaggacgatgtccgtcctgatagcccttccaaagcagaggaggaaggagtggccgaaccactaaattttggagggtataacgaggtcggggagccagtgtccgcagagggtgacgtcttggtcaagggggaagactatgtcaccgaggag

SEQ ID NO: 318144 - DNA, 774 bp, Cannabis indica
tttgctattgatattcttctctgttctagtcacagaagaagaagaaagaagaagaagaatgtaatgaccgtatgattaaaatatggattagaaggacaattagctttaattacttttattttatgattatatatgttgtgggtcccatttttagaaaatgggcattagagttattgttgactgtattatcctaatttttgcacacatgatgtggcatgtccacgtgggcaaggtttggagtacaacttgtcaggaagaaggccaaatcatcgtacacaacatatcacttgatgaggagtctaagtacttaagtggggcaaagagacaacaaactgaccaccttaaggggtctcgccggccttatggccagcaggctagccatcctccaacaaggcataggttggccctcctgcatcctaacatgcacttattgtacagccttgaccctggcaggcacttgttgtgcaacttacatcctggacaatactataagctatgaattgggttttaacaaaccacaaaaataggggataatgatcaattatttacctatttttggagattaattaacatattaattgtctattattttattatgtaacaaataggatatatttcctatttaaaagggatattaatctattctcttgtaagctctcttatataaagaacattagactaaacctaatttctctaagccttaagtttaaagtctcaagcaccaaaagctcagaactttctaagtcttgaagctctaaaactctaagtctaaaa

SEQ ID NO: 318145 - DNA, 1532 bp, Cannabis indica
cattgacattatcgaattgactactacaaacatagaccattgactgtcttggggtataacttggagaagatcttgaatactcctctagcatatagagcccatctataagtgttcccttgagcaacaccctctcggtgtgcttgacaaagcaacatgttttatgaaattcaaaaaacacataattgtcattagttagttgagatacactaactaaattcttggtaattgaaggaacatgaagaactaaattcaacttaaagggtaatgaatcgacagatggtaatgtagtagaacgaatattagaaattagcaatttcttaccgtctccaatagcaagaccttttgaacgtgagtatgcactagtagattctaagtttttggtgccttgagtgacatgatttgtggcatcagtatccacaaaccatccagaatcatcaccaaagttaaggataaatgaagtggaaaaggcttgtggatcgtaattgaatttgtaataaccgcctaattagattatggattagtagaggcaattagcattattgttggtatttaataattatacatgattttatattattgtgggtctcattttcataaatgggcattagagttgtaatttctcaatttcaaaaattttattaaactctaagtgtattatttatgtcatatgcaaaatttataatttttatgattttcgctcggcgacgataaaaaatgcgacggatggccgatttagtcacatgggttagcttatctttttacttgggggagtattcataagtgatatttgaaatatcgggattaggcgcagttttagttttgaaccattttatccctaagccatttattggactagatgtttaaggcaagggaattttggtcatttaacaatttggataggtggatattcccattagtggcagctggccatttagtaatgaattaaaattaattaaattattattttactaagtaaatcaaactaaggaagatatggacaattagaaaccaagagtagcttctttctctccacctcttcggcctcaagcaagaaccagagcaagttcaaccaacatcatctttttctaagaattcatcaagtttttgtggtggttcaattagaggtaaaccctagaaaatcttgtcttttgttttgttgaagttttgttagctttaaacttgcaatttaggaattaagttctattctgctagggtttcaatgttggatgtttctgtagcttagaaatgttgatttaagctggttttaagtgttttgagtgattgattgtggtgttgagcaagtttgagtttaagaactcaaacttggctcaacaacgataattttgcaaatattgtatattttgagtttatgtcaattgaaaatggtttattaaggtaattataagtcttttggagcttgtgatgagatttggggttgttttggttagaattgggggagctttcgtttttctactgtgatgctaaataaattataaaatgaacaaaataaaattcaattgcattattaaaac

SEQ ID NO: 318146 - DNA, 846 bp, Cannabis indica
catatacatgcatctatttcatcaccttcttcctgataaagccccgcttgaagcaagctggtattaaagtaagattgtctctgttaaagattagctgaagagcatcccaaatgttgacctaggtacttacaatatttcatatacctataattaagttgttaaattctgagcttgaaagagtgttttgagctgatttggtgtggaataggagtactatgtcaaagcgtaaatttattggctggttggttgcctccaagaaattacaaactagagatagacgtaaatactttggcgattctagcatatagcaggtgtcttttttgtgatgataataagaagaaacagttgagcacctttggttgtttgagtaaattttattttagagagttgaaggattggttggggtggttgtcaagaagtaaaatttctaaattttgccggttcttctttttgttgtgtacataatatgcatggatgactactagaaatattgttttttaggagcacaaatgtaaagactattgtacataataggataagctattacctacattcccattaaagctataagtgtagatattgattggttttgggctttaaagtctttgtaatttttgtttgttgttttaaatattggtatgtgttttgtattaatatagttgttttaaaaaaattcaagtattttaataactatacaacacaaaatataattgtacccatatgtagagataacattaatcacaaaactgcatatatatctaatgttatttcattatttcattaaagataaaagaaaatacatgataaaaagtacatatagttatatacccatatatgtagatataa

SEQ ID NO: 318147 - DNA, 737 bp, Cannabis indica
tttttttttttttcgaaagctcatgttaggtttattacttgataaattataccgttcaaattttctctttttgtttaaaaggtggtgcacactctctttcggtctttgataatgacattggaagtggttcaatttctccacttattgtcactggtggtagagatggtgatgtttgcattcatgattttcgatacattgctactggaaagactaagaagcacaaacatttaagtaatggcggacaaacgattaacacatcatcaagtagtgacacacaggcagggattggtgccaaagttggggaacaaaacctaaatgggatgctttggtacataccaaaggctcattcaggtacaatcaagttatctttaagaaataatatgtatgaatttttatccgttgttgagtgtatgcgtaatttattttttgaattgatttgattgtagggaatatcaccaagataagaacaatcccaaatactagtttattcttaacaggaagcaaagatggggatgttaagctttgggatgccaaaaaagctaggatggtatttcattggtcaaaattgcatgataaacatacattcttccaaccaacctctcggggttctagtggggtagttcgggtaaactgttataatccgcaatacttttgtttgtctcaacttgcattgcatttatgtttttttttttttcctttttcttgcttttcattacttgcatgtactgaaatattcc

SEQ ID NO: 318148 - DNA, 1220 bp, Cannabis indica
actcggccaaagaattctcaattattttatgcggttcgaccattgcaaagaattcaaccaacgaattgggtctctgcgctcgtagctccatccaaaatttaattcttggccaaacacctataatcaacatacaaactagcgaagactcgggagccttctcgaccttggttatctcaacgttaaaactttaaagtaatcctgtaaaaactcactgacttcatatttaatattttccagcattgtgtacgacagtttgcacgtcaccgtggcttggaagtgcgttaagaataggtctacaaaagtctcccaggttgatatcgaggcctcgggtaattggctaaacaaatcatgagcattatcttctaaggttctaataagtattcggcatttcgccaattgtggtacctagtctacctctataatcgtattaaatttatctaaataattgattgggttagtagtacctttgtatttgcaattcagataacttaaaacctttgggaacattacatgtctcacttcttctataaatggtgatgtcccatggagcttgtagatgggctttgtctactactcaatcatctgtagtgctcgcaagaggctttcttggtcaataccttccggtaagacaggattggtctgtgttaccactggtatagtagaaattacggctatattggcagggattggtacttctatggtcacagctggtgcaatcgatgggttgactagattagtccagttgttcactgttactgtgtgccttgatcgccaacgtggggatcacggggctcgtcatcatcgcgattccttagtgtttgggattgttccttaaaaatctcattgagatgatcgtaaagatcgcctctatgaacatgattcctacctccatgttgagtctcaacggaccccggcctagtataaatgctaggggagcggctgttagtagaagatgaatgggattcttcatgatttacctctactcgcggttaggcgcgactctacgggttttgcctttcaaggtccatctcctgtgatctgttttctcttccaatatttccacgactagcatcaggtgcgactggctccctattttgcgtggagttatgtgtgggctaatttatatcgagacattcttgttcattcacacattccctgggaatacaattatttttaggacgctcatttcatcgtctagttgtggtggttacctgaggatt

SEQ ID NO: 318149 - DNA, 627 bp, Cannabis indica
tgtgatgagacaatatgtatttatagagttagagaagagacttagctacataaccctaattggactaggcctgctcatcaaaggcttcagttaactagaaaagctcatacttctgcttcacctagactttacacgtagatgctaagtccataaactattgatcactaacacacaaccaagaactatccaatcaaccaaagttttgataaaactaataaaagttaagcccaaataaaaagtctaaccgtccttacttctcgagcacaagatcatctaggccttgtgattatttttctcctctcacaggaccaaaatttcaatcctgggatcgagccattactattgcttttttctgccaaaaacaagactgtgtttctatttagcagtctttcaaaaccaattccctctaatcctgcattctgttcttggaccagatgcaacaatatggtgatgtcatgacttttgcactctatatttctccgaaaattgcacaaagtatcatgttcttcaatcttgcatttgaaatgtggaatgatctcaacgatcggtttaatcaagagaatggacctaaaatttttcaattgaaggtaaagcttcatagtattcaacaaggagatcaatccatca

SEQ ID NO: 318150 - DNA, 1189 bp, Cannabis indica
gtttttggtccaaaagcagtatttttgtaaaatccccttaattaattcagcttaaccttttaattaatcactgattcaatgtgctatgattataaatgaatagtagtatgtataggttcattattgattgatttattcataaaaaggccttaacaagcccacgagtaacacaaaataagaagggatgactcatctctattctattctaatgtatggacctaaacaactaaaatgaccactctatataacatacgtcaagtaatgatatttttatttttatttctttatcaaaataatcaatacaaaacaaaaatcaaaatatgctaaataaatttcttccccaattttaacatgtactagttcatactgttattcttttaagacgattaataatttcctttaaatgtttaagattattcaatttaaaaaatttcattcaattttactaacgaaagccttacataaacgtaagttcgggagcatgatttgatacatggataatttttatgttaggtgtctgttaataaatttgaacataattagatatttgaatccaataatttcagtagtttggatgaatttttaacggcctaaaaaatacacttcaaaattcaaaaaaaatatcctaattaaaaaaaaaaaatactaccgtcaaccttctattttaatctcttattcaatctctgcgctcgaaaatacataccgaaatatttttataatgctcatgttcattatagttacaatatcaaacctgtaaatttttaaaaaattctacaatttatagtatcgacaacaaagtttatgatattctaatttataaattaccacacgtatacaaaagacttcaaatttaattttaacaatctaaattatttaaaaatttacaaaaataatgctgtaactataataaatattactattaaaaaagtattaatatataggaaaattctacaatgtacacccttaaaatgaatatattgatgcaccccctatgtgttttagcatccgaaaaattttttagttaaattttttctcatgatcatgtacgttatagttatttaagacatactgcaaaattttaagaaatttggaaaagtttaacacgctgaaaactatgttcaaacagtgtgttgcacgtgtgactattttattttatacgcgtgtaaaatagactgtttgaacattgttt

SEQ ID NO: 318151 - DNA, 807 bp, Cannabis indica
ttttcctatattctacaaagtaaaaaaaaactttaacacacatatatagttatgaattatgaatacatatatatatataaataattgaataattatttaatttaactattatgtattttttaaaaaataattaatttaagatagatatttttataaaaaaatttaaaataatagtaaaatattaatttgtaaatttatgctttaataaaatattaaaaattgagagaattaaggataaaaaagaaaaatagctttggagagattttagaccgccatgacaccgcctcatacttctcttttttatatatatagagatttttaaaattattttttctaaaagaattattagtttggccaatactatatttacatgtgacattttattaatcaactaacagaacgataaattgagtgttaagccatgctgataaatttatccagaggttcatcgaaccgctggtgtatcaacattaggtccgtatctacctttgcagtccgcacacttatcgcaaagtttgtctggaaccttaagatgagatcatagtacggttagcattttttgctcgaactggcatacatattccgaggagtctcccgtcccgttatactctggtagcttaggggctatataacgctaaataaatcgtgggggacaagtggcacaatacagcatataactaaaatttatattatatgtagtatacaatatataaataatagcgtataaattttgtagtacgataatccaaaagaaataatttttaaaaaataatatagaatgtaaattttttttttaaataaattaaa

SEQ ID NO: 318152 - DNA, 1357 bp, Cannabis indica
tttttttttttagtttattaattttttctaaaaatgctaaaaagcattgtactatctaccatcagctaaatctaaagatataatattcttattaatctaattaaatattagatctactataataattcatatttagtgttaaattaaacattaaaaagtacactcttttaacatttttttatattttaactacaatactaaaaagtatattctttattattatattattttattaatataatataagttttgataataaataaattatttaattatttattttatataaagtggttattaaaaataaaaattaaaaaataaaaataagaataagaatatttatcacagtctacagtatcccactagtaatgttgtgtcaaaattttattatttttgacattttataatctcattggagaagccctcgtatactttaattaaagaaataattatataaattattattaattgtttttgtaaaaaatttacattcttacattcatgttttctctatatttttataatgttctataaataataaaaaaactacataaaaataacactctaataacaactaaaaataacatataaataacaaaacatcaatagcaaattaacaagagtacaacatatgaaaaaattatattttttataaataaaatcataaaaatcgtaaaaatatataaatatctgtacaattattattttattacttttaatttaataactattataaaatattattaactttaaatagtgctagatcctatcagtgtcttatatcattctcaatctctgaattatttaaaaaaaaaatccttggtgcatttattttcttttcaagtctccaccataaaaaatttcaaaaataaataataatataataatattggggtagagcactactatataatataagatgactcatctcaattaatacacaaactcattttcttcttctgtagtgtttggtttgataattaataataatgggaacgaagcttccagctccggcaccgagttttactccggtggctcatccggtgagagtggtggggtcagagttcatggcgccgtatccggtggagttggtgatgacggagaagagcttgactctgagagaaggtacttttacggtaacagacactcaagagaatctcatctttaaagtcaaaggctccattttcagcctccatgatcgtcggactctccttgatgccactgaaaagcccatactctctctagcccaaaaggtatattcatatcagcccaacccatttaattatatctaagaagaaatttacacggtatattaacttttgctatttttttataaaaatactgccatgtggtattt

SEQ ID NO: 318153 - DNA, 1241 bp, Cannabis indica
ttgtactgggtgtacgaatagtaccttttgtgccaccaacatcaccactatgcttgtcctttccctccaacgtggttgtccttctcccggagtcaccagacgcctcctccggttccaaagcccgacgactcatcggaatgtccatctcgcgaataaacttcggccttctagtatcaaaacagcttcggataggaatcatggccttcaaccaggggccatagagaggaaccgcttctcccaccggtgggtaggcatacaccttctgcttcccacaacctcctctttcatgcccgatgagtccacaattgaagcaaaaggtgggcagttttctgtatttaaattgaatccattcacgtctccctcgatcaatgctcaagaaaaaaccagcgggtagctgcaaattaatcaggatttcgactttgagctttaagaaacctcttataagcgatcaccacatttgatgctctatcagtgtctataaatgttcccaccttcttccctatgacagccgagttttgagcagccaagtaaggggttggaagcccatgtatctccacccagaaaatagctttagacatgtccacattctgccaatggccatcgtcaggccagtccctcagattcagcaactggttagcaacaatccatggccttctattcaaaatctcatccttgtcttctttaacgtcaaagaaaattccccacaaccccatctccaaggttttcatacgccattttcctttcaatgtccatatgcctcccaatatctgttttaccctgctcttagggagttgacgagcgccaaaaatctttgccaggacccctccttgagccacctctgcactgatctcgaaatcggcttctagttcaagagtaacttcgtcgagaaattgttgtcgtaatagttcaacattgtcctccatagctaccatctcatcggcgttagactctgtagaagccatttccccaccaacggatgttagacggagaatgaaagcgagtctgtctgtataataatctcagaagaaagataagaggaagaaaaaaccctcagctcacacacgggagcatatagcattgttaggatttttaaagagcatagttggagatgctcttacatattctattaaagatactaatagagtctaaattgagtactatgctccaaatatccctaactttacatattttacacttagttttttttttttagctaattaggatttttacccccgaacttt

SEQ ID NO: 318154 - DNA, 605 bp, Cannabis indica
tgaaattgagaaatttatgtccaacttctgaagagagagtaaaatataatctggatatatttttccctaaaggaaaaaaacatgctcctggtgataattctttgcctcagatagatattgatcatcctcaagctggagcaaccccccacaagatgttgatgatggagatgatgattttgtggaaattcctcctaggtctgttgctggttgtccatattctgttcctcaaatgtcgctaaatatcatgcaagcccaattaagactagaagaaagtaacaagactatagtttctgaagtatgctcgctgaagacttttgtccaagatggattttctcgctttgatatggcattgttttagcttattagtttccatgaatctagaaaacatgtatgtcttaatatataatttatgttgcttcatatgctgttttattagatttttaataattttcatatttgagaataaaaacatccctgtgaaaaaccattattgcaacccctgtttaaaaataggggtctttttaatattataccaaaaactgattttatttataaaaataccttcaacaaatttttttgcgcatataccgatgtgccacgtcagc

SEQ ID NO: 318155 - DNA, 878 bp, Cannabis indica
attcgtgggatagagtcatgttagaaacatatagtttatgtccaagcgatttagagcggtatttttatacgttcacagtttggtcttattgttcaagatgttcgaaatttgcttctggttttatcttttgttgagttgtgttttgtaaaacgatctgcaaataagttaactcattgcttggtaagagactcttatttctctacaggttgggtgcttcagctggatgactgttattctgaagtgctttctattattttgaacgaatttattaattaataaattttatgatttttattcaaaaaaaaaattatttgaatatataatttttttataaagatgtgtggatattagattggatcggttacttttacatatcaatcaatatccaatccgcataagtgtggattttaaatttttcaatccaatccaatctgcactgtgtggatagccacactttaatattaacactcctaaaatattatttactcccaaaacaataaacccaactgccaactttatttgaatttatatcttttgtctttactttcccaaacataaaataaaataatagattgtgtggttcacaatattaagtattactcaataatatatatacattctctaatttcaagtctatcgattcatccatggtgatctgatctgatctcattatcattgtaggatttttacccttttaacttacaccaacaaaacatttttaatattagtatcaaggtcaaaatcgacatttccttgtctaattaaagtctagacaaaaacggcagcgtttaaccaagacgacaccaattcttgtgtcgtttggatccctgggttaaagctctccaagagagtttagaaaccctaacactcaaacacaa

SEQ ID NO: 318156 - DNA, 1384 bp, Cannabis indica
gccgaaaaatgagagagttagagagtaagttttttttttttgaaatataaggatatttttgggaggaaaagatattaaaagtatatatatactatttctaattgggtggtatatcaaaacaacatgttttacatttaagcatagtaagctaaatttttctttatttattccttttttcctatatgggatatatataaagcgtcaacaatgtactacatcaatgagaattattaattaggctaattagaatttttactctgaattttgacatgtaacaaatcatgtcccttaaatttttttagccgttaaaaaactattgagattgttgaatttaaggacttttttccaattttagtaagaaagtctaatatagatgaaagttcaaggggcttgatttggtacatgtaaaagttcgaggggcaaagtttggtagatatcaaagtctagggagtatgatttagtatatggataattacagaattagtaaaattaaataaaattggacaaaagtccttaaatttaacaatcttaataaaaaaattaacgactaaaaaaaattcaggaaatataatttgttacatgttaaagagcctattaattaatatttaaagaaaaattacatttgaatacggttacttgaatggtaaatataattcattatatatttaatttttataaatttatttacaaatatctagcaggtttataaattagaattattacataaaaaatataaattgacattttatttataaaaatatatttataaggtataggcaacatttctaccttttatatgattttaattaccaaaataccacttacactatcacttacacaatcaaacaatggttacaggttggttgcgcggtggttgcatcagatgaaggtttcaatcagacgatggttgcagggtgattggccgaaggtttcaatcagacgaaaatttttgggtggttgaccgaaggttgcatcagacggaagtttcaatcagacgaaataactattaacaaaatatttatgcaactgttgtgaaacattaaaaatcaaaactgtgtttccacgtacgtaactctatctacatgtctctttatgatttaatatgaacaaatttactattagaaatttagaaaacaacaaaaatacaccaggataaatattttactatatagtgttgatgtaattttttttggattatacttgagttggatcgtttgggaactccatatcaactttttgagatatgcttttcatggatttgaaaattgaagtcacgacattagttctatgcaaattaaactggattttcggttgaagtttagtttcgtagtagtttttctacactttttttatgacttcgaaacagtccatgttttgattgatt

SEQ ID NO: 318157 - DNA, 2564 bp, Cannabis indica
tattggtgtaattaaatatcgagtctcatataatttaatataataatttttaaagagtattaataaccaattatacgtcgaaaatgttttaggcactacaggtgccccaaaaacagtactcataatatattataaatttattattatttttttgttattttattttgtttccttatggcgtacgttggtattattgattgggaatttcaaattgacaggcaagttatttttcaccatagattgatgatccaaaagtgagtgagcttgtactattccacagtcatgggaagaaattaaacaaaaatgcaaagaaattaaacacaaattcaatgcatcctataatgttaataaagccattaatatcatcaacccaatgaaaggaattaataaaatttatatgctagctgaataaattataaagaataatttgtattttttttttcatccgaacgtacgtataacattacattaaaagtttatatgaacttttacatttatagaaatttagttcttatattggattttaaaattagcatttttttactgatattggatactttatatgtactaaagaaaataattgggtgtatgtaagttacaaactcaaaattttgatacttattgttggaattttaccaaaatctgcagcttttgtcccaacacacttcaaagacaaattaatttatctttctattatgcatccataattaaaagatgctaattttataactcactcaatttttgctatattagtttcaggcccgatatcaaaagcccaataaaccaaagagtcaacacaagtcaaagattctagggttttccaaaaattttcttttctcttcttattttctctctttgaaactaatacatctatctctttgttttttttcttcacatgaacacacaaatgagctatgcaaagctctctaggaggaactctctcaactgaagcactccctcaaaatggctctttatattctgaaatgaaaggaaaaaatatcctttttatagactaggttctgtgacttctgatctagggcagagccctagtgatttatgttgtaactgtattttgttgtaactattttttctttagtcttgatcttgatcttgtgtttctattgtaagtaatgggtaattttggaacccaatgaatagtattctgaagcttagggtataaaagggagctattttaataaattccacctagatcccttatgtacccaataatagttgacgatactctgagggcttgaatgaccactagggttagctccatttgtttattcctagcaagttttgtttgaacttagatagggttatcaccttgttcctcatgtctatgacatgtgtcaccttgtctctctcccttgcatagaccacttacaaaatccttccaccaaagtttggttttgtgactttctaaacacaagtttaacagttgttgtcctctttaagtacctcaaaatccattttatagtcaaccaatgtatcttcccagtcattaccatatgttgtatctggtatgatactcatcataagatacatcattgaaccaaccctattagagttgaagatttgatatcatatcatttttctccttctctgtcttagggcatctttctttcggtctaagggaccacatatatttcacaacactctttctcttgagttttggaactcaaacccaagtcttattcttcctcaaagagtctgtctcttcatccattgcattatcccatttcttaacatccttgcacttgataacttcttcataagtttctggttttgtcttctgtcctttcaaagcacttaactgtgcataggcaaggacaagaagaaaaggtctgcaagcttaataggtttatttatggacttaagtagacttctcggtcctggaattgaatatttgatgagatcatcaaaacctatgactttaaacaaaataaagatgaaccttgtgtgtaccaactcaaggataatcaagtggtagtattttcgatccttcatgtggatggcatcttaatcattggaaacaatgtcaagaagtttttagatgtgaagggatgagtatgcactcaattagaaatgaatgacttgagtgaagctagctgtgttctcagaatcaaaattattagagacctgaagaactaaacacttactctctcacaagcagcttacattgataaggttttagagtgcttctcaatgactaactctaaaggggctcgttggccttctacacatggagtaatctaaggagcagtgtcccactactccagatgaggtagaataaatgataagaatccccctatgcttcaacagttagaagtctaatgtatgctatgttgtgcactagaccagatattttctatgcagtggaaatagtcagcatctatcagtctaatcttggaaaggaacattggacagtagtcaagcatatactggaatatttgaaaaggactaagaactatatgctagtctataacggtggtgttttagaccctttaggctataccgactcagatttctaggcttgtgtcgatgacagaaagtctacatct

SEQ ID NO: 318158 - DNA, 1398 bp, Cannabis indica
tcagaatccatcttccgtctcttggcactcgcgctcagactctcggcttagctcctcgtcgaacagtttccgagccttgtcatcctaagtatgtcataagaagactgaagcctttggaattgagcagtggcttttgaatcatatggatttttatcagggtgtaacaacaatgcctttactttatatgcctttgttatctcttttaatgtaagtttggcaccatctttgccacttggtaacccaagaatgatatagtgatctaaataaacacacatatctaatcaacaaaaaaaaactcataataagcaagagaaaaatgattattataaggtggcaaaaattcaatttttacagctataattgttgtcttaacatgtgaacatccaaacatggccttaaaatgaaaaatcatgaaaagattgttaacattttttaaccatacaaaactataaacacccttcatattagaatatgtaatgcatttataaaaatgtttttttagggaaaaaatacaagtacccttttaccttaaaactatatgaaagtatgatttttttttacaaaacaaataataataataattgaaatcattcatactatccctatagttttcatttttcctatagaaagattgctactaagtaaagtttacatttttaatgatcaaatttggcttgattctttgttcaccttgagaaaattggggaatgaaaatgaaaacccaacacaaatttatatacatttatataaatatatatataataaaaagagaaatgaaatgttacctatgaagagatgaaaagtagagaagccttgccggagaagagaatatgaagagacaaagctctgtgttttttagtaactgaacaaagatttataggagaaaaaaatgtttgagaacgtgtcttatttaaattatatttctaataggttattttacaatgcaacttttattttcgatattttaaaagaaaattagtttgatttttttttttaacacatcctacaaaattttaagaaatttataaaaaattaacacgcttaaaatatggtttaaagaatttgttgcacgtgagacttttttattttataccagtgtgaaatagacgatttgaacattgaattttttataattgtaaattattctgaatttcttaaaattttctaaaatatcttcaagatgccgaaatagttagagttgcatcagtacatctattttagtgtgatgtgcattatatttttttatgtcaaaaacaaataatttccaaattttaaggattttactactcactaagcaattattatcattaggctaattagtaatttttcctcccgaactttgacatttactaaatcgtgccccctgaacttttttggccgttaaaaattccccccgaa

SEQ ID NO: 318159 - DNA, 823 bp, Cannabis indica
aaaaaaaaaaacagcatctatagttgagatccaaattttaattaatttagtgttttaattttttaaaaaaaggaaaaaaaaaaaaaagaaagaaacacaaatttaaagtgttctatggcattcctaatgactttttcccatatttgtaagttttttttaaaaaatgccatatttagtataattaagtatttatgccatatatatcaaaatttatctttattttctcatatttttgtaatagcccaagaataactaataaggtacttaataagccgtacaaattaattaacctaataaattaggtatttttcccgcaaacatctattaataaacttatatagataataaatatatatttatataagaacgaagcaaaaaataaaattaaagtgaaacgtttacatattttatattacatatttcatataatgtacggagactctaaatttttaataaaaattatagagttagttataataatatatatttaattatgttaaactgacttttatgaatgacattttataatttcaactagagctaccatcctacttaatttaaacctatcttcatctgtatatataaatataaattataaatatgagacttgtattatatatctattctatataaagtgtgcctatataaccgaattcttggtttatgagaaattcgtgggagattttttatttatattaaaaataaaatgatttattattaaaaataaaataatttatgagaaattcataggtcactttttatttatattaaaaataaaataatttattatttaaaaataaaatagtttatgagtaaattcatg

SEQ ID NO: 318160 - DNA, 774 bp, Cannabis indica
ttcaatttttaatacatatatcagttggaagtgaaggattatattgtatactctttgttcccagatttcactgttacaaaaacaaaagctagttgaagactacactttattttttaatacatgaatattagttgggaatgaaggattgtactgtatacactttggtcccagatttcagtgttacatataaccaaagctagttgaaacaagactacacttcattttttaatgcataaatatcagttgggaatgatgggttatattgtatactctctgttcccagatttcactgttacaataaccaaagcactatacttcaatttttaatacataaatatcagttaggaacgaattattagattgtatgcaatatgctctttgttaccagatttcactgttacaaaaagattgcatggttcaacagcatataaattacaaaaacacatcaatttttggataaggattacactgagtactccctctatggtttttggcctaacaagactttgaatttttatacacaataaaattatatcaaaatagcttaggaaaggtttaaattgagtaccctttggcttaatctcggtagacttagaagacccatgatcagtttcagactctgataatgattcatcagaggaagaatcaccttcgctgtcactccacggcattgcccttttcattggtatgtatctgaagaatattatagaaatcaaagacaccaaaattaaaaaaaaaaaacaaaaaatttagggggtgcaacacgaggacttc

SEQ ID NO: 318161 - DNA, 1602 bp, Cannabis indica
gtgacgtctcgggaaatcggggcgttacaatcaaactaggggttgagctagatttgaggaggtttactattgtgtaagattgtgctagagctatatctctgctttcgtcttccaacaactaatgtggacactagaaaaataccatttggagcatcaagaacatcactccatattacaaaccagaaagtaaaaatgagagagaaagaagagaagaagaacagagtaaatctttcttattgaaacagagaaacaatgagtgagccttatatagctcaagctcaatgaaagtacattacaaaaaattagttacacatttagaaagaaaactactaactaacataataaatcaatcgactttacaatagattataactaccaaaccagtggtagtaatagtagtgtgacagctaacacttaatactctccctcaatatggagagctaatgattattaagcccatattgtctttgaaagcattgaattgagtaggaaaaagccccttagtaaatatgtctgcaagctgatccttggtaccaacatgactagttttaattacaccttcttgcaccttttccccactaaatggcaatcaatctctatatgttttgttctctcatgaaaaattgggtttgcagcaatgtattgagttgccttgttgtcacaataaagccaagtaggacccttatgtttgattttcaattccttaagaacagacagcagccaaacaagttcacaagaggtattggccatagctctatactcagcttcagctaaggatttagagaccacatgttgttttttactcttccaagaaatcaaggactttccaagaaaaatataaaagcctgtagtggaccttctagtatcaggacaggcaccccaatctgcatctctaagttgcatttctgatgtaacagggaagaactaaccttgcccagggcaatgcttgacatattgaagaactctctcagcagctttcatgtgtctagctttgggagtaaccaagaattgacttaatttgttgacaaaaaaaatatacatatggccttttaatggtcagatattacagcttcctaattgtcctcctatagagcttaggatcggccaatctgtcttcttcatcctggctcaattttatgttgacctccataggagtattcactggtttacaacctcaaatgaccaaaatcttccaacatttgcaaagcataatgtctttgagatataatgattcccttggaagacctagcaacatccaatccaagaaagtagttaaggtttccaagatctttaagctaaaatttgttgttcaattgaactttgagagccacaatttcaaccaaattgttacctgacaatgaatgaacttatctccattgtgcctcataaacaatgaatgaacttatctccattgtgcctcataaacaatgaatgatctatggttgaatgatggaagccttcctcaaccaagacactagaaaatttagcaaaccattgccttgatacttgctttagtctatatagagattttttaagtttgcatacaacatttggtggaagctcccccttaggactataccctggaggtaaagtcatatacac

SEQ ID NO: 318162 - DNA, 943 bp, Cannabis indica
aattttactaaaattagatttaattgatgtgtcataattatattggttaaaaatctcaaattaatgctatactctaattacttgaaatacattaaatattagtggatactctttctatcttagaaaagctaattagatatcaaattgattttttgtattaaaaaaaaggattttatgattttaagacattcctattttgttcacataaaacattatatataaatgtaatacactaacactacaacacaaattaagcctaacaacttagaaacctgaaaaacattttacatttataaatataatatatattttgaaagctaaataaaatgggctcaacattagttggtcacttcacattattcttaatttcatggttagtgataatcaccaaagtccaatctgataataaagttttcaatgtgatcaattttggtgctgttgctgatggaaaaactgataatagcaaggtaataataattttgttcttcttcatttgttcattagtgctatatagttatgtatatatataggtatgtatatatatatatatatttgttagggtatttttacaatacgcttcactaaaataggttgctggtacaactcttgattgtttcagcatttagaaaaattttttagtttatttttttatagtcgtgtacgttgtaattatttaaaatatcttgcaaaattttaatacatttagaataatttacaatatagaattcaatgttcaaaccgaatcctatttttggcgtgttaagtttttttgaatatcttaaaattttgcaggatgtcttaaataactacaacgtatatgaccataaaaaaattaaattaaatattttttagatactgaaacaaataaagatataccagcacactcatttcaatgagatttattgtaaaattttgttatgtatttgtgacagtcagtagtccc

SEQ ID NO: 318163 - DNA, 600 bp, Cannabis indica
tctctaacatgtactaggagataactacagctagcacacaaaagaacaaaagagggtcttatatatatcgccaaagtattatgagatttattttatgtaataattgaaaatgacactaaataaaaatatgcatatcatattggcgatattattataatattgtgtataaaattaattgttattatttttcttttgatgaaatctatatataattaaattattagtaattaatatatagtagtctttccttgtagtgtatagtgggagagatgtggctgaatgtttccctgtacgagttattccagtagcttctgtacactactccgtaacagaaaacagcaataaagtcatacaatcatgttcaagcatacatacaaactatacaattatatgtgaatatgaggtagttgaaattattcagaataattaaacataagatactttacttaatcaagttgtgttttgttttcggaatcagatactgtcataaactctcaacttggaatattatttgtaatgcaacttgcttacgtacgtctatatatatatatatatattaatcagtaatatatgacttaacctataacctataattgaaac

SEQ ID NO: 318164 - DNA, 1985 bp, Cannabis indica
taaccgaatattcttttatttttaagtatattctgttaaaccaagaaatgccgttagatagacacttttaatatataaagatactataataattggtttattgtgtgatttttttgggtgtacgtacgtacaattaggtgatgaatacatgaggccattcgtgatatggaaacctgaagtaacagtaacaaagagaactgataaagacgagttcctcatacttggaagtgatgggttatgggatgtggtttctaatcaacttgcatgtaaggttgtcaagaaatgctttcactctcaaaggaacagactttctaataacaaagaccttcttaaccgtggaggaagccgctcaaccgcggctgctgccctcttagccgagctggcaatggctcggggcagcagagataacattagtgttatagtcgtcgacctcgccaaaccctagctacgtagtacgtactcattattaattggttaatttgttatatagagtaaatactattttgaattttatattttgtaaaaattattgattggataatctgttttgttaaatgataattcgaacaatgctgtatttttttttttttaaattgatacaaaataatattctgagcgcttattttcatcaaaagaaaactttataataacataatgtaaatgtgttataatcagactaattatattattttttttttatatctggtcgtacatagaaactagctacatgtattatattaagaaaaagttgaagaaagttgagctcaatgtattattttgtatcatattttaaaatataacatcttatttattatttaacaaaataataaattcaatctctaaattttgtaatacacagaattccaaatatatttcacctattatacctacatatatatttattgtcctcgttatatttctctttattattttaatagaagaatacatatcaatttacaaaaaaaaaaaaacatgtaccaaatcatgctccctgaacttttaaggtcattgaaaatactcctgaactattaagattgttggatttaaggacttttttctaattttggtaaaaaaatctaacatggataaaagttcagggggcataatttagtacatgttaaagttcgaaggacatgatttggtagatatcaaagtctggggaacatggtttagtacataaacaatcattaaaaatagtaaaaattgaataaaattagacaaaaagtccttaaatctaacaatctcaatagttcagggggcattttcaatggcctcaaaagttcatgggcataatttggtacatgtcaaagttcagggggtgaaaatcctaattagcttatatatttatatataaagcgtttttggatcaacgtgcatgcaatgtagtacgtaagaatcatcatatgatcaattaaaatttggggtaacttgaaaaatgtctatttttaatcaattaattaaatttacttttaatttttatttaattgaaatatctctttttttttatatgtactgtgtaaaatatcctgacataaaggagtcgcatagaaagtatcttaaagtgacagagataaaattggtagtttaaaaaaagaggtaaaaatgatagaatttaaaaaagagagtaaaaataaaagaaaacgatataaaaagggcatagagtctaatttccacttaaaatttgttggttgtttattgatattactggaatgtagagttgaatgattccattttgtgatacattcaaattaatttcaattatttttatcctgcatgtaatattatttcattgaactatatattatatcatgtatatcatgtatttcatttatgtatttgaattcagtttcgtttgagtttgagtttgattctcatatgtatacatcgcgttcactatattttattcaatctgtatatatatctttatatattaaaagtgcctatctaacggcaattcttagtttaacgattcttggtttaacgat

SEQ ID NO: 318165 - DNA, 683 bp, Cannabis indica
tgctaaagcgttagacacacaaatgctgcgttcagataaagaccaagacatcctagtaacatgtgctagtcggtttgctgaatttttcacaaaatgaatttagatagaagaaataattgataaaagagtttggcaatcatggacaagaactccaaagagcgaattgagatgaatcttgcttcgaatagcttagagagtaatcagactattagactctagctcgatagtgtgccagttatgactttttatccagcttaaagcttccttaattctaacaatctccgccacttcaggtgtaagtgtaacggttcaggattacagccagttttgacgtcaataagaatacccgagttgttccttgcaaccatgccataactatatttgttttcactagcaaacatagcagcatcaacattaatctttatatatacaccatattttcatacaaagaaaaagtctatatatgtatcacaaccctacttattatatttcattctcaacatttacactatatattatttttttaacttttttttttaaatgtacgcaatacggtttgtatttctaaagtgattgcagcgctacttgtaataaaagtttctatatgattttttgttacaattgaggttgcaccgctagttgcaataggagtttctatgtagaattctgtaaaaatatatata

SEQ ID NO: 318166 - DNA, 1031 bp, Cannabis indica
gtccattatataaaaattatttaattttgatataccaataagtattttcaataactaagttgatgcaatttttagactttataatatgaacaaaataatgggaattttgtattttcctcaaatccaaaccaaagaaaaaagtgtaatgagcaaatcaaaattgtaaaaaataaagagatacaactagaatataattaatatcaaactataaataaacaataaaacgttaaaccataatatatgttaaaaattagtcaaagaacaaccataaacataaaaatacataaacaaagatttattacaaaaaaattgacaaatatgagtagaaatatataagacagtaaacaactgtttataagaaaaataaaaaataacctaaatataacaaatattccaaacaataataatatatctaatcaaacattaaaacaactaagaaatataaaccctagaaaaaaagattcgaatgaaaaaacacaacctagaagaaatataatatttccgagttaattaacgcaaaatgaaactttagaaatttcatctgatttgcttcttcaacttattagtctcagggaaaaaactcttttcagcatcattattctttatttttcttctgaagagggcgacgatcatatttcgttataggtggagcaaaattagaatcatcgttttttgttaatggagcgttttcttttagttttgttggcgagagatttaatacctattttttcaaattttttcaataattgagaaagggaatatgaaggctgagtcacacatctataacagtggatagaagaaaaaagaaaggaaaaaaaaggtgggcagtttctaaaataaaagttggagatgatggatggaagcagttctcttggaacgaaaatgagattttgattgtaggggaggaacgttcttagcaaacgaaaatgaaaaataattaaaatagaaaccgaaaataaaaaaagaaaagggtaaataccattttggaccctctgttttgcaaaagttatcaattggaccctgtgttttgt

SEQ ID NO: 318167 - DNA, 818 bp, Cannabis indica
atgattactttcgagatgtggcgaactactttgaagtttccctagtccaaattactcatcgtgggtacctgaccttatttgctttgttcataatatatcaccagaagggatgaggaaggccttctcttcacaaaattcattacttcctttcctttcggacttgcctatctatgaaccattcaaaatacttctacttcatgaactgagaatggggtcaaccgtatgtttctggtattagtagcacacctcgcgcagacaagcatcgatcatcctacttttttacgacccccatggacactatccaccgtgctttcaaccatacgggtacatatctcagactagtcccgactgaggagatgatacaacacgcgacaactttcacaaccatgtcagtagctgagaagcatgccccaacgattgtacctgtggagatgctcaagttggtaggattgtgcccttctgagcataactcaattaccacaagtacgattgatggacctgatgctcttgttgtccccattgaccgagggaatccttctcataggaactttacaacagccgactcttctacacatatgtcgttacaacccaccacttcgaggagggatattagagtgattgttggtgtcgatatcaattccgagactactacagtgctcaatgattgaggctgaaggttcctttctctttcttttttatatatacttattcactattttgaacatattcatatgataatattatgatgttgtgtgtgttgcgatattaatgtttttttctctttttcttacaaattcaggtatgttccaccaactgct

SEQ ID NO: 318168 - DNA, 1221 bp, Cannabis indica
ccataagtaagtaaatctctaatttttccatatgccatattctacataatttcctctattgataatgagaataatagtaaaatttgaaaagaagatttgcacatacctcgataagaaatatcagagcaaacaatttcacgactagaattagacttaaacccacaccgtccacctcgagactcacaccttccgcacgtgggaacatcccacgtgagacgaatatgatcgttaaggtccgacgacaacactttctcataaaaaggccattcaactggaacaccaaaactgcctatcgaacgacacgtcgttctcttcaacaagaaatccgcaacattaaacgacgccgttgcaaaaactgtatacgtggaaccacttagacaagctatagggttcaaccggtaccttagataatccgaagaagaagaacaattaaagaatgtgaaatcttcactgtacggactgtagaaaggagaatctgaaaaattcaatgaattgattattattcggttgggtagacagttgtttggatcgtttaaccaaatttcttgtgtggcgtagtcaattccttgaactgtaaactgttgtgaattgggtagtttgaagagtgtttggtttgagttatcacaggataaatcaaaacctggatagccacatgattctgtttggatgttctttattcgaaaggggaatcggatatttggttcacgaattgcacaagctgctttaatacatgggatttctgtgcttgtaatgaggtatgagaaagatgatatgaagatgaagaagagaagaaagtgtttgggaataatgatcattttttgagagagagagaggattattttggttcgaaaatgaataataataataagctttgtttttttgtatttaactatgggaaatattatatataaataaagtattgtgatgtttgacttattatttattttaaggtccaacattctacaccataaaataattggagaaggaaaaaaaaaataatggagtttacacaaaaacagagataaaatgttgaaggtggcatagtaaaggccattattttatatatatattcaattattataaagtctattatggtctcaagtacatcatagtatttgtattttataaatataaaaaagctaactttttttttagtaagtattgaggctagcttaagtggtcataggtgggtgtgtgtcttggaggtcttgggtttgagtc

SEQ ID NO: 318169 - DNA, 3531 bp, Cannabis indica
tttttaaaaaaaaatacttaatgtcttgaatcttttcctagacttatttttaagaatgaatataatgattttgatttttttttttattatttgtaaaattttcacccaagagaagtctgaaattttgattgcgctaatgaatctgattaaaggagagaaacacttgtttcatttcgacacgaagtctttcagtaactagagaattttaatcttggagttttacccaaacagataggtgcattcaaaacagatggtatctacaaaaatgttatttatatgtattctcctaagcttgtctaccgatcttgtggagtggctgtgaatttggaggcaaaactaaaaaagattccctatatgtgcttgtagtttttgtgtgtcaagggtaagctagaccttaaattcttggaatcttctactatttcaggattatcatccaaactaaaagtttggaattggaacatagaacttttagttttctaatgaataggagcagtttctaaagctctaaagcttatatattcttcactttcataatcaaacatcacaatcgacttagttcaagaagttgattcttctatgaaacttataaaaatactgtaaaatatgagaaagttaacaaaaatagtgtgatacggagttttttttacatttattgtactaattttataaaaatacattgtttaaagtttcaaattacaaaaatacagaaattcagtaaaataaaaacaaacctagaacaatttaacaaacaacatgataataaatataaaacaacaaaaatataactacaaaacaactgaaaaataacaaaatttacacttaattacgatagacaaaataatatcaactcagtatgtttttattgactcaaaaatctagacaagacttctaagccacactcgctcattagtttgatgagaacgaaaagtttgttaagtaattaataagagatacaacaatttttagtagttcacctcgtacattgcgatagtaatggggctacgtctactttgagtttttatttctcacgagatggtaattgcagtaatagactaagcatcagaaactctaaactctagagagagaagctctgacattgtgggaagttttttcaatgtgaaaaatgagctaacggagctcttcttttatttataggtgaaggaggcccacgaaaataggagaaaaaaaaatataaataaagtgttttccactgtttatgatgatataacggtgaaaattagcttctagtggtaaaggccaatttttggggcccggcgcgtcctgctacgagttacccggagcttatttccataactctcttggggtaaattttgacagtgatagcttcctaatttttattggggtgtgagacatgacttgatagaaagcttaaatagcttcaaaatgcaagtttaatcgagtcaatcagatagaaattgaatgagttatgttcgttttactgaaggcagttcaggtcccaacgcccaagttgacatcgacatcgacatctgatgtcaacctagatgttgtataagtgtagaaacatctaagggaagtactttgagattcctaaatgataatttgacaccacttagcccttttataggttctggcgaagttggtcaccagttttcggagatgttgttattttacggaaatgggagacccaaaactcttcatttctgggagccaaaattaaagttgtgaatttgattgatctaacttcatggatcattgcacttgtaaaaaacttgacaggctgtcgaaatggcatcagattttgataagcagcccctagcaaaccaggccatttgttgacctggatgctgggcccttcaaaccaagcttttgggattatgtttttgatacttccaaggcttctgaacttgaggtcgaggtctgtccccctgttttttaccatttcgggttcaattgttgcatcaaatttggcatttgtgcaatttaaggtagcgtcccaggtttattgtcaacttgggcgttggggccaggcctaggtcaacctagcttggttggccctatttctagggactcaagtttgttattttctcattgattttaattgaatctttatcaattctgatgacggtaaaaattcttggagcaatttttgttgaactaaattggaaacaggccaggttgacaaaatgtcaacctaggcgctcgacccagctccaggtttcaacctaggcgctgagacctagtttttcccttcaaaagttctgtttgatccccaaaaatagttgattctcaatattttctgaagacaaagctgatgcttgaaagaattccagagaaactccattttcgtggcccaagttggcaaattatcaacttaggcgcagagccagccccaaatgtcaacctagatactgggccctgttatttgtgcccaagaattgttgcttttgctctgaaaggacctatttccttatttttgatgaagatagattcaatgcaaaagtcggatctttaattgaccacttggaaggcgctcagattgatagattgtcaacctagatggtgggtgctcggggccctgggtgctcaaaaatcaacttgctctaaatctaattttgatgctctaacatgtatgtgatatgtctagttgatgttccaatgcaatttttgtccattttgcactaagacggtcctgaaatctaaaaccctagttaaggatgtcaacctaggcacagggtaaaaactctagctgcacaggctggcttccaggttgtagattcatgtaatttcagctcctaaaccttggattaggttgctccatgtcttcatggtatagaatactgaaagataatgggttggattcaagttattgaagtccaaatttctatcccagagatcctagagtcaaactaggcgtagggcttgggacccctcccaggttgactgctatgacttgggtctaccattctatatgcctgttaagacttaagacaaacaacaaaatttttctctcaatgagagcaccaaaatattgacctcgcttttagccaacgacagttagtcaattattaagcgattagaaatataattaaaataaagcaaaaaaaaaagtaagtaataaagaacaccagattttaaagaggttcggccccgttagtgtggtaatagcctactccccttagattgtattaacttgagataaataacaaagtctttttctctctcaaagttcttacaatgaaatttctgagtaattctcttagatctctgtctgaagcaattctttcgatccctttcacagtgaagctaagtcaatatttatagggccttaatgcaagagggaaggtttcccttttgcttaccatgtataaaatagggaagaatattcattacataattatgatacacaaaataagaaatcggaacaggttgccatattcctctgactcaatcccacaattgtggggattgtcttcgtgcttggacttcacgagattattctgaagtaattaagtcctgataagtagttcagaatgttggaaattattttac

SEQ ID NO: 318170 - DNA, 1543 bp, Cannabis indica
atacagaaacctacgtaaaaaatgcgtaatacataaatcaattccacttgcatgacacagcaaacacaatcatttatcactataattcacacaaacacattgcatgaacccatatgaatatttttaaagtaaaatataaattcatacaaatactttttacgtgaaagttcactaaaatactatttattaataaaatatataattatgtagttatatatcaaaatcagaagctagcatatttcttaaccatttatacagatcataaaacatattcaatctgctcagaaatatgtgtgaaatactatctatgattatgtataaatttattgttaaaaataaagaaaatcttaaataattaaccaaaaatagcaaaacatctcaacatagtctcaaattaacttcagaaactataattatattttagcattatattgaaggttccccaaacaatgaacacaatttttactatttattctacttaaaatccaattaaatagttaattagtcacaaataatcataattaatacctattgcaactaacaaattataaaattttttttttctcatatcacagatagtaaatagcattacaaaaatatactttactattttagcatcacttaactattttttataattattttcagtattaactaaataaattcatgaaaaatacaaaaataatcaaaaaccaaatctaaccattctaacaccgtctataagctgtgataagccacaaataatttactttgaattttctgagttacctaggtatttttttataattaagtttagaaataacataaataattcatgaaaaatacaaaattgactaaaattcaaatctatgaattttgtatcagtttatatctcataactaatcaaataaataaatttagatttttctaagtatttttcctaattaatttaataaataaatcaaataatgcataataaatcaaataattgcaagaaaattatgaaacattaccaaacatcctaaaataatatgtcgaatcaaaatctacagaaaaatgcaaaaaacacctcaaaaccacccagatcgtggtcgctggagttacgtcggcgaacccctcttctccagcgacggcgagcctccaattccttatgcagttgcttttcacgcattgttttgaatggcgaaacttcctacagtgcttagaatgtcaagccgaccataaatcaccaaataacacggtccaacatcgttgtcttcttcgttgccggtgtaccattaaaaatggagtccaacaatggtgattttcgttcatggccttaaagctttaattctttacgtccaaacgccttctacgagtcccttaagcttaaacacagtcttattttaacccaaaaacgactcaaacatgttcaaatctgagattgctcaagaacgtgcttgaatgtgcatgagaatggtggatttcgaaacttgctgtcttagcgcattttgtcatgaccattagcttccttagatcgtgtagaagattttcaaagcgatcaaacaaacccagaaactctcta

SEQ ID NO: 318171 - DNA, 1035 bp, Cannabis indica
aataaattagaaatattacttaaggtatctacacatttagtccataacactttaatagccatgactcacaactactaagatgttcactttatttggtaaaacttcaaatagcaatacgccaatacatatgagcccatattgagaatttaatccaataatctttcacttgagctacatatatttttttttatagtgtgtaaccttataagcgcttaactttgctatcataattataggtattttaaaataattttgtctattgattatactaacataagatcaaagcggctttcgccacatttagcgtggctaaacccatcaatagtcacatatatgaatacaatcaaatgatatagatcaatcatggatgcgtagcctgaaaattacatgaaaatgtgatataatcatgcctatctccaactggtcctccttaattgagattaatcatttagtctttctatccttatacttaaacatcaatagaaagaatacattcagagtacccaaaacttaagtcaatattttatctgtagaatcaaactataaatatgtgtcagcttgatagaacatcccaaatataaacttccactaaaccatcacaatcttaaataataccacatccatatataagcaacaagctcctaaaaaaagtcttaagtgatatatccttaatgatccagatacgaaaatatggaattcgttcttaattgttctataaacactttatatctccgaacatcattttaataacaattagctcaaagtcaatgtgcattttaccttatagagctcatgttgttaccaaaatacaacctgattgatttattgtaacaccctactagattagacacgttatcgtgactttaatttactgtgcacttctttgcttaaaggtgttcattggagcacatccaatgaatttggatccaaccgatctaatctaattatttattggataatagattttctcatttgatctaatccaatcgaattgagtcatccaatctgatccgatttaatggatgtattagattg

SEQ ID NO: 318172 - DNA, 523 bp, Cannabis indica
tgtggacattcataattttgaagtttttgttatgtttttttcctttgtaatttttatgttttattttcatattctttgacaatggctatgaatttttgaagatttgttatattttttcttttcattatttttttctctaattcgtaatgttctattttcaggctattaattggcaagtctctcaaatagatgttttacaccaaaactattaggtaaattttttcttactttgaaagattatcactaatttttattgtttttatttttatcatatatctctctttctattaatctcttttttttcttctctttattctactctttcttataaacttgattttcataaatataaatatgaattttctatttgaatcttctatttgattttttgtttatatgtatacatatatatactagtatattgttacgtgcgatgcacgtatgctatgttttatattaagtattaaattatgagttttgaaggaaataaatgaatcaaaaataaataatatttaatttagag

SEQ ID NO: 318173 - DNA, 2674 bp, Cannabis indica
tactcgatgtaaatcatcaatagaggatccttgattatttagattaaaataatagataaattatatcgtatctatacttggtatagagcattctatgtaatcaagagtgaaattttgaatctatagtagagttaggaggaattaataagatagagaatttacttggtaaattcaaaaaaaactttttggaagcttgattatataggcctatggtccccacactacttgagataatattgtcttgtaaactcaattaattgattagaattctaaataagactatgtcttttttatttgtttcactaagcaagggcaattttgagaagaaaaagagaatttagggtttgtatattaattaagaaactttgaaatgtctaactaataaataagttaaatgggaattttatttgataattaattataattattatattgatagaattatcatttatagaattagaattaaaagatggcatttgttaaaagaaaaataagtttcaataaaatgacaaaattaaacccattaggcccatatagaattcagccaacattgtttttataaagccatttttatctttttatttttatttatttttaattcaaaacctaaccctaaagctaccatataaatagaatatgataactcttattttataaaaaaaattgactcactttgtcagacaaatagaaaatatacaaagctctcattaatttcaaattctcgtcttcttcttcttgtcaattattaaaccttaagtgattgagtaattatctacacatttcaagataatattcaagatagtatggaagactgtgtagttttttgttacctgaaggagaatctaggttcagatcttgatcgtattctacaatagaaaggatcaagggttagacatctcaacggaatgagtcatattattccgctgccattaatataaggttttctataactttatgtgtttaatttattgttttagaaatctcatatttaggatattagactatagaattataatccaacatgcatgttagtaaatcgagatcctaataaaatatatctaacacatagtgtcccttgagtcagtcttggagtagaataccacttcagggatgccaatgtccctagagggaggatgtcccatcccaataggagttggtgatttggcattggctagctcagcagggacattggactcatcaatcatgcttaggttgtccaaatcatattcagaatgatacaaccctactaatttgagcattaccatcgttacaatagtcggggcaaacctctcctctactggcattaccgccatgttgggagcaatctggacaggtgagatatcaaagtagtcggctatatcaaaaaatttttagttttttgatatcatgtccaagtacatgtgtgcatttggagagctgtcacattggttctttcttcctccagtcactcttccactatccaaagtgttatagtgaatgatacttttccatggtgctccactttaagtcactcactggaagatcgcttgtcacactagctttctagactttagtctggtacaccactttcacttgaatggagtaagcaattttttaggcggcttttttctttctcacttcttggaaggaccactagaggttgcatgagccaccactcctagctcatcgttagaaggtggattgcctacgttaaggggtgaggggaggaggtatgagcttccacttccctttggtcttgagtggaagagggaccaaccatctgtacaagcgtggaggatctggaacaacacttcttcgtgtaaagaaataaaaagaccagcatgggagaaccttctttaatttccttactctatgggaaggggatatagtctcttgagacccgatacagaattctttactaactgaaaaactaggtgatgatgacgaatcaagtggtgactgatagtttgtgtaaagacaggccagtttcacctccctaatagttatggacatacatctacaaacacaaataggggaggtgagccaaccgccataagtgaggtaattcaaaaataaataatacatataaaaataaattaaattcatttataagttatttatgctaattaaatgaaaatatattagataaaaattaatttaattatgtaaattaggtacaactaaatttgacaaattgggaaaatctaatttattaaattaaattagaataaatctaatttaattaactaagttaaattgatattaaaggaaataatttattttatttatttatttttgggtttatttttatttttttaaaaaaaatgtgtgttcaaaagttatggagccattttaatgatagtcatattatacataatatataggggcagctgttgtcacgcatgcactttttgagtgactagtgtcgcacggatttatagccattagattcagtctcacttttgatctaggggccgatattaggtaccccatatatcatttttatataatatttaatttagtgaatggaggggtatttgacttgagaattggaagtgtaactggctgcaagtttttcgatttctgcgcccatttagtaaagtgaaggttctctcattatctaagatcaaacttactttcagctaaaaaaaaaaaaaaaatcagctcaagagatctcaaacttcagttctctttc

SEQ ID NO: 318174 - DNA, 924 bp, Cannabis indica
tggaaggcatctaatataacgccttgtcataagttggatagtttaacactcgacaactaaacttctctgaatggaattgtaatgtctcaatttgccttactttgtaaaaatactacatttgagctttactttggaaaaataccattttcgtaacaaacatagtaaaaagaattaaagaaatactaaatccttattgtgaataccggaatgttttatttaatcaaaataaatgaaaggcttcttcatagtttaaaattaaacaaccaagtctcaatgttaaggaaaatataacaaacatccaatgatttagagtttcaaaacataaaatagaaatccaaaatttctatggtgtctattgggccgatggctcgttcataaatccctcacagcatacacatgtacttggaacccatttcgctaacccttggtatgttgccgaaatatatcctttttttttttcatcacttaatcaaaaatagccatattttaaattcaattgaatgtactccttttataagtctattaccgattataccttcacataaggatactgttcagatcgcgatataacaaataaaaaaatgtataaattaaatatatagaaaaaaaagtaaaaataaaatgagttaacaaaaaaaaggtataggatgcaattttcacccttagttattaaagggggagaaaataggaatgacttaatgcttagtaagaaagtgacaaactatacacaacaatacataacagtccaacatatcattattttacaatacataccagtttctagtaagagcaatttgcggcgaaacttccctatattttaatttttatacacttaatccccttattttttttagtgtgacaaaatccctttatgttttaacttttattacacttaacttccttatttttttttagttggcaaaa

SEQ ID NO: 318175 - DNA, 551 bp, Cannabis indica
cattaagcaaaaaaaatgaattaaaagaatttaaaaaaaaaattacaagaccgcgcgaagcgcggcttagttctctagtgacttataaattaaatcacagattttagttacattaaaaaactaatcaaaaatccaaaacctaaaaataaattacataaaaaataaaagcaataattaaatacaaaaactagtaacctaatacaaccaacagaaaaaagtgaacaaacataaaacacctaaaataatcaaaagataaattaaatacaaaaactatgtacgataacatataccatcgaatgatttttaataatggcttataaattaaatcagagaaaccggtaacattaaaaaactaagtaaaaatcttacacaaaaaattggttacgtaaggaaattaaattaaaaactaagagacataaatgagtttcgaacctgtgaaccttgtgaaacaagttttgaaccagtaaactctatgaaattagttttgaaccagtaaatcctgtaaacccaatttcgaccatataaaaaaatcataacaaaacataaatgat

SEQ ID NO: 318176 - DNA, 630 bp, Cannabis indica
aatgagaccctatataaggaatatgataaaattttaatttacatccttaaaatagacactaaaaaccccaactttgagtgattcagagaaatctttattccttgagaaattttgaactctctctctaaacaactattattgagttgagtgtcagctcacactatttaagatggtactcagatctttggggaagatcttaaagattgctcttgtcggattcaagaaagctatccatgttcaatacttaacaatatcttgctacatagtaggaatcgagggtaagagtaattaaacgaaaggagtcactatagaattatgttccttttacatgttaacttgtcgttttatgatttttcatattttaggatgttggattataatatattaattaaacatacatgttactaaattaagatcctagtaaaataagttctaaatatccagatctagttatttttttgtatgcatgtgccgatataaaatcgacgggtatagtgttggcgactttttatgtgccggtttaaaatcgacagttataatgttagcgattgtttattccttaacgtgttggaaaattgttgtgctccaatagaaatatcaaaccaacaaaattacaattcaatgacaaat

SEQ ID NO: 318177 - DNA, 2708 bp, Cannabis indica
ctctctctaaacttgactctgatttgaagtatgagctttggagatcacttgagagagtagaggcacatttatagatgttggtgggactgtcttttaagttagcgtcaaagcaattattataactaaccgcaactttcttcaaattcatctgatgagagttaagatagacctacagacttggggttaagtgagtataatcccaacatccacttaatttcatcagcttcaagccttcaatgcctacaattcgtagagctttcaagttgaagagtggaagagatgacaatgatgatgatgatgcttttggggtgcagttttcttgtttaaggtgcgttgaaatggcttccagcaagttgagtccagagcaagaccttcttccagagttggaaacaatggcatagatttcaaatgtgggcaatcctcaataactaattatgagagacaagggaatgacacatcaacattcatgacttcatttctccaccaactctgtaggttaggtagttctatgagctagagttctttcaaacaatgaaagaaaggtgtggctactgaagaagcattcttattcttccgaaatatattcgagtttcataagttcgtccagtacaagtaccttaagattcaacagttgtttgagtggtggtaggctttgcaatttacgcatttgcgcaatgaaagtttgaccaacatgtttggacagttagaagagaataagatcttccccttaaaatcaagcagagttaatacttgaagagctaacaacaagtcactctagtggtgttttgtgctcatcagactcaggtgcattactttcccattccaaagacaatgattaaacccctgataccacattcaaatacctgctcatatcaaacttttcatgccccaaattattgatatcaacctctttggtaaatgtattattaaatccaatatttggaaaggttccttgatctcttactgcaagttgagataatatttgaagtctagtccagtggacgaaaacagcaacaacaacaacagaggaaaaaacactgaattttcatcagttaagtacatttcaactcgtctgtgtctcaatcaatcatcttgacaatcattggaaatctctctctagcattgagtctttaacattagatcatcttccatacatgaagactctctctgaagggcttcaacatctgatgaacatgaaagagctttatatttggaggtgtaacaaattggaagacatctcggattgtgttgagcacttcaaatcgctcgaaagctctccctcaagctctgcctcaacttgaattgtcgattcagatgattggtagcctcgattctataaagacgaagatggagttcgaagactgtcctgagatcaaagtttcttttgctaggtgaaataattgttgaaccaaacaagtgttcagtttaaacaaatacttttctggttttatttgtgttttacgatgtcaaatgtgccttaaaaaatatagagtccattttattatttaataaaatatacatcttggtgctttagttcaaattttttaataagttcagtggtgtttttaattattttttctcccttaaaatattaaccaagaagtcatttttctattgatgcctcaattaattctaagtccttcaaacaatggaattgtcagataaatattatatcttctttgagatattcatttttctcttaaattatgtttaaaattataatctatttctactttatctttctcagagaattaatgataatattataagtgagattttagctccagatttggtgtacacttaaaaaaaacacacctataggcaccttggaaaatattccaacaaaattggattaaccactgctaattataaaatataagcaaacacttcagattacacaagataagagttgtagaaaaatataaactactactttctttcttaactaattccataaaagaaaaaaataagagtaaatacaattttagattctgtgttttgcaattaaactctattttgttaacaaattgaaccctgtattttcaaaataatactaaataaccatgaactgattttttattaaattaaaacttaataataactcgatttagaagtgttataacaaaactagttatgttttctacatctgttcgtgttaggaattgtcttcaaattggttatattaaaagaaaaattattaaaaattgagctcatggtcctatttgtactattttaaaaaatacagaggatccaattattaatttttaaaaaatactagtccaaaatagtattaactcaacaaataataaataaataaacataactctataatgagacgaatcatccgattacgactgctccaaagccatttcgtttcgaaacagcatcttcagatatggaactactttcgggagcacaggcaaatctgctacgttgacactcatcatgtcaaatgcaatacacgagttgtgcatttgtgtcaaatcaaatactgggattttcgaatatctttggctgaaatgtgtgagaatcattctatatgcaccagcagagttccccactcctatggcttcctctattgtgctgtggtctttatccacagcatccccaaccattccatcctcaaatgttgcctcatgtataagtatagttgcatcacgagatgcttctatcgaagcttcacagggcctagtgtcgccagaatacac

SEQ ID NO: 318178 - DNA, 1031 bp, Cannabis indica
ttatttataaaaaaatatatctaactacttttttttttttactaaaaaaaaatgcatcttatccatgaccagacaaatcatccaccaaaataacttgaaatgtggtagggataagtcccccaccatagccacgacttgaggaataacaagtggcaatcgctaactaattggttgccttgtttaaagatttttcaacaaaaatacaagaaatatatttaagatcaaacattaataaagtaggataatctaaaataactaaactaaaaggagacaataaaggagccaaactatacagagcatcaatgatgcttttacaaccccactcaacaataatttagtctaggccctgttttttgatccaactcaaagcttccttcaacccgattgtctctgttaaaagaggagagccacgaccaagaaattgtttggaccaatggtaaaggacaactccataatgatcacgagccaaaccttccaatcccaaaataaaaagctccagaagtgacagaggcatctacattgactttaatcatatcaatactgagaaccgaccaatgctccacacaaacacaaggcctgtaatccattgtgtctgtagaattttcgtgagcaatcttccattgattaaaataagaaaacgcagcacccaccaccccatttgcaacataattttcacttttccaaataagcccatttcttgctttccaaagagactacattatcattgcaacatgacaaactaatgtcttcgaaattcctatgaccagttgataaaaccattctgaaaaaactgtggacgaaagattgcaaatagccccatcaacctgttgccaacaagctttggctaaagggcactcaaccaaaaagtagagaattgattcattcataccttagcacaccagacaaatgatgatcacatcaacatgtcgaccttgtaactgggtcagtgttggtaaacactccgaacatgtcctccagagtaattctttaaccttaggaggaattttgagttgccataataccctccaaag

SEQ ID NO: 318179 - DNA, 2813 bp, Cannabis indica
tgcttcgtattgggcgagagtcaaagatatctatcattgaatagagtagtcagctcatcaaaaatgataaaaattctagcaaccttttattcaatcaagatgagaatccagcgttgtcccgtttaggcgagagtcaaggccaatctattttatgagcttccacaattgtttcatacttttgtaagtcttactcttagcagccactattgaggtggacgttctaagaataaaacacctacaaataataattatctttcaagattctacgacgttaaattgctaatgaacgttcatcttatgctccctaaggcgctgtaacaccattcgaagatgtctttcatgtgtctctttagtgttagaatagattagaatatcatcaataaagacgataacaaaatcatccaggatgtctttgaatactcgattcatcaagtccataaattcatccggggcatttgttaatccaaaggacattactagaaattcataatgttcatactgggtccaaaaatctgtcttggtaatatcctcttcctgaatcctcaactggtgataaccagatcaaagttcgatcttggagaagatggtctttcccagtagctgatcaaataggtcatctatccttggcaaaggatacttgttctttactgtcaatttatttaattcctggtaatcaatacacattcgtaaagttccatccttctttttcacgaataagactggtgcaccctaaagtgaggtacttggtcttgtaaatttcaaatccatcatcccctgcaattggactttcaactctttaagttctgcaggtgccatcctttaaggagctcttgatagaggcttttccccaactattagatcaatctcaaaatcaatttcacgcttcggtggcaaccctggtaattcctctagaaaaacatccagaaattcccgaaccattcgaacatgcttcggtccagctagcggttccttagtagtatccactacacttgctaagaaactgatgcacccctcacataacaaatccctcgccttaagtgctgagatcaagggaatccgggatccttgcatcttacccacaaacacaaagggatcctcaccctcaggctgaaaggttaccatttttcttttacaatcaatagtggaattgtattttgtaagccaatccatacccaaaattacatcaaaatcttccaagtttagttctatcagatcgactcataattcactttcttccacaaagactggaagggatcgaacccacctactggagataaccagctctccagtaggcagcaaggttccaaagccttttggtagtacatcactaggcctattcaacttctcaattattctacttgaaatataggaatgcattgcaccagaacagtcaatatggtaccagcaatagaaaactgacctgtcacggtggaagggtcggcatcagcctcggcctgagtcaaagcaaacacccgcgaaggaacaggtgtatcatccttcttttgttcttgtcgcagaagttgtgggcaattcctcttcatatgacccagtagcccacagtgaaaataggctctgccctgacactcaccctgatggtgcctcttgcaccttggacattcaggaaaggtctgccagttctcatttccaccacgacggaaactttgattaccttgaagtctcttatttgggcctcaagttgatgattcattagaccttttttgcgatctccagggtcagtacccctaccagagccaacaccagatgtctgcctccatgagtctcttctcgaaatatttttctttcgtatctggtcttctgcaccctcagcagccagggccaattcaaccatctgagcataagtccgaacaaccccaggttatttagcagcaactatcacatcccgtgcaatatgttcatccaatcctcgtataaaatttgcttttctagcagcttcagtagccacttcatcagaagaaaattttgccaatcgatcaaatttagtggcatatttcgttactgtcatgctgccctgagttaatcgtatgaactcttctatctttgctgcctgaatagactcattatagtatttctcataaaacagaactcgaaaaagcatcccaggtcatgttattcagatcatgaccctgagacacaatttcccaccagattcgggcatcttcccgcaacatataaataacatacctgactcgatcattgtcttcaactcgcataaagtcaaaaatggatgtgatcatgctcatccactgctccaccttgagtggatcagtaccaccctcaaacactggcgggttctgcttcctgaactgcttatacaacgtctccaaacgatttcctagatccggtggcactaccaatggtgccggagaactaggatcaagatttggaacaggctgagctcgcttcaccctactgccggatagtttcttgcatggaagaaaataattcttcccagttaggtggtggtagagggtcctcaccctcaccagcaaccccgagcctagctagctcgcggttacccctaccagtccacctcgggtgcataatctatacacctacggtcacgtttcaagcaatgacaatactaataagtatctccataaatcataactcttcccacacgtattcgatactaacataattcaaataaacaagctatcagataattaacaattatctggtaattaaagcttactcaaccatgagtcgaacgagtctttgcagccaatgtacatatcaaaccaatcttcaggacctaaaaaaccttggcactctgataccatgttgtaacgccc

SEQ ID NO: 318180 - DNA, 1109 bp, Cannabis indica
attggatcggatgactttctgcacacccctactagccaccatctcctcctcctcttcctcctccttcttcttcttcttcttcttcttcttcttcttcttctgtaaaatagcataggcaccctaaacacagtataaattgccttctgggttcatttttcaagcttatcaagctttttttgcacatcccctctaagatcccaattaaattttttaggagctatattgacaaatgggtcctgaaaattaaacaagaatcaggatccataaacaagaagataactaaaattacaaacacagtatcattatcattatcatatgcattcattgttattaataatcatatatacctctttattctcagatggtggaggctctgctgcaacagggtctttaaattttggaaggactggaggggcaaccttagcctcttgaagcttcttatcatgaggaacataatttgaaatttcatgttaagattcctgcattaattgaaacaaaagtaaataagaaaaaattgattgaaagagaaatgagttgggaagagatatgaatagtacagttctgacctttctttattggtttcattgtcatcttctgtggtatttaagagctcttgtgaagctttgagggctttcatcctctctcgacgtttggccacaactttgtcgcattcagcccattcgaggttcaacttcttcttctttttcaccttctttcagatctgatattggagttatcggtccctcttcttcttccacttcctccacgactgccgcggtggctctctcgctctccctccgacctggaccttcatcgttgaacaacaaaggtaataatagtaatagtaatgaaggcagtgagtgtcgttttaagaagttggtggtttcgacagtggtgatggtatgcatttgttttgacagtggtagtgatggtgggtagttgtaagggttggtggtggtggaattggtgagttgtggtggatggtgatggtggctttgacggggatggcggctagggaattagggcaatgagagagagacgagaataagagaaagaaattgttaggaaattagggtttttttaaaatttttataattattttttaattt

SEQ ID NO: 318181 - DNA, 956 bp, Cannabis indica
gcaaacatcaagtgagtgactgagtcacctctccttgtcaatttgaaacctttgagaagcccgtgatgctctttctcgagcagcagccttgacaatgtttctgccgccatgatgcatagggcaggggataagtggtcgccttgtcttaagcccctctccggagtgaatttccctgctggtgagccatttagcagcagctttatttcatgaactgaaatacacgccttaatccattccgtgaaggggctattgaagccgatctggtgtagcaccgttaagatgaagtcccaatccaatttatcgtacgccttttccaagtcaagtttgattagcatgaacccgcgtttacccttcctccttctcattgaatgtacaatctcacgggctatcattgtattttcagcaatgtgtctacctttgacaaaagaagcttgattcggggaaataattcttggaagcaaatctcgaagtcttgaggcgatgatcttggaaataatcttatacgccacattgcatagagcaatcgggcgatagtcattaactaggcatggggagtctttgttaaaaagcaccttaaagtgtcaaacatataacaagagataacttatcgttattgatacaatttattatatggagggtctcgcatacattttgattaaataaacaatctatagcaaattgttaactacttataacgcattatatattggtatggtgttagacactcagagttggtcctaggcataggcgggctaggcccgcacttagggcctacttattttagaggcccaaataaaaaaaatacctttttaaaacaaatacatattttttaataatttttaaaaataccatttattaagggactatttttttttttacctatagcccatttcaattcaggaccggccctgtagacactttaagatgtctaatagcactataaaaatttttacttt

SEQ ID NO: 318182 - DNA, 514 bp, Cannabis indica
gccactgcgcatactctacatgaatggaacactcatagcattaaaagagaaatgatgtgcctcgaagtatagaaccgccaaaattctaagcatgcaacttttaaacaagataaatacagttatacccctaaacacatttaaaaattactttttaattaaaaagcactttttatggggtaattattatgcccaaaatttggctattcaccagaagctaacacgtgtactataaaaggaatatgaatcaacttaaagaatataataattaaattgcatttaatttaaataacttgtttcaattaattaaagttaataaaagtactcaaactcgctgattacataagcatatgcaagataagaataataactattaaccgatgtgattgacgagacaatacgcccatctcgagataaattgagtatttaattagagtgcacaagatgagacatcaaggagcttgtagctcattaacccacatatttggggagtaaaagcttgcaactcattgaccca

SEQ ID NO: 318183 - DNA, 1489 bp, Cannabis indica
atattaataataccgactttctttttaatattttgccatttttttttttgaaagaaagcatgtattaattaaataaaatacatgagcactagtaaatctattacaagcatctgtctacaactaaacccctaacgaactaataacagactttgctagtccatggaccacaccattcgcaacacgcgagatgacacgacaagaattaccaccagcagcaactaaaagagaattaatctcctcaataattggtttaaacataataatagaattaagattatttatccaagagctcacaatagaggaatccgtctcaacccacaccacgttgtaccccaatctgaccgcccacaacagacccgtacacataacaaggagctccgccactataacctgaaactccccaacaccacccactgcccatgtcgcccacaccatacccccacccccacggataaccccaccaaacccagcgaaacctctacccggtgtgaccgcactgtcaaccgataacacgaattcactctatcactttcttggttaccttttttttcactaaaaataaaggcagaaaaaaaaaagcaaatttacattggagacattaattataatttaattacaaaaatttggtgggttaatttttacaccatgttagataccattttatatttatttatttttttttctaaatttttagttttagacaatcacatctccacacctgcaaaattatacacccacgatattttagtttattttcaaattgtagttagcttttgtaagagaaatggtttatatttcaaattattatttttatttaaaatagaggttgatagaatagttatgaggggttgtattcaaattataattaatttaaatattattataaaatatattaaataaaactatttcatatctatgtttatttgttatactatatgaaaactagttaatttttattgtaaacttgaaaagtaactgaaaatataactttaaaataactaactagcaatttaaatattttctaattttactaataagttatgtaaatttttttttttgaactttattgtaacttattagtttattaaatagacttgaaagtaacacagatatttttccaaaaagcaaaataaaaaataagtagcgtaaatgtatttaaaataacaaattaatttaatataatctaaaaataaacacataagtttcaaagtaacaaaaaggtatataaaataattggtagataaaaataatagcttattatattatatgacaactcattaattttgaaaataaactttaaagttatctaaatgtattttaaataataaaatagcacaatataacttaaaaatagctaattaattattaagatattcacaaataaagttttaggagtagccaaattgtatctcaaattatataatttctaaattggaataattacataaggcaccattttttgtaaagtatttacatttttacgttcaaa

SEQ ID NO: 318184 - DNA, 566 bp, Cannabis indica
atagactttaaaaaaaaaagataaaaataaaagagtacaatataaaaagggtatagagtataattttctctaaggtaaaactatattggaattacacgtgtcttttatctagaaacataatattacaattacaatttaaaaataaaaaaagtgaaaccctataactaaacattggagataataaaattgtgtttgttgttataatcatcaaagcttgcaatcatcttctccatcatggaaacactataaatcctttttggattgagattaaactccacagcagcaacacccccaaatataaaaatagccatccaagcaacatgaataacagccaagaataggtctgacctaggcgatgctacaacattagtcgattccaacagaatttcaaaatagagtctaaagaagtaaacaccactcgaacaaagacaaacccaaaaaagaacaagtatgttcttcacatcaataaccgttttgtgattgagtatgtattttcctgtgaatttttccatttccataaccttctttctcttcttcagtgtttgttggacataaacaacatggat

SEQ ID NO: 318185 - DNA, 546 bp, Cannabis indica
acgagaaactcttataaaatgtttatattgaaaaatgggattaggattaataatctactcccttgaaaaatcatctttaaataaacctttatattcttaaggatttattttgtaagttagtttcataatttggtgatcattatagtttgtaagcagattgtgtgatttgtaggagtggttttggattagttattttgggaataattcataaaaggaatgactttgtccaattaataatagctgcatgcctaccaaaataattgatctatatacttttccaataaataaaataataattaattgattatataatatatctatttatctatatagagtgatacaccagatctttaatacaacaaaacttacaaaatcttccctagttgtgagtgagactaatattttattcaaattggtggtcgactaatcctactcatacgatcatcaatattataattgaaaagaaaataataataaatgtgaataatatatagatatgtattgtgaataagaaaatgattatttgggcttacattaagttttatt

SEQ ID NO: 318186 - DNA, 675 bp, Cannabis indica
acaacaatttgctccaagagatctgccacaaatagagcaagatttgagcccactctaggctgaattcgttcggtgacatctgagctgtcgaagataaaaggaagagactaagtccatcttgttaaacctacaaactcagcaccctgtttggctgagagtattatagttctcctctttatgtcaacaaactcatcatcgaacctctttacaaaaatttatcagctacctctagctgagcaaggtcctattctagcaatgaggaaggacgaacaagcaaaataacccttgaaggtggaagggcaggaaggttagtcttgtctcttggcaactgggaagaaggagcgttagattgtttttgtggcagaggctaggaacttgaaatctctttgtcggagtgtgtggtccgcctgcctgacgtttgagtttcctgagattctctttctctatgcccaaaagactctaaggcttgcttcttggaagcagttgatgtgtgtctgttgtgaaaattaatattatatgcaagtgcacgcaattgggaacaagtaatataatgataagttgagcatcgtctccatagggattgtaaattaaaataaatgtaaaatcaactaattaacaacttagggtcttttgaaaaagaataaacaaaaaggaatggatgattgatgaaagtaa

SEQ ID NO: 318187 - DNA, 994 bp, Cannabis indica
ggtttatttagccattattttatcttttttattctatataatttaaatcctaactctagatgaaatcatatataaggaataagatgactctcattctcaacttagttttctatctttgtcagacaactgaaaattgagagcctctcttatatagaattcgaaattccttcctacttttcttcattaattttgaacccatagtaacatagtacatgcccactcatattaagttagtactcaattatagcgtggaagattgtgaaggattccaacacttaaaggagatccatgttcagatcttgttaatactctgcaatagaaaggaataagggttagaaatctgaaaatattctactgccaccaatgtaaaattttctagaattttatatgtgtttaattcgttgttttagaaaattcatgtttagggtgttagattatagaatataatcatacatattagtaaatctaaatcctagtaaaacaaattctaacaactggtctcagagccatggtaatgatttactttcataatatggatttaaaatgatgaatgtatgatttggatgtgtttatttgatgattgattgataattacgaaatttttatgaaaaataatttaatttatgatatggaaatattttatttggatattttagaaaaaattaagtaaattatctatttacagaacttaattttaatttaaattgaattagttatgattttttgaaaatttgaaaagaatcagggtggggaatcattcgctgcgcgcgcggacacgagggaaccttggtcaggatacgctttcaaataaagcgtgtctgaggttcctcggtcaagcttgtctgaaacacccccgtgcagaacaggctgcaagcagcctcattcctcgatcaagtcctcctcgtccgtgtgcggacaatatgcaatgtatattgttcgtgccactcattaatttttttttttttttcatttttcatgttttttcattggattt

SEQ ID NO: 318188 - DNA, 1887 bp, Cannabis indica
atttataactgattctgttatagatatttaggtttgaataaaatatctaataacattgagagaatctctcaatcacttaaaaaaaatattgcaaccacctagagagaatctcttaaccactttgagagaatatttcagccacaatatttgtaactaattataaattcaaagttttaaataataattatcttttgaattaattaattaatctaaaaataaacctagtagggctcatcttatttaataggcgcctatcactgtgtcttaatacagtgtttgtggtgccaccattatcttaaccagacaatggtggtgtctttgtccatacaacaatttgtcttttttccaatttatttaaataataaatttgaaaataaattattcattacaaaataaataattactattttgacaattttaaatatatttttctgaacatcattatacaattttatccatttccttgacagtgtttcaaggtggcaattcaggaaccacagacctatattactaatcaccaataaattatattattcattgaatctcatcaaccaaataatgttatttattaattccatgattactctactataaatatggaattgaactcttagtaatcatagaattatatttactgagttttactggagtatctatcgatataatcaattctagtgattagccctcctagtgtcggttcgtaatttattttggtaaaattaccatcttacccttctaattacttatttatcttttagtactgttaatttactagtgaaagtataatttacatctaatctaaatttgtggacaactttttcagctctagaattaactcttaaagggaactaacattcgatctgttaggaaagtcgtgattctataattatagattatgttcccagtcattcacattattagatttccaaaacagaagttgtaagaattatcttctctaagaaactttaacgagtgaatcaaaaaaactaataatatgaacagaagttcatgattactcgggatttaggcatatctactattgatcacccttatgatatgaattaggtattaggtatatatagtaaacgatatatttgattaagacaacttaattacttattggtccatatcatatataatctctattagatataacactttcacttagatattatactacattagcaattcgaatcaagatttgttgcaccaaataaagagcatcaatgaatcgtactagtaactgttgattaaagattttaaaactttaatatgttattaactattttattcattgttaagtgatcttaattcttcgtacaatacaagtcacatcctcatatatgaataaggaattttctgatatttatatgtaaattattcaatatcaaatattaataatgtaacattcaagcttatatgaaaatgtctatctcttatttataaatagaaatatcattacaggcttttcaggttataaaccctaacaatattttctctataaatagtggagtcatttcactgtgaagggaccttttttccaacttttaaaagagttattgtcctgctaaaatatttgtaagctttctcaagatttttaagaaactcacttggtcagacccttgtgatcttaataattatttaagtaatacaactaaaaggggagtaggctattaccattatcatggggtcgaatctctataaattttttgtcttcttattgctttactttattattattctattaattgatcattcaatttaatcgctttgaagactcagcattgtaggctaaaagcgaggtcaaaaatagagaataaaaaagtgagaagaaaaaagaaagaaaggaaggagcgttaaagagagagatggagagagagagagaga

SEQ ID NO: 318189 - DNA, 1735 bp, Cannabis indica
aaatttagtgggtcataagaaaaaatattgtatttttcaaaatcagtaaaaaaaatatatattttaaaagtgaaaaactttttttggactcctaagctaagtggaccttaggtacaggcctagcccgcctatgtctagggtcgggtttggaactgaattacacgaaattttcgtatataaactcatgtttagtttgttttcaatcaggtatgtagtccagcgcgaactatttaaattagtttaaagggttcgggttaaaactcgattacacgaaattttggtacataaattcatgtttgttttacaattattattgttattaggttccaagaaatagtgcctttgaatgctggtaatgtattaggagcagaggacaagggcccagcagagcaatggattggtttgattagagaagctttaaatgacaatgaatttgatcaacaaattaagaatagtaagaagcaaggaaggatgagtttctcagattttctttcattagaaaatgaagaagaagaagaagaagatgctattaaagatgaggttggacccaagtttaggttggctgttagtaaacaaatggtgggaatcttcctatgtgtttgggttagatcagatctttgctcactcatttccaacttgaaagtctcttgtgttggtactggcatcatgggctaccttggcaataaggtatatatacatataatatatatttatataaggtattcattgtgagttttccaaattataaattatttagaattttctaaaaatgtaataatgtgtttgagttattaataattgttatgattattttgtagggttcagtatcaattagtatgagcttaagtgggacaagcttttgttttgtgtgtactcatttgacttctggtgaaaaagaaggagatgaggtcaaaagaaactcagatgtcatggaaattcttaagaagacaaagttttcatctcattcattatcatcatcatcatcttcttctttagaaaaatcatcacctaataccatattagagcatgagtaagtcttcattaaaacttgtttatcttatgattaattctaattaattaattaattattaatcctttttcttttttggttttttcagtaagattatttggctaggtgatttgaattatagacttgtgggtggtagtagtggaaattgtgaaactcatgagctaattcaaaaacatgattggcaaacacttttggagaaagatcaggtaaattttaattttgattaattttatttaagctttgagtttgtaagttgcataaatctaatattttgtttgagtgacataagtacctaatattagcaaaaatgtaattttttttcagtttcatcagtacagactctcttagtgttttaaataaacatgatacatataaggttcagattcaaaatcattaagtttggacggaaacatatagtatgagttacgttcaaatcttcttttgataaattcaaaacgaaatttgtatttatgaaactgaacattacaattttataaatattaaagacttatgccgttaaataaataattagatttaaggtgcatgaattttcatctcaaaactaataaatgataagtgaagtagtctatattcttatatacggctcaatattttttatatttaatctatataagataatataatatcgtttacaaactcaaaattttgagtagttatgtcgtaattattaattttttattaatt

SEQ ID NO: 318190 - DNA, 943 bp, Cannabis indica
gctctattcaactgtgtagtcccatacctacacagccttagaatcatcacacttgaccttccccaggcagtttcggattgcccagcttacccagtattttctcttacggatcacgggactactatcaactagtcttccttgaagtggatctctaatgagatttcggcctcttacactagtgctctgattaaaatgtattatcagatctccagcctctttgttgtggcgatctaactctacctggcaagatcaaagtatgtactcttggtcatccatgcatctcaggattccacgtctttgctgagctaattcatcgtaatcagcagtgcgtgtttcttcaaggatttacagctctactgaggaaatatattgcaattagcagtgagtgattcatcaattagggtggcttggcagatgacctctctaagtttggctaacttgagatcttctcctaagtccatgtggggctcgcgaattcttgatctcatctctcctgcataataccgaggacaaaacctggttgttgttcttaggggtgcctccaaggattcttccttcagttagaggtgcttgtggagggccctcccttggaggcaagggccaattgctcagatccactaggatgtttatgccatcctagccaaccgtattggccaaattcgtggtgtctgctatggcgacaagattgacaacatctgctgcgttcatggaaattctagttgtggctggaacatgaacattgagatttgcattctataggtcttgagggagacccaaagatgcagatggtgtgactggggttcttctcgtcttaaccatggtgtttgatcagataagatatccatgctcccaatgaaagcaccaaactgttgacctcaaaaagtgatcacctgataacggggtcgtatagatctgatgcttgccacgtgttacacaaatagaa

SEQ ID NO: 318191 - DNA, 4299 bp, Cannabis indica
ggtaggaggaccagtggctccacaaataatctgagtccatcgggctgctaaatacactcaactgcacccacagcttgcattgctttccccaccatataagcgtaagtggtggcatcatccgtcgtaatcatcaggtcgtgtctaatcttgggattcaacccatccaaacacttctctttcttactaaattcagttggcactattcctgaggccaacctagcgagtctgtcaaactgtgttgtatactctgtaactgacattttcttcttttgagtcaattgtgtgaactcctttctttttgccttaagaacagcctcaatgtagtattttgcattaaaaaactcttgaaattcttcctaggtaattatggtgatgtctagggtgaaggatactatgtccctccaaactaaggcatcctcctaaaactgaaacattgcacaagccactctatcattgttagtgactcccataaaattcaaagtcctggtaagaatagttagtcattgctcaactttcataatgtctggacctcgtagaaagactacaggtgcttgcttactgaacctttcataaagtggttttattcagttggcaatggaaactggccctacttgcataacaacaacaggagccatctacaccttaggagtaggcattgtaagagcaccctgctatctcaaacgtcaaatctcttcatcttgctcattaatcctagcttgcattttagcaaacctatgttcctaatcctgggcagcctgcggtgggttaacatcaccccgaatgcataccctacctcttgggcctatgcctcagccacaaacattaaaggaaactgaactccctaactaccattggattcgaccgaattaatctggcttctcgtgttctgcctagagtctattctattagaataacctgcaaaaccatgagctagccttgtcagatcgtgatcaaggttaaattttaattactgcttacttaagaaaataaaacatgcacctatttaactatcaggctactaacatgctccctaacaggctttcctcattacttactaatagaacaaactactaaagcataaaaggcttactgaaccgtgagttgagctttcctctgatgaagattgtacatatcctgacgatctttgaaagataacctggcagttgtgataccaaattgtaacaccttaccaaaataggcatgttatcataatttcttaatgttgttcacgcctttgctaatcaaagggtttatgggaaaacgtagattaataaattttttacataatacaggatcccgtctttaaaatttacaattgctttacaaaatatttagttgcaaaagttgtcacttagggattaccaaaataaagcctattgccccaaagatcgaacactcaggtctaatcaaccctgatatgtacaatttttactagctcgagctcactgttgttcagttttagccttgcccttacctatacatgcaaacaatatatgtgagtcaacagactcagtagaaaaacataatcataacataacataaaccagattgtaattaggtgcccatacacctaattataaccctatctcgtgtcccatgcgcactgagtctaaagcgttcctacgacagtactatttaccataatatcagcctatactcggtactctagtcgtgccgatgtgttagcgtcaatcaatactttaccaaacatatatctatcagtattcaatgcaactctatgtacaataaaactaccattgctgatatgttatctaacaagcattcataaacatgaactctaaagatgtattcatatatgcatattgttatactaatcttaccttgatttcaaattcaggtgtgcagatcaacctaagtggaaactgttgtttgacgatttataggcccctaagtcttaacattcataaaaactgattaagtgatacgctaaattactttttagggacttaaaattaaaactagaagtttttccatcgatggatagcgtgacaataccctaaatatcactaaaacacaaaaaattagggttctaaaactactaaaattggtaaactggattcccaaaatgaaaatcggttcctagggttttgccaggggaaacagttatctagttctacaagaatgccataatcgattaatcagttctctataggaaaccctaaaaacttcatcaacaactcaatttaaccccaaatcgaaccaaaccttccaaaatacctaattaagccacaacaaatataatttaagcaataaaaataataataaagcccctaaaatgaaattcactatcaaactttgtctaggctcaagaataacaaccaaaacagatcaaaatcaacataattaaccataaaacaacccaacaaataaaaccctaaacaattagctcgtatagaaatccaaaccctaaaatgaaagcatgaaaccttactttagctgtggaaaacaagaagaagaagattacttaagttagctagatcaattcctcaaatcttaagatgaaaagcctatgattttagactgaaatggaaggaaaatctccctggttgttgccctaagattggtcgagcaaataagaagaaagaaacaaagagtttgctgttgacaatgccaattccgataacttttctagagtttgctattggtgctgaaaaattcgcaggagtagctaccggtgtctaaaaagtcgccggacttgctgccggcactggaaaagtcgtcaaaattagtattgttaccataaaaatcactagaaaaatcacaattttttagttaattctcacacttcaaattacaggtcaggatatttttttttcaaattttgtttcatagcgatatttttttattgttacagtatcattcctgtaaatttttgaaattttttgaatagtttacaatgccaaaaacagagttcttgatattctagtttaccacgtgtgttcaaaaaacttcaaacgtattttcagcactgtgaactattcaaaaattttcaaaatttacagagatgatgttgtaagcataacgaacaccgccatctcgcaaattgcattggcaagtcctaagatgattaagcttttagctaattcactacaagaaagaaggcttttgccggcgcaaatgcgccagtaaacttttgtcgacgcataaatattggtaattattataccgcaaatacttgatcggtaaaacatgttttgtcaacgcatttacgaatttaagtcagcaaaactgttttgcaccgacaattttctttgctagcaaaaagtggcccaccgttgttaattgttggctaaaagattattgaaaacttttatcgacacaattatacgccattgaaagttagtgcgcttttttttggcaagtgaagtgttaccggtattgatgcgtgcgtaatataatttaccgacgtcaaaataaagatttgtgtattaaattaatttaaatatttataaatattaatatattatttgtattattattttttttttattatttttaatattaggagtaaattcaattttaatatttttaaattttatttattattttattatttaaatattttattttattataatactagagaactaagttgtgttttgcgtcagtttgactccacttatatatatttttaattattttaatataatttttttacattatatttaaaaaattatacaaaaataattgattattataataagttattttattatatattggaaaaagtagaataatatgagattcaagcaaaaataacattaagatagaaattttttaaaggtaatgatgatagtatgtgacattacatcttcaaaatgatataaattgattgtcacatatttctatttagtttattcattattatgattgacaataatacaatctatatttttaattaacaaaaatctgcctatatttttaatcaataaaaaaaataatatattcttattaaaataattgtgtcttttaatctatataatgtgttatgtcatacatgttacaatacaatgtatacaattaaaaaataatattgaccagtaaaatattaaaatatctaaattaaaacctaatattagtattaataaaagttataacaggtaaatagctgacactaccaaaattataatttaattttaaaggagtaattaacttcatatattttttttaactttttttttcttaaatttactgtttaaatttctaaagtagttgcagcgctagttagcaatagagatttttatacgattttttagttgcaatttaggttgcagcgct

SEQ ID NO: 318192 - DNA, 3076 bp, Cannabis indica
tgatcacttggtctctttgacagcttattagggttaaagttttccttgttgtccggtatgtgaaggttgtgggagatgataggtgaagaagaggttgtgaagaggggattgttaagtgatggtattgtattgacatagggatttggtattggaagagatggtgaaggggggtaagttgctatgggtatatgatgctggaaagtttggcgaatgtcgggtgtgaaaatgtgagacaaatgcaaggtgttagaagagataggctgttttaatttagcattgctgtgggatgaagcagagcggagtttttagttattcgaagtagccaattggttgcagtgggagggtgaagttgggcaaggctgatgtgaagcatggggtaaaacactgtggtccgtgggggtttgtgggaggttgttacggtctataccagtaggcagtgaagaagatgaatttggtgaatggttaggaggttaaaatgtgagatgtggggtggtagcacggtcatccaaggggggtctatgcattgtggaagttgggccagataagtgatgattagaggtttcaccaacagtgagggaacagggctgaggaaaaggttgtgtaactagctttgggattgttgcagagaaagtggtatgaggcagtcgagttaagaaaggccatgcattccctttagcaaaatcttgacgatatcgatcataaccattggaaggcagttttgctcctttcatccaaggcccatataagaaatcatcatcattcccactatccattctttccataaaagcaatacactttttaaaaggatggccaagccgcccacactcaaaactgaattcaggcaaacgctcatagcggaagtctatccaaaattcatctttaattcttggaaggctgatcatttgtctgcgggggagcggttttgtaaccaaaagtttcactcggatcctcaagaaagggccccatccttcatcaagggagtcttcatggacatcaatatactcaccaattatattcccaagtgctcgagcaagagatttggtcttgctaagaaacggcaatcggtaaatttgaacccaaaaaggagttgagactagatcggtgacagagacattttgcagagcatctggtgagcgtaagattattagatggttttggaaatgccatggttctttgttaaggactctgaatttgtctcctggacagccgaaagttattttaaacatatcatcttgaaattcagttataatggccggatagcgacccttccagtggcccgacatttggttaaaaaaggttggtttgtgtacatgaaagacagtgagaacttttgcaattagaacatggacagtagtagacatagcaacagaggtgtcatcatcagtgaggaccaaagtagacctttcctcatcagttagagaaaggttatgttgcagtgattggcttaggggatccatggcagaaaatgagataaaaggaaagttgttgcagaggaaaaaaaggaaggaaaaagaagagaaggacagaggaaggaagaggcaaacccagaaaaaaattgcagttacatgaagataactgatttggatcaaagggagaatgaggaattggaagttaggatgaaaaaagtttgttaaaaacacataactgctacagacccaaaaacgggcactttatgtttgttaatttattctcgtacttgggttcttgttagtcagcgtaattaaaaaattgtgctggccctatattaatttaatattaataataaaaatatttatgggaacctttttttttaactataaatttcatttaactaaattgactcgacctcaacaatattaacaacatcaaaaaaaaaaatattatatactgaaaaaatatgatcaatatataaagaagatgttctagccataagttgagcaacctgataagcacaccgtttgacaaaacgtaatgaagcatccctaaaagaagataaaagttgtttacaatcctcaacgacaccactaaaagtggatgataaaacattcaaatttttattagcttgtaccaataccaaacaatcatattcgatgacactaacacctagaaaatcacgtttcaaccatgataacactttcttgagagccatggcttcagtcatctctaaaagaacttgcccaatccgtagtcccataatcctagccacgatccgacccttgtgattctgaacatccccaccaaaaccatgccttcccttctcttcaaacaatgaagcatcaatattcaccttgagtttttcataacctggtttagaccatagctcggccccatttgaaagataccaagtatcaaattcaggaaacaaacttctttcttgagtttttctccactgatcaagcgtgatacaagctaaattgacaacgaactccacccgacttttcctacccttcaactagagttaattttgtgcgaactaaatttcccaaaccaacatcactgctcgaacactttattcctcacctagtcctgagaacaaatgaagaaaccagacaccaaacgacccttcatcaaccggaatcatagctaaacctgctacccgccaacaattctgtgtaaaatcacaagcaactagatagtgcaaaattgattcacctgcccattagacacaataaagagacatccacatgtttaagtcttcaactgaacactcgtaggaatacaccaactaactgtcctccatacacaatttttttcttttgggggaagcttttcttgccaaaaattcttccaaaatgccacgacctccccatcgatacttccctcatggtttgcatataataatttaaacacactcttaactgtatactcgccagaagattcaaacccctataccagtaatccttagtaactgaattaaaagggaaataccaagaatattgactgccactttctcatcaaaaaaatctttgacaacacactactacaaaaggccaaattcgcgacggtcttaaaaacgctttttttggggacccgtcgctaaaaaaattatctgagtgtttaaacccgtcgcctatattgtactataggtgacagtttt

SEQ ID NO: 318193 - DNA, 873 bp, Cannabis indica
taatcataaaaactcaaaattttctaataatacccattaagaatgcactcatgtgtatatatataggtcattatcatagttagttaaaaattactaaaaaaattaatagcagtactaatacattactttaatacttttaatatattagagtatattactctgctgacatatagagaactcaaattaaaatcccctccgatcaaataataataataatcataataaacacttgcctgttgcctaaaagcttatgaagtctaagaataagatcaacttcatcggctgtaaattctcctcgtttgatatcgggcttcaaataattcaaccacctcagtctacaactcttcctacatctattcaagcctgcaaaataatttcaaaaaaatcatactcaatatatatatatatatgcacatatataggtataccagtagtattaagaataataagtatatataccagctctaagtggaacaagatgccatttgccttcaccatacttgtctacgcaatctctaagaagatcatcttcttctctggtccatgcgcctttcctgaccgctctcccaccagaggaaccgccctccctttggtccgttactaatactgtcaccatattaatattgctccgcggcataatgtatttattatatatgaactaataataatacagtaacagtattataatatatatatatatataaatgcaaatactgaagctaataataaactagctttacagtagtcctatatatttgcatgcttttcttgatctttatatctattgagcaaagtacaaaagaaaaaaagaaatgaatacgcctatgggtataggtttgaataaaaattatcatatatatatatacttttttt

SEQ ID NO: 318194 - DNA, 909 bp, Cannabis indica
gaaaatgattatcaagacactaaagggagccttctccactaggggtattgataattatatgcaacaatgtaaattgctctccaaccatttgttaagttgtaatttttattttgtctgaagaacttataactttgcagcccataatatggttaagtggacgtttactaagagtgttattggtttagtcaatttgtcttctattccaaatagtattatcggtaatgactatgaagtctaactgttatgttctagcttttctatctataaacttcttattttcaaaaaataatccaaacttaattttttatataaattaaacaaattacttttgtaattataggcgtagttgtaatattattctcaaagtttgaatgctcattcctaatgttaaaattaataaaaaaaaaaattaagcatcttttttaattaataaggttttcagtttctctaatgattttttttttttttttagttaaaataaataaatactattgttctctaaaaaaaaaaaatatattattattgagtatcaataatgtcgaacacctgtcttctaattagttagcaacatcttataattggatagcatatttttttaaaaattattaaattttaagagaaatacaatccatagtatttaacactgagatataatattactattggtatattttaatagcgaatccatttattttactttaataaatattataaaaaattactaactaattataaaataatacctgaaggtaatgttagacactataaatatttcgcaatactcttaaattaatatcgcggtgctaccgtcaaactcctgttacaacctcttagtcaacctccacatccaaaaatacatgtcggaatattttttttcaaatttttttacgggggtgttcgttatgctta

SEQ ID NO: 318195 - DNA, 1887 bp, Cannabis indica
ttaaaatatatgtatatttttaccgggtattacatggacattccaactaagcattttcattgctctcggcggtcttgcccagcaagactcgccgcttcatcatttgaaatttgagaggagaaatcagtacaatttgaaatactcacctcagcgtcaatcatccccgcacctgcaccatggatagcctcagccccgaaaacaaatggctgccccactgtgttaaaatccacaccccctcgccgaaatcgcaccagaccccattgttcttcctttgccattattacgtgcccgattcttaattgaaatttttttcctacttccctgcccacttgatttgcccaacttctcagtctcaccattatgaacattcacaaccccagaagctgaactaattttctgttcacaaacaatttgttttcctttaagcaatgtctgacgttctctctcctcctcagtctcactagcagaccctccatttttccttttctttgcttcatggtgagccccttctgtacccttctcatgaatcgaatccccaagctggccttcatattctggtatagcagccctccttaggtgattaatattgtttgtgtgagactggcccaatgaattgaactgagtagtattcaaaacccccacccgacccatttgattcatatcattaaaccctttctccatttccacctggcatattagctgaattagttccctcccccacgattgaacccttatcacacataactgctccactactcttgacagttacagggagatcttctctcggagccttctccccagcagtttctcttgctggcggtgccacctcaaatcctccatcaaagctattcattgtcgtcatccttccccctcggctttacctgctcgacccaaattgtgcttgctcttgtacttgattttggctaaacgcactaaagcaatgaggtgcaggatcatcgtcacgcaaccattgtccataccgaggaacaagctgtccatcaacagacatttccattgaaacctccttactacaatctctcttttcatgtccccacactccacaggcaaaacaaagtgtaggtaatcgttcaaacttcaactgaatccaatatttccttccaccacacggaatataccttcccacaaaaatactctgatgcagaggaaagccgattttcagtctcacaaaaccattcaaaaacatcctactctcattaatccatcgaatttcctgaatgtctccagccatctcccctaaacgagtcacattagctctagtgaaagctttaatgggtcaacctttcatcttcacccaacaattgaccttgtcaagctaggccatctttccagcaataaaagtccaccattaaaaattcatggttgcttactcagaattcccttagcttcctcttgattcttaaacgttattcccacaaaagaatcatcgtcttcctctactaaaaccttaacttcccaacctccaatacctttccacatacgactaaaaattgttgtaaacagcgattccgtaatttctcgcttagcaatcattatccctaccaaggaatgttcaccaaaagatgaagcagcctcctcattctcctcccaatcctcctcactgttaactcccaccttacttgtcattgatactatatcctccaccgtctcactcagatcccccccacaacctccagtagccatacacaccagtaacaccaacagatcaatcatctcgcagttcaaacactgtagcactaagcagggtccttcagactatcctttttaaattacatctaaaaaaaaaaaataaaattggctataaaacatcactttttgtaatattggatactttcaatagtagttccttggttacatccggctcaagta

SEQ ID NO: 318196 - DNA, 809 bp, Cannabis indica
aagataaaaccttatagattagatttggaaatacaagtttaaaggttggctttttacctcttcggaaggagacaatctggttcagatagatattattttgtcaactaacttgccaaaaaaggactttacagtattaaaactccaaaaaatttcttgctacttaatggttcaatacatgaatttttttgaatctaagagaggacttaggcaatgaaatcctgtatcgttcttcctatttgtgctaggcataaaatatctatctcaaattttgataaaagtttggaaattggacaggattcaagtatcatgatagatgctccatgctaaagttaaatcatctatgcttctgggatgacctcttattgttctatcatggagattatgtctctgttttacttaagctctgggtctaaagttgttctcagccacatttgggttgctgtcgaatgaagcaaatatagaaattttttgtagtggcatggcttaatcagaagttaatcgggtgttagaggtatctgtcctttctcgaagtcatttgtctttcaggtaccttggaattcttatatgcgcaaaaaaaaattcttctactgattgtaatagcattttggaaaaaatgattaagggtgggtttggaaaggcacactgtaattggatttgtgtgtaattagaggtaattacacaatttgacatgttgtctgaccatgtaattatactgtaactgtgtaattggaagtaattgaggggttccaattacactctccaatttgcatagccccccatgagaattgaatgtaattacactgtgtaat

SEQ ID NO: 318197 - DNA, 1771 bp, Cannabis indica
attgtatccccatcaattttgcatttgactttccattatcatagctgttttgacaagttttttttttctactccttatatcccaaaagtaaatttaattttcaatttggttggatgttaagtcgatagaaaattaaaacttttttattctttttagttattttttcttaaaatttactttaacgattgattttttttaaatatatatttatatcaacaatttattcattagctttcaattttataaattctttattattacttttaatatattttattaacattttgagtttaatttttatttcttaaaattttacacaatattttttttttaaaatattacataattatacattctctttggtcaaactattatcattcattcaacaattatcactctatattaagcattatttattttaaaactacatgtgacagttgaaaaaaaaagatcataactaaaacttaaaataaaattaagtatacgtgacttgtcacgtaacatctatctagtataaataggagtagctaaaaagtattattagtagtgtctaacactcttttcagtgtcatactattattagtgtaattaagtatcgaatcacatataacataaaaaaataacatttaaaaaatatcgctaacaaatcatagaattccacgttataaaaaatattaagtaccactatatccaataacaatgctccctatatatatcattaattatattaccaatttagtttgatatattcttgccattgacttatcttgatatcttaacctcacactcacattttatataaagcactaacatgctgattgattggaggtaataaattagaatagaaatgaaataatttttattctatgtctttagttgcgtttcaaagtattagaatataatttcaatgaaataaattttttattattttagcggagaatgacttctattttaaaatgaaaagaaataatgaagattatttgaatacgaaatgaaaaaatttaatatttttttatatattttaaattttattctctttcatttctattcttgttcctattcaaattctcattcttatattttcatttttttgcaaccaaatgctacctaaatacaaaagagaattacatcctaaatacgtgtggaaaaattgtttagtttctgaaaagggtgagacaatgtttaccttaattattgagcacaaataagataatctgaagatggtggcaaatctcagagggagaaaggaaaatggatgctgggaaagaattgaacagaccataaactagctacaaaatacttttgagtgagaaatttttacattggaggagagagaaatagatattaactaacgaggttcaactttcatgtttaatgtatttgtagggatactattttcttgtagtggaagggatataaatttttattcttggtttgaccatctatagatgctccttgtatgtttcactcatgcatgtaacacatctctttgtctactagctttggaagaataatataatcaggtgtttaagtagataattacaatgtatttataagccccattataactttactaatcaaatattgagaatataccatttaggaatcattgatttaggctgatgacagaaaacaacttttctacaaaacctatttttgggcttgatgaaaaattctcaagcatataaaaaaaatgttaattacataaggcactattttttttgtaaaataattacatttttacgtttaaagaatatttttttttacattt

SEQ ID NO: 318198 - DNA, 1364 bp, Cannabis indica
tgattgtccttgacaaaacacaaatcaggagtgaattcaacagtgacattgttgtcacgagtaaatttggaaatactaattaaattttttgttatggctggaacatgaagaatgtttttaagataaagagactttcttgcagcaagagtgctatgaccaatgttatttatagagagtgaggaaccattacctacaacaattttctctttgcctttataggagctttgatgatgaaggttgttgttatcttgggtgacatgatgagaggctccactatcaagaaaccaggattcatctgtgttagaagttgttgcagcaacatgtgcttgagggtggttgggggcagagggtgcatcattgtcatcaggaccattgtaggagatatcaaatcgtctgtaacatttctgaactgtgtgaccaattcgtccacagagttggcatgtagggcgattattgttgtaagaacctcggccaccattgttgtttgatcgaccaccaggagggcctcttcctcgacctcgaaactggtttgtgttgccacggccattagtgttgggagggcctgattggtttcttcgatactgggcataatttgccgtggcaccatttaaatcaatggtggtatgggtttgatttgcttcgatgcgaatttcttggctttggagcataaactggacttcagcaagggtgagattttctcttgaagtcaaattaacaaccactgcttcgtactcggttcccaaaccagcaagaacatagagtattaattgttcatctgaaatttgatttcctgcagctcgaagaccgtctgccagatttttcattttcaacaggtattcatcaatggccagcgatcctttcttggtggattgaagttgattcatgagatgaatttgtcgtgctcgcgatgcagtgccaaacagttgctcaagagtagtccaaatttcagaggaggtagcacaatttaccacatgcccaatcatagattcagatatggttgacattagccaagaaagaagaaattgatcaagacgcatccaacgattgaattcaggattactcaccattgttgtggattctggaggttgacgaatcctagcttgaggccgattttgatttagcagaattccttcaagatcatgtgctcgtattgctggaagcacttgtgatctccaaaaaaaatagttgcttcgatttagtcgtaatggaggaacaaacattgttgtaggaacgattgaatgatgagctgcttcaccggaggaggtcgccatggaagtacaccttcagctctggtaccaagttgagttacaagaaagatgaaaacagagagagaagcaagaagagaaaaggaattctttattcaa

SEQ ID NO: 318199 - DNA, 1074 bp, Cannabis indica
taaatgttgtgtcaaatttgacaaaaaatttgctatgtgccaaatttatatcattttttggcacaccattagagtacactttttgttaaatgagttatattttaacttttcaccacttatttacaaaaatgctcttaaatgagctatattttaaattttcactacttatatttacacttttatatatttttccacactttttaagggagaatctactacacatgtaatgcttatttattttattaaatttctttaactataagatcatttttttttaattaacacggcataaaaaacttttgcagctctctttcactgtttcattaattaagaaatattatattgcttctttctgtgtctgacggagattgttagtgcaatttgagccatttcctacacagtagtcaaattcgttgaaaaatcaaatctgtcgaattaatttttgcttcttattcttttgtttttttctcacttatttgaaactagccactggcccatcttatcaattattgacgagttcataattaagggactctgacaaatgcacacgattttctcttaattaacggttcaagtactaagataaaagagaaatgagagcattactctataattaatattaaagacattaaacatttatgttgcattaaatattaagtaggttagtgaaaagtttgagctgttactgatataaaatccttgaactaactttaactggactggacacaataatatcacaccagaaatgaatgagcttttctaagtctaatctttatgagagtcggactattaagagaatcaagaacagaaaataagagatggctaagttgaacaaaagcttatgtcgagatggtgttgtattgggtatggcttccttgtttgtgatatctgccattattgtatcaaaagggtcttacaaaaacatgtcatggtttaatatctccacaactactactccattgccacagactcatattacaactcctacttacatggtactctacttattattcaggtttgatattaatttatttatttatttcttgattatatatattggtagtcttgactttg

SEQ ID NO: 318200 - DNA, 792 bp, Cannabis indica
aattgccgttagataggcacttttaatatataaagatttaagttttcactaaagaatttatatatatatatattaagaaaaatttacataaaaaatattttacacttttaacgttcatacatatatataatttatataaattttgatgtgattgaaagaaatacgtttaatctttttgtagtgatggctgtaaatgttcttataatatattgctttaatattccataaatatacaaaatacccattgggattatatggagagcattttgaatctttattagtcttctttgtaatatacaagaaatatccaaaaccgtgtacgcggctcaaactttaaatataattgatacaccaaaaataaaaagtgaattcatgtgtctctttcttctagctaagaccgtggtcctttataatccaaaaccagttctttagcacatttatatgggttttagaatctccaattctagccgttgtgtttgaaaatgtctctcattgaccactacaaaattgctagaaaaataatacagaatcccacacacagaaaggcaattcttcacattcacaaaagtagaattttaagatctccactacaacaattttaaggtacaggcacgaccactatagggccgaaaaaaagtcgacccattggaatataagttttaggccgacatcattaaagttgtgggagtaatttgcgatataacttccataagtattttatttattgtaataacccccaattctaaaattttggtggtaaaagctcctaaattcgtgttctattagcagttt

SEQ ID NO: 318201 - DNA, 578 bp, Cannabis indica
aaaaaagtaaaaaaataccgtctgacaatatttttgtaaaaaaataacaaaagttagtatatcatgtaaatttcccatataaaatcaaagtcataattggagatccatctattccctaacaattaagaaaattaactccacatagtgtggtttattatctcaaaatattatttataatcgaaataataactgaaaaataaataagaaagaagaacagttaaaaattcttaaatgcagtttcaaattgctcttttgatctcttaatattttctttcctttaaaattgtatttcttctatttctggaagttggtctgacgctgaagttataatattctttttataggctaaaaaataattaaaaaaaataacgtttgaaaaaaatataaatttcaatagtatacggatagtgctatcgcgcttaagacacgacgttatagcaccaagcgagatttcttgagtttacgaatgtttaaaaattcccttttaatcgttttttttttctactaggtcagctctatagcgcctcataggggtgtgcagaaagtcatccaattcaatcccaaccgaccgatccaat

SEQ ID NO: 318202 - DNA, 1797 bp, Cannabis indica
gaccctaccccccaccccccccccccccccgagaacttttggacttagagaccttctggattgaagggtccacagccggttgctccttagagagattaatgacctcatcaatcggcatcttctccttggatggagtctcactacctctagactttttggttggaggagacaaacccgagctctcccttattctcttcttcagagcctgaatcatcttctgagacatttttgcacggacaaaacaatacagtcagaggaagatatcaaaaatgagaagacataaaaatcatgaaaaataaatgcaagttgaagtactctacacgctgataggagcgttctcccgaacaattacggatggagcatcaccatccgaagagtcttcctgctcctccaggacggcctttccttttccttcgacgaggattgatgaccgagccggcattgcaggttccctaatccagatagtatgtttaatgggcgcttgcttggtcgaaagagttttcttcttcttgcgcaacctctcctgctctgaatattcttgagcctccttctccttctcaaaatattcttgagcatattttttggctccaacaccacccttcaacttagcctcacgcttcaattgaataagctccttctccggctcaactcccttagcctggcccgacctcgatttcttcttcttctccttcacggacttgggtataaaatctgccgagtaaagctagtacttcacaaagttggcctatgtggtcaacaaagtgatattccgagcagcctctggcagttggagaattttttgggccctttccctaagcctcagtgtgaagggaggatggcagtatgcggtgatctgctaaaatcgagtatgagcagtctccatgtcggtcacgaagtaataatcattaacaaaatgccctaatttgctaacctctgtgtccacggtgcctgtcagccacttgtcatctggctaagagaagtagaagtaccccgacctactctgcttgggggtagacttcgaatcaaagagccagttgatatcatgcaaagacggctcagcccatccttgaatagcgtagaggatgagcagggcgaataagtacttgatgcccttgggtgtgaactgagttggacaaagatgttagtagtccgcaacccttttgaagtacaggtgcaaaggcagcatcgccacttgttttgtgtggacacccgaccaggcacaatacccttctttcgggctagttgcccaatgatttggtgtaggaagaaagcactcaagtctgcccagatacccagccttctccaaagtttttaggtggtcctcatttacgatggacggaagacacacccatctagccctcatggcaccttgcctcctatgaaggaccacctcggcatactcttaggtgacatagtcttcccccttgaccaagacatcaccaagttcggataccggctccccagactcattgtatcctccaaaacgtagaagtcgagccactccttcctccttagcctaagaggggctatcaggacggtcgccgttgtagtcctctatctcctggacctcaacatccccctcgtagtcctcctcctctgcagcggacaagtcctgttctacactcggcatcgtggcatgtcgggccacgtgagggttagttgcattaattttctgcatcgtctgttttgtataggccatcatcctcctcttggatgggtattggtgtgtgtgtcgtgcaacagtcatggcaggagcaacaatcagaatgccgaaggcaccagaacttggacggccta

SEQ ID NO: 318203 - DNA, 1309 bp, Cannabis indica
aaagtgttaccaaatggcaccattgtaaataagagtatttctttagctgctgagtttgttttcagcttagttttgtttgtaattacttgtgattaataaagatttatccttgtttcaaaaaaaaaataaagatttatccttcttgataaataattttctaacaacatctaataaaataaatattaattaaataaatatatataaaataaatgccgtatctaccatataccgtgcactattacattaatcttaaattagtgtacaatatgatacctctttggagaagaaaccactctatatatacaacatggagtgtccgttggcctgagcactctaaatattgtttcttccgaaaattagcccgcctcgttgaaagtaacgagttttaaaaaataatgacgacaaatatataataccattttctttaatgacaaaatttggacagacatggaaattttacaaaggtaggaaggtctacagggaaataaatagtacatacatgcatacacacgtaccgtagtgctgcttttattttttttattattcaataaaagaaaaacccagctaaacgccaattctgaattccaccatctaaccatcacaacaactgcccccaaacatcaccaaaaaggcaaaagctcttttttttttttattaaaaactcataacataaataatattctataaaaccaaacaaaatttgaaaagggaacccgtagtccaattattattccaaaaataaaaaaagaagaaagaatagtccaattaagtaacatcaccaaatattttcaggagtcgtggaagcccagtccagcctgactgcctgcccacacgttggcgtacaccaaacgatgccacgtggcattgcattcggcctgatttggttgggctctcctttgctgcctgctgctggtcctcttcccacaattactttgctttctttctttttttgagggtgcaattacttgcttgctttcaccatgcaaagtttcttcttctccttttttttttcttttaattttagtaaaccaaattatatgtatttttgaaacaatgagtaaaccaaatattagttaacatagaaataaataaccatacaaaaaaagaaaacatagaaataaataaaatattgttttaaattatataactatattttgtcgaaataaataatataaaattggtaaccaaatattaaattaactttcctccaaaaacaaaatatatattaaattaacaaaatatcaatattgattaattaaaagctttttccaaccaaataattgaaatagaaaaaggaaaaaaaaataaa

SEQ ID NO: 318204 - DNA, 946 bp, Cannabis indica
tagtcacaagtaacattttgttgtgactaaaaatcacatttagtcacaaaaaaattatgttgtgactaaaaaattgtcactaaaagtacgtagcagttttttgtagtgatagatgagcgaagctacttttcgacggtttaaaaactaagcacaaaaactgacaaaaatatgtattttgtcggcttggaattagcgacaagtgatttttttttttattttctaaaacatgtgttggtcggtttataaccgatgggaatactttatgtgtattcccacatgcataaagtattcccgtcaattataaaccaacaggatagactgaatgtatctaaatcctatttgcgtgcattacaatgggcaaaatctgttgtcgttcaccattggaaatttcaaccgtgtcctcatcctccatccttattgactcaaaccctcaccttgctctcaatttccatttccttttctactcaccctcaacctcaagaatctcggtccacccttgggtgagcctctttgtccgttcatggtccaaaaacggacctcagattagtggtataattttttaccattatttttttatgattttttcgagtctcgttgtatgacaagtgtaagagacaattaatggatcaagatctcctgttaaaaattggtgtctcatactataaaccaatcaaagtttgacacatcagctaattttttatttataaaaatataaaaaaaattaaacttctaataattgagtcaacaaagcagttaacacatttattataaattagattagttgatgtgtcaaactttgactgatttaacacagtatggaacactaatttttaacaagggatcttgattccaattaatgagtcgtaaatgaaaagagccctctgatcgtgtaacacaagagataatttgtatttagatttttattttacaaatttcaaatctaatt

SEQ ID NO: 318205 - DNA, 637 bp, Cannabis indica
tatatataaaaaaaactttgaacataaaatttaaatttttataaaaattggtgttttatgtaagagcattgttattggtgcacaacacttaacgatataatactgaagagggtgttaaacaccaatagaaccttttaacaattctctttatataattatcctagtatttaatttacatttaaagtttttttagttatttattaagatttatgttttggtggactaaaattttatcacttcttttcttctattttttttttttatggaaaattaattctattaactattatctttcgttaataataaaataacaaatcgaacagattctaagaagtatacatatttattaataattaataaatttgattgatgattctatataagaagcatacacatttatttatcattattatataaatttaattaataattttatataagaagtatacatatttattaataattaataaagttaattgataattctatatatgaagtacacacattatttatgagataacttaacgaattcacaagatggattattaggctcaagttatctaataggttttgtagttgcaatttgtacatcaagttaagattttgttatttttaataaatagtaataatatttttc

SEQ ID NO: 318206 - DNA, 3242 bp, Cannabis indica
tggtaaaataattccaacacctgcgttctccaggtttctggttggccaggaaagggcctggcaggattttctatacaagttctcacatggactacgagttgggctgcgaattaggccctagcatcccaattaaacagctacaaaatatctatatttaacggcattttagtcttttataattaactaatttaacatacaaatatcttagggtttacttgtatattaagatttaaactttcctatataaatactttaactctaacctagaaaacttaagtctcattctagcctccaggtaataaagctcaagcctaaatctctaagtttgataactgtcttcctcactctgtctcacacgcccatacaagcattgacaacagttcagatttaccaaccttgatttttactttgtatccttaagggagctatttcagattctacctatagtgatcggaatagtattattcctcggtatcaatacaactaaaaagggagtaggtcattacccgctatctaagggggccgaacctctataaaattttgcgtgttccttacattctaattctaattgtgtaacactgacaaacatcaaattcatacaaccccgctgtcggttgaccagttttcaagatcaacaatttggtgcttttcttgagagcgagtggatatcgtatctgatcaaatgccatggttaacacgagaagaacactaattgcatcatctgcatcttcgggtctccctcaagacccgcagactacagatcctaatgttcatattctagccacaactagaattcctatgaacactatagatgtggtcaatcctatcaccacaagagatggcacaaatctagccactatagctagccaaacatatataaacatcttggtagatctgaatagcatgcccttgcctccaagggaggaccctccattggcgcctcccactgaaggaaggactcaagggtgaaaacccccaagaacaacaactgaatcttgtctccagtactacgctggagagataggaccaggagttggcaaacctatgactggcgagcggcgagccccatgtggacttaggtgaagatcttgagttagccagacttagaggagccattggccaaactcgcctaattgaagaaccacacacttgtcattgtgatgtattctctcaataaagacgcaaattcttgaggtggatggatgaccaagaatacatcctttgatctcactaagcaaagttggattttcgcaaaagagaggccaacaaactgataaggcagttaaaccagagaactaacgaaagaggctaaaatctcatcagagatccactctaaggaagactagtggatagatcagggaaggtctatcgacaagctgaccaacctagttcctcagggactaggagagatcttcccttgcgagagggaggacagaccttgccacaaaggtcgaacagcgagaacaaccatatctcagcaaccagtagcatgggagactagccagggctctcaagctcagcaacaacccccgtcattaagccttttgccagccagccacctccaaaagtccccatggctagctagagaggagcactccctccccgaggggagtgaggcacctagaggtcaatcttcaaccggtaaggatcgagagcaggtagaacaccaaaaatgacaatttgagaagtgaaactgaccacttcaaacatctagatccaccaaactccaaaaactggtccaatctaccttctgtcaacacaccacaaacatcattcagcctaggagtcatgggtggcgaaactctaccctatgtaggtctggccagccatggaggagttacgagtggtcagaccctatccaatataggtctggccgaccatggataacttgctagtgtatgcctaaccagccagagccaacacccttacctaggagtggcggaccagggtctgtaatacaatataagtctggccgaccttcaccatatactctctcagggtatggccagccagatcctattgcaacagaatctggaacccctccaaggagggctagttagtcaagttcctacagcaacagatccatctgtgcaagcatagttggaccaattaaggtacatgattcagagcataataagtctaaaaccttcagatctcaggctagatcgatcaaggggatcaccattctcaacaaacataaatgccttgccctttcccaagttcaagatgctagtatggaagatgtatactagacgagaagacccactggctcacactaaatatttcgagatgcagctcgatctttaaaaggttactagtgatgtgttaagtcatatattcccagcaactttgtcggaaacacctcaataattgtacttcaaactgaccccaagacggttcaattcttgggccgacttctctcaagaattttacacacaattcttgtcctcgaggcttgtaccattgtagctagaaggtcttgtcaaagtcaagcaacaataaggagagcctttgaaggattacatctagaggttcatggctgaagccacaaatttcgaaggccttacagaagaaggccgaaatacaacctgttgtaattattttaccaggatcttagatttactaacaagtatattattaacatcctaaatatgaacttctaacacgatatgaaatgaacacatataaagtataagaaaccttacattggttgcagcggaatataatgtctccttccactaatatctctaacccttgtatcctttctgtagcagagtatcaccaagatcttagtccaaatctccttctcttgaaactggattcttcacagccttacacactatgattgagtaatacttgatgtgtgtgggcactaactctttcactataggctcggtttagaagagaggaaaagagagagagtatggtttaggctagggttagggaggaggctcaaacttttatctgaaggaatgagatccatcatcttttcccttaagccatcactacctatttttaggaaaccacctagggttaggttagatttatttggcattaaaataatgaaaaaattaaatggtaaattcctatagagtggccgaccatgggttggatattgggccccactttgaaattttgccattttctcattttctcatcttattttctcaaaaatgtaaattttccaatttaaccacttaaatgtcaattcaattatttaatactaaaattaattattaaat

SEQ ID NO: 318207 - DNA, 1011 bp, Cannabis indica
gttacaatctccaataacgattgattaatcaatgggagaaaattattgatctcttttatcgactgaagttgaacaaccaagagaaacatatattgatattcagaaaatggggagagaagagtgagagaataatctgttttttgagtgttgaatttgaaacatttatggggtttgtgcagtggttctgatgatctgtgtgacaagagtagctaaagctgcactggataaagccttggctgaaaatgaggacattgacagcattttagagtcacctgaagacttgcccatttcagctgaacctaatactgatctcaaccagcctctcttgataaagatagatcactctgaagaaaaacttgggaattgaatatattatttacttttctgtaaatacttgcctgcctttatttagagggccatgattaacatatacttcattttgtgaatcttattaatattgtacagatcttaatgtttagaattatagttttgaatgatattaattagttttacagttaaacatattatacttgtatcagcaaagaatggttatacacatttactttgctatggaagaaatttgaattcttctactgaaaactacttttgaaacagcaaataccaaatacaaatacaatactggacataagtagacttaagttatttaagattaatttagttactgtagaagccatttagagaaaaagatgaatgaaaatgtcaaatattaaaattagggaggtatgataccatcagccattagactaagtatgaccatgattgaaatttagagttaataggtgctaactagattaaagtgagcaaatcatacatataatttatgatggcttgacgattacattcaagttattatgaatttaataatagtgataataattcatttggctaattaggatttttgctctcctaactttgacatgtgtcaaatcatgtcccttgaatttttttagtcgttaaaaattttccctagtaaggaaagtctaatatgga

SEQ ID NO: 318208 - DNA, 1213 bp, Cannabis indica
ctacctatatatatatatagttctcttcaaatatatagttaggtattccatcaattaaataatcttataacgatagtttcctcaaatgtgtcacctcaaatgagtacacattaattggtacatattatattactatattatcattttttttctaatatatatataaataacacacttaggatctcaaaattaatagaaaaaaaaataattaatatgtaaataaaatataataaatattatttagtgtaattgtaaagagtgatcaattaattcttaccttttatttttgtattttttttaaagaaaatatttaaagtgtagttacaaatggatttgacttttaagagttttaaaaacctttaccaattaaatttaaatagggaccccaaaatttaattttggttaaggtcccatatactttggtttgctttgtgtggatgtgtggagagaatggcttagttgatcatcgatcttcttctaacaaatatagtgcaaatatatatacttatctatatatatatatatgtccccaaaaatgcaaaatgatgtgttaattcaaagggaaaaaacaaaagaaaaagatgttagctatagttacatttggtagaagattagatgaattttagaaccccttttatgggagagcgtctagctatgactcgacaaaaaagaaaaggaattaggcccattaatctagttgagtaaaagggggactagctagctatatttatatatatttgaaaagagacctttctagctagtttctgcattgatgataaaagttggaacaaattttgtctcgtacacaactccccttctggccttgactgtccttttcctgagcaagttgaataattagaaggaaaacccaataaaaatccaaccatatacctaaaagccccatctctaataacccaactaaacccattcttcttctactcttctactactactaatattaactagtggaacaaaattaccactaatatatttatatatatagtaataattataacacgtactgttgggtttctaattatatatatagccgccggatgctatggttaaacctatgtagatcgttgttgacaactaatagtaagatcaatagatcatagctaagagattccaaagttatttgttatacttttgaaaaatacaaataattttagttttattaaatttacctacatatttattctatgataataat

SEQ ID NO: 318209 - DNA, 792 bp, Cannabis indica
tactatttcagtgattgtttatgtattaaacaatgctccccagactttgatatctaacaaatcatgtccctcgaactttgacatgtactaaaccatgccccttgaattttcatccatgttaaattttttttactaaaattggacaaaagtccttaaattcaacaatcttaatagttcaggggacatttttaatgacattaaaagttgaggggcatgatttgatacatgtcaaagttcagtgaacaaaaatcttaattagccatagtagatcactaatttcatacccttaacatattttgtagtgaatgttaatatttgattattagttacatatgacagatggaaattggaaaattgataagagaattgaatatacaagtgtgttctttaagaaattaaaattaaaggcatcgatctattattaacaaaaagagaaaggggacagtgtgtacttaaaacaagacaacatttttcgttttgttttaaaatattttcaaactatgcataattatataattggtagatactaattacacatatatatttatatagcgacatatataatattattaatatcattcatattcatggaaggttttttttatgtatttattttgaaatgagatctacatcatccaaagtttataaatttatgttttgacaatatataaataattaaaatatatgcataaaactttagatgatgtagatcgattttattcatataaaatctttgaaataattcaaatttttattcatattcatggaaggttttttttttttttttttttt

SEQ ID NO: 318210 - DNA, 1024 bp, Cannabis indica
tttttgtaattgaattggattggatcgattgggttcaattgtattggattgaatgttgtccacccctatgtatatagattggagagcgtcagataaagaaaagaaaagaagtgaaataggaacgggaggagaagaggttgctacctcacaaactaaataccaaataacatcggtaatttaaatacttaaatgttggacaatatttctataataaagtttagatttaggtcaccatgcgtaaaattttcataaaaaatgacatgtgaataatgacttgacatttaattgtcaggtacttgcagagtttcaaaaatataacttaagtattaatactgctaaaaattaaacttaattattattatttataattttaaatttaagtatttatgtcgcaaattattctttttttttactgtcctttcttttgaattttttagtttgataatgccacgttggttgcacgagagattaatcataaatagagagattattagttaggattgaatattttgatcgggtttgacccgaacccagccaacccgtctggatccgacccagtcaacccataaaattaaaaaaaaaatcgttctatttgggcgggtcgggtccaacccagtacactttcggacgagtttgcgggttgattttttatggtcaccaagtttcgagttgaacccgaacccgcccgccaacccgatcactttttatttttttatttttattacatatataatacattaaaaattaaaaaaaaaatcttaaaatctaatcattttatttttataactgtaatcttagctcttattttcctactatctggccaaatattattcattacatttacaaatatatttatatatattatatttatgcatgtgatgtaaaatacatataattagttaaaaaatttatttgattataacaaaataatatacataatgaattagtaggtcccgatcgaaataaacatgaatcttcttaatttctctacatatatatatttacataaaaaaattaatttcaa

SEQ ID NO: 318211 - DNA, 1309 bp, Cannabis indica
gaagtcattcgaaaaaattattcattaattaaattatgactaaaaaatattataattttattttattttggtattttaaatgcatattaaaaatttatactagctagagcatagaataaattcaaaggttagttttgatttcagtttaagggtattgttgtattctcataaatatattgttagaaaagttagtagaataaggtaataattagtgatatgttatgtaattgcatcaaactataacataataaaagaaatgttaatatgacatatcattattggtacttataattaagtattcatataataatataataattattattgaatattactcactattctttaaaccttcaccttcagtttcggattcaaaatgattttgttgtgtaggctttattattgtaaaaatgtttatgtttatttttttttttaaaaaaaaagaattataattacattttgtaattttttttaaaattgactaggacttaactgtaataaaaaatagctacgaggctttttgactattttcagtgtatgatattaaataaaaagaaaaaaaaataatttttacgtgcaattttttttcaagccaatttcaggctaagagtatgtttagattgtttgagccttttttattattttttaggagattaaatattctaattcttttttaaaaaaatacaaaatatttaaataactttacgctttcatataaaaaaattaaaagtaaaagtatctaatctaaatataaaaaataaatgtacataaagatattcattcatatatatccatatttgatatttgtgaggaatagcatagaaaaaactaaaacgtggtcactactcactactagtttagtagtataccgacagcagcaataaaatataaaataaatatatataattaaatatttcttatacaataaataatgtggtccaatttagtactggtcctcacctggcaaccgtccaatctcaatcgtacggctacaaattgtccacaaacaaaatacaaacaagcattcctccaaaacaaaacaaaaacaatttgtggccccttcctacatttaatcatttaacagattttaatcatacttatttaattaccaaatttttatcaataaattctaatcgcacctactatttatttaattatcaaatttttattatagagttaaaaatgcttttatatgtgcaatataaagttcacaaatcatagagttaagaaacatgtacacactatattctaatttttataattttacaaaaaaaaaaaaattatatacaatgcatagaaaaaaaaaatt

SEQ ID NO: 318212 - DNA, 1527 bp, Cannabis indica
ttataccaaaaatgtcataaggtttcttaataaaaaaaaaaacttctcatattattttgaaaaaaataaattaaaaattattatagttaaaatttaataaattttattactcaattattcttaatttatttcatatatataattttaattttttttagtagttttattatattaatagcacgtttactgtaattgaaatcagaataatcaatggaagaaataaatcgggttaaaatataaaataatcagaaacaatattttattttgttgtttattaaactgaccagaaatattttgtttacataattagaaaaggtaatcggaataacttaatttcactaaattactattactagaaatattttttatttatatatttttttcaagagaaaaagaaactttaaaagttatctttatgatatatattatatttttttggttgtgaagcagctttcttataatatacaaagattctaagagagaaatttagttgcagaaattatgagtgagtaaaagaaaattgttctacacttctatgaggaagacaaagagagacacttggaaaaaaactatttctttttaattttcactttgaaaaaataaatagcaaacttacttcacaaattctttctttttttccattttatataatatatattttcaaatatttttaaaacatattgaaagaactaattttttattagtattgtcaattattttatcgttctaattagtgataaaaatttgattcgcgagaatgggtacccgcgaagataggtacccataggtacccatcttaaatgggatgggaattacctacttttatgggtaatggggcaggatgaggtataattttatatatccaaagcgagtttggggcagggtcggaggtgatactacctatcccatattcaacccagatatatagtttctaaactttccaagagatgtcagcctcattctcggcctaccactgagctctacagaaacaggtgactgctggtactggactggtgaagcaaatggcagcttcagtgttagcagcgcctacttgctgctagaaaaggaaaaagcacatcaacatgcagcaaataattttgggttttggaaagatctatggcaactgaagatactgccaaaagttaaaaacatgttgtggcgagccttgacaaattgtctccctacctgtctaaaccttgtcacaaaacatgtaaacatttctaccctctgccctatgtgtccttcccaacctgaaaacactacccatgcttttattaattgctctttggctgctgcttgttggcaccagcttggtgtgctttgtccaaatcccttcgccacctttaattcttggctcaaacatttattttcatctgctgccaccgaagatgtgtgcaaaatagccctggtctgttgggcgttatggaaagctcgtaacaaaaaagtttggaaaaatcaaaccccctctttgaatgaggttatggtatcagcaattacttctcttgatcattggagaaaagctcaaga

SEQ ID NO: 318213 - DNA, 1210 bp, Cannabis indica
aaataaataagcttaagaaagaagtaaattaaagtagaacataccaagctttttacgtggttcgagtattaatgaactctagtccacgagttaatattattgagctagaaaatattcacattatttcttacgaatgtttgtgccctagttgaagaaccctaatactaagtgctttttccaagaattctattttccaccatttgtatgaagggataatgatatatttatagggaataactgggtatgggcatactcgaacccggtaggattttttgggatcaactaggtcctctgatggggaaaaatacaataattattgactttgggccacttgagtgaggcctaaattcatgaggtcaggcttgtccgtacaagcagaggtacgttcggagatgccaatttttgtgcgcagtcgaatctgtaaggagaatgttatatgaaatactgactataggctactctgtaaaaaaataaaaataaaatttttatttcaatatgccaaaataaactaataggtttattggcatataggatggtaggctatataaaaatactattgttatgtaaatacaaacgttatagtttatttttgtcagtttattgtggtagtgatgttagtaggctataggatggtaggctcatgtttgaagcttttggtcgtgggattattatttgaagtgataagaagaacaataaagatgaagcatcgatgatgataatgacaattctgtaattgtctatcacaatgaaaaatgtaaagttgctttttgtttcaaatttttgatcaccttgttgtgtaaactatttggttgatttgtcgcttcttgattgttgtaatttctggttcacgattgatgcttgtggtatagttcttccaaataaaaaggtctccaaaaagttatgcctagaaagttatttgtttttcaaaattatgttcctggaaaactaacttattcatctggaagaagtctcgcagaatgatggttgccatctggaagggagttcctgaatgaccatcatggccactccgagtctagttctcgggaaagctagccttcctctagaaaggaatttcgaatggctagttaatcctcctgaaagggagtcccggatagtcgactctagctgactctttcctatttggaagctccttcggaagccctcatacatggtcccagatgaactcttacttatgctaacatggagatct

SEQ ID NO: 318214 - DNA, 1375 bp, Cannabis indica
aaatagtgaaaatcagagagcttcgtttgacaaaactgaatataatttcgtattttgataagtttataagtagaactggacttggagatcaacatgaaaattgtagttctcattctcaacttcttgtaacattttgaatcatctaattttgtgttgtattgaaagagttatggccaaagtaccgatttgagcacgcgacagaaattgcctaggaaccataggggcatcaaattttcatcctatcacggtctcactgcgaccagcctttcccttcgtcgtggcgagtgagtcatggttgcagcaagatatttgttccttgtagcgaagctacgatccgttttcgggtttttgctccaggcactcttatagtggcaagagcacaatttttgaatttagtttttaatttgatcaaaggaattttcacagatatgtaaatagaaattttagggttcatctttagagacttttagaatgtgtttctaggaaaagtggagaagatgaagattacatcactaattattcatcattctagttctttttttctccttattctgtttaattttcaattatgattatagttgtgattatggtatcgtttctttttagttgaggaagccctaaaacatgaattcttgattagtgatcataaatgttattcttaatttctctcacattatattattttttatttttctataatgctatgaatattatgaatttttattaagtatatgttgcgaaaattaagctatgtaagtgcacacaatcgcaatttgctgtaaatcttggtaagaccaattaagtatcgtctaacaataattgattatcaattatcaattacaaaccaacgaatcttttatttctatttgattaaataaattttaggatttttaggaagaaaaataactatagaaaaacaataaaaaaaaatcaagaaaatagcaatgagaaacttaattatgataattatgatcatcaactattctatctttcaataccttatgcaatttacctagattcttctttttcctaatcaattgacaagttgataaaagtagtttataatctggtgaaggtgaagatatataaactcaaattatgtaaaaacttcttatatttctatgacaaagtttaatcacatgaaaagtaataaataaaacaactcatgataaaaatcatacaatcaacctatataattttgttctaaattaaattgcattgataacaatcatagcataatcaaattatatatttttttttgaaattttaattcgaaatcattaacaacaagaataaatagctaataataattggtaaattaatatagattgcatggaattgaaaagaagatgaagaagaaatttaaaaactaaat

SEQ ID NO: 318215 - DNA, 626 bp, Cannabis indica
aaacataagggggtttagccgcaaatttctcaagataaaatatagagattctagcaaaattatgagccaacatattgacggattgtttaacaaaataaataaaaatatttttcaaaatattaagtaaagtcttacaatcattaattacttgatcaaacataaaaatcacaacaatagagctacgcaaggcttataccacggaaagacaatccgttttaaaaactacttgtggccaatgacgctcttttatctaacttaacgcttctcggattgccatagcttcagcaacttctagggaaaccgagccttgaaagcatttggtgcaacctttaattagtaagtcacttgcatcacgggtcacaaaaccaacaccatactgttgagcctcattaaacaaatattaggggaacattcggagataaaaattgttctcgttctcgttcctgtcccattccccattcaagcaagtaatccctatcttattaggggcgaaacccatttattattagaaacaaaagaaattattaataaaaaaagatgattgtatcaaaattaaaatattatgtagatgttaataattaatatatataatattatttaaactaaaatgaatttttttttttttt

SEQ ID NO: 318216 - DNA, 2616 bp, Cannabis indica
tactaacatgcttcctaacaagcttttcttaaatcatattattaaaataaactactaaagcaatacaaccttattgaaccgtggaacgagctgatcgctgatgatgattgtacatgtcgtgacgatctccgaaagacaacctggcagctctaataccaaattgtaacaccctaactattttaggcatgttagcgtgattttaaacttactgtgcagctcgttgctaatcaacgaggttatcgaaaatcgtgattaattaaaatttgcctaatttaattaaaaacataaaatagcgtactaataagattctaagatcccgtttacaaaaatgtttacaaaattttaactatacgtatacaaaagtctgtcgcctagcgactatacaacaaaagccctaatgtcccaaagatcatacgctccggccgaactgccccgacatgtacaatctccatctgcttgctctcacggttgctcaaccttagccttgcccttacctacacatggaaatagcaactgtgagtcaacagactcagtaagaaaaacataaacaataacatagcaataactcagattatgatcatacgcccatacccctaaccataaccctatccccgtgtccaacacggtgctgagtctagaacgttcataagacagtactattgactataatatcagcctatactcagtacgctagtcatactctagtcgtattgatgtgatactgtcaagtagtacggtactatcgaccataatatcagcctatactcagtacactagtcgtactctaggcgtaccgatgtgatactatcggatagtacataagccaacatacatttctaatgtaatctaacaggcttaactaacatgcccactaaacatgtaaatacatatgcatatcattatattaatcttacctcatttccaaattcaggtgtgctggccaacctgagtggtacaactactcggcgaattataggcccctatatcacatcattcaaaacattgataagtgacacgctaaatcactttccagggacgtaaacttgaaactaaatgtttccctatcgataaataacatgtcaataccccaaatatcacaaaaacaggaaaaactagggttcccaaaactgccccaaccggtagaccagttctccaacggaattccaattctttggggtttcctggggaccaactgaaattccagttctatggggtttcctagagaccaaccggaattctggttcctataggtcccactgaactggtcaaccggttcagtgcgggaaaacttcaaaaattcctaactcactcaaatcaaccttaaatcaaaccaaaccttccagacctactatttagaccataaagagcatatcccaagcaatagaacaacatagcatgctctaaaacaaaaatctccattaaagagccaagctcgagttctaaaactcacagcttgctcaatcaatactacagctactcaaaccagctcaaaataacatatctaaccataattcaatctcagaaaacaataacaaacaacaacagcaactatagtaccttagaacccaaatcatgcacaatccaatttcttaaagttcaagagttttaaaagctttacctttgttcacaacactctataatttgctaaaaaaatcacaagatttgaagagaaaaatccaaaccctagatgctctagggaattcgagagagagagagagagcttcttctttattttttttttctaattttgtttctttgtaaaagtagtataaataacatgagttttattaacttaaaatcaatcatatattcaacatattaatcccaataaagtccactaaaggacaaaaagctaatgaggcaaaatgaccattttgcccttcccataactaactagtcataaaaataacttacggatatttttgtcaattctaaaatctcaactattcccgatatttctaatgtctaactatattgccccgctatactaaaaatactaagatgtgattttaatagccaaacactgcgttccgatattgccgggcaccaaacatgcagaattatgaaattccatatatgacatataaaatgcattctgaattcaaataaaccaccgtaaactaataattcataactaacatgcaagtttcataattaaaccctaattatctactaatttccaaattaaagttaagcggactttacattacatatcattgatgacaaaatccttgatattgtgaaattactctctatatgtttactcctctagggacactggattctttactttttggcaactacttttgtgttagttaggaagtaacacttgtagttaataaattattggtacaacgccaaaaactgtatagaactttccataggctgaataagtatctttcctacaacttttacattcagtctcactggtagagttagagactcaaaattagtttttacacttctctgaaatcactactccacccccagagtaatcattatctcatcagtagactttccagcatcaaggcaagtctagaaacctgattggtgtagtctaagagtattaaaataccacccttatcgcctaacctatagttcctcttattgatctta

SEQ ID NO: 318217 - DNA, 738 bp, Cannabis indica
ggtaaaataattccaacagttaaccggtttgcaccaggtttccccaaacaattctaaacctgctaaaaacatgtccaaatcccaccaaactttccagaacacctataatgaccttccacaatatattccaatcaacagaaactagaaaaacacacaaaatcaaaacatgccatggatgacccaaacttgagttttcaaactcaaacttgtacagccatcaccgcacaaccctaaaccagctgctagaacatcaaacaaactaaaattatgcttaaaaactggattacaaacgtttctaaccctaacagccactaaaactcaaaattgcataaacaagctaattttcaagttaagaactaaagggctatggtactagggcttacctcccccttggaaatacttgaatacttgctgaattccaaaaaaacaaggtgaaatttggctggttcctcttggctttgatggtggtcgagcaaaaagaaagagaaatgggagtgactttctctaatttgtgtttttcttttaattcctttatttcaaaatgataaatcccaattaaattagtttaggctcaaagaaaaagaggctaggtgtcacctatatacccagccacatgtcccacatggcaaattaccaagatacccttgctacttaacttaagcaaattcaagcctaggggtaagatagtcaaaaaccataaccccgctcaaactcagtattctatttatctccaatatt

SEQ ID NO: 318218 - DNA, 839 bp, Cannabis indica
aatggtcaccccttaatgcaaaggaagcaatacgaaagactaaaacaagtccaacaaaagcagaggagcaccaccatcttccgacgagaaaagtccactctcattctcccgaagtggttctgaacggtgaaggtgttgggacaagggatgcacatccctttgggtaaaacttgaattcccccatctacatcaacaacactctgaaagctaactaaaaaccaatgtgcattagaggtaggacgcctgaataaaaacccacgagcacccattgagatctaaaggaaaaaaaaaggaagaaagacacaactccaaagcccaagttcacacctgaaaagggcaacacaaaacgacatctccaaaattgaaaggaagagagctaagataaacccaccaccatcgccaccctgcaacccacgaaacagagccatttgcgacccccaaccagaggtatgaggcctcttaacaaagatgcccgaccactcacctgaaaaaacaagcaccatggatctgaccctaaagaatgaggtttgatgccttcaacacctacaaccgccaagacctgccagaggaacctccctctttgctcaaaaaggatagaaagcaaagctcccggggcccaccagcccagatctgaccggcggcgcccaaaggagtagaagaaccctaaaatagacttaaagataaaagggaaagaaaccctaatctgagagagagaaaaacgagtttggttttgcttcttttctttttaaccagaggataattgcttctaacccacctaatttttaatttaggtaattaataagcgataattacataatacattattttttttaaaaaaa

SEQ ID NO: 318219 - DNA, 919 bp, Cannabis indica
gcctcctcctcactccttgctccagattctacactcaattctctggtaattggctttcggatcgctcttcgcttcttcgccagggaagagagtaagagagaacacgcacgcccttttagggtttatttttattttttttttttgttatgaatgtaatactaaaagttgatgtaaacatattatattattttttttgtcaaatagtataatttttatatttctagtaaatgatctagttgattatattctttttaataataatattaaggggaattaccctatatactattttttaacttttttttaaatttacggtttgggtttctaaagtagttacagcgctagttgcactaggtttctatacgatgttttgtttcaatttaagttgcagcgttagttgcaataggtgtttctatgtagaattctgtaaaaatacaaaaaagaaattgtttttatgtgtaaaaatgaataaatccctaataataataataatgttgaaattaataatgtagagttttaatgaaaatttggcattttaaatgggtagcaaaatttaagtagtggagacatgaagaaatttaaaattagtgattactaatttttttttttgtcctagatgaggaaacgtaagttgacagaatttataaatgaaaattgaaaattgaaaattgtattaaaataccattctaaataagcatccaacctattatatattaaattataaatgtaaaaaaattacaattgatgtgctgatgtgaagaattaaattaactgaaaatttaatcaataattaattaacaatgataaaattaataatcataaataataattagagataaaataagaatgaacagagtaatcaaaactagaaacaatcaaaataataaaataataaaatcaataccaaaatatatacttg

SEQ ID NO: 318220 - DNA, 1799 bp, Cannabis indica
ggttacggttataaccgccaacttattggccaaaccgtaaccgaccgccagttacagcagtgtggtcagttttttttaaacggtttcggttatgatgtggcgccattttctcggttttttaacagtccgtttactagtcggtgtcggttttgcggtttgaatgttcacccctaggttccatacggttgccaacaatagtttgttttgctggcactgatggaagcaaaattgttggcatttgtagtggaggcactacaaggggaccctactatcttagcctctaatttttcatcttgttagtggatttgggcttacatttctgcaagcctttgctcccaatcatgagtagcttgtggtagatttttatgtccacctccttgaaaccttccacagcctctgccgcgtccacaagggtttggaggattttgaccttcctgatcgcccccaatctcaaccatgttaccatgacttcttatgtttcactgagcatccatactattggacttagcctgcgaacccataaatcaggtaggtcagacaacgatcatatatgttctaagtaccacacttatagattttaaggcaatgcatttaaataaataattataaaactattatgcttcctaatcacataacttactaaacaagttaaggcttactaaacactgagtcgagctttcctctaacgatgattgtacatgttttgacagtcttcggtagacaacctggtggctctgatactaaaattgtaatgccctaatgattaggcacgctacagtgactttttaattatagtgcacaccttttaaaatcaaagggttttatcaaaaattgtgataatttaaacttttgaaaatattatactttataatcgtaattatatatacttttacaaaagagttcggatcccatttttaaacttatttaaacaaccaaaatgaactttataaacatgtggcacaacgactataaaaagaaacccaagtcatctcgagactgaactctccaggtcattccgtctgaacatgtacaatcatccccgagctctggactcattgctgctaatccttagcctttcctttacctacacatacaagcaataactgtgagtcaacacactcaataagaatagcatataacatacaatatattactaacttatatttaggcatccatacacctatcccaaggcctaacaaatgattaagaacattcttaacgaaggtacgatctctgtaccacatgcactacgtaccactactgtactagtgttggtaggatttgaactgtaccccgagtaccattaagtttgtcccacatgcactatgtacccaattgtattagtgttggtaacactagattgtactcttaaacatcatgtgttataccacatgcactaagtaccactaccgtactagtgttggtagcatatgaatcaaataacaacatgcatataacatacatacacatatacatatatatatattctatgctagtcttatctcgctttcaaattcaagcgtgccaatcgacctgaatggaaaatctcgcactgaacggaggccctatatcacaatcacgtaaaatgggtaaacaactttctaaacctttttagggatctaaatcgaaactaaaagttttcctatcaatctattagtatggaaaagccttaaatatcaaggaaacacaacaaaatcaactaatctgagaaactacctaaaaaatagcataccatttttcttggtctttcctagtaaaaacggtagaccgtttatgcagaaattgttggaaattatttt

SEQ ID NO: 318221 - DNA, 1943 bp, Cannabis indica
ataatatttataacaatattatttttgtttttacttttaagcccattttgtttggaattagctacttcctgtttactcagcaaatgactaatcttttttcaaaagaattcaatattaagataagtttttgttttttccttacaataaattggtcttttaaaaaaaatcaatcatgagatcttttagaccgtgtaaattcttttgaaacttatttaaacactttttaaataaactatatatatatatatatttttttttttgaaatgaaataaactatatttaagcatttataatgacttatgagatatatttcattggattaagaaaaatcagatataataataacactacagataagttctaattttcatcataaaattatgccagatattttttaatattaaaattatcattaaatatatatgattctagctagtagttaattcacttcttttcatttatttttttgttaaatgtttctcttggtaggacgaaaaggcattgagggtgttttttttttcttctagatctttcacattgtaagttaattataattttaacatttgtattcacttgagcatgcctttagattgataatgaatttttttaaataaaaaaaactcttctctacttattgaataattatgtaattatatttttattattttaatatttatctacgtgcctaataaaaaatatatatttataacaatataatataattgactatatttagtttttcttccgttagtattgaccacacttacaaaactaaataatctacatttttcgagaggattaaaatttgattaacaaataagttattatatattaagattaaaataaacatcctcgatcgtgaagtaaaggctcatgaaaatgttccaattggggtaatatattttgaaaaatcaaagtaacgtaataaaaacagaaatatatatgtatgtctatatatatatatatgaaaaaacactataaggaatgtttgaataaaatgtcaacaacaactacactcgaaatctgtgacccatcactagtactgtactgctcctatagataatgaaacattataatttacatttcaaaaaaaaatatatattaattaaggaaaaataaatgtagatagcattatttctccataatattttttgagcccatatatagtttagttgttagctatttatttataatttactttagaagagactcaaattatttatatataagaagtccaacacatgcataaattaattacactatgccctatacatatatattaattaattaattaattaggcaaatatattggtctgtataatattataatatatttataaatacgtgtgattggaaaacaaaggaaatcagagacaaagggtccacaaattatacccttgttagctaattatatatatattgagctccatacattcaattcaatactactttttaatattaataatttggggacgatcgatctacttttaatatttattttttataaaaataaaaaatgtagcacgattaaatttacttgtcttgtcaattattccttgtctgttggtacgtactctcttattccaactcaataatggtatatgttcttcataaaaaaactctgtacgtatatataattatccgatcgaagggataaaaaaatagatatatcgatgggtatataatactaataattacataatttaatttttgatgagttttagctctatatgtatatatgtgtacagttacatgtcattttagaagatccaatgcctgtagagcaatgctggagcaaagtaccaatgtaattaataaactattgaatcgtagggccaaaaacttaattaaacggtgtgattgcaagagtccaagaatatatatcgcttatatatatataaaaaatatatatatatttatatatctacccatgtacagtgtat

SEQ ID NO: 318222 - DNA, 653 bp, Cannabis indica
atacgcatattttgtaaggttaggagcgataacacagggcttttcaagctggagaatcaaaatgagattagattgaatgttgtataatttacaatttatatatttaagtaattatatatataattaatattttaaaccataaaggaatagaattaataatttaaaaaactaaatacctttatttgtatataaaaattgaagaaaatatttatatttttcaatggaaaaaactatttatagaataatattgaggctatcttgaagacaaaagttaaaggcaataaagtagtaggtttgatgtgagttgtttttcaaagaccggactatttatgtagtctgattcttcaaaaattttaaaattgaagggcaattgtaagtgatcaaaataatattgtttggttataaaaatttatttcagtgaagatctttgagtatctccaataatagtattctttgaagatgttatatattttacacataatttaaatatataatattttattttatttttattccactttatttttttgcacattttacttttaaaactccaatagtataataccttataaaaatgctataattatgatctcacacatatttatatatatatatatatattattaaactatttgttagaaaaatagagagat

SEQ ID NO: 318223 - DNA, 4256 bp, Cannabis indica
aagtctcagtccgggtccgtgtccagttccaggtctcagtcccgttccatgttctcggttctggtttcggttccaatttctagccctaggtccgagtcttggtctggaactatgttcgggtcctagtacgattcccaaatccaaacactgactacgggttaggtccaagcctcgagtcctgggttttgggtaacgattcagatcctaatcttgggtcacggtcttgtttcgattcgggtcccaagtctgagtccatgtttgtgtttgtgtctgagtctgggaccgagaacaaggtcgggtcttgggtcgtggctcggtttttggtctcgattccaattctgagtttgtgtatgtgtctccaatccaagtttttctcctttgtccgtgtttgggtcgccaatccaggtcatggtcttaggtttaggtctgggtcaaagttcgtgtctgggtttgggttcgtgtcctgagtcccagttcgagttttgatttaggtccaagttcaagtgctggtccgcgtctgggtttgggttcgtgtcccgactgccggtctgagttttgatccatgtcccggtctgggtctgggtccgagtctgggtctgggtcttggtccaattccaatttcgagttcaggttcgagttacgggtctcgaggctaggtttcgtagcatgggtcctgggtcagttccctcatcaaggtttgggtcctaggtcccggtcctggtccaagtttgggttcgaatcctaggtcttgatccgagtccaggtcctcgtccgagtccaagtcccggtcgaggtttgagtcttggtctgagtcaaggtttcggttccaataccaatttgggtttgggtttgatttttggtgccgtgtactattccaggtataggatcgagtcttgagttttgattcgggtcttggttctaaggctcgggtccaagtttgggtgctagatctcggtttgggtccaagatcgagttcagttcttagccctcgtttcggttcctattccagattcggttttgagtccaggttttggtctgggtcagggtttgattccttgtccgagttcgcgtccaagtttgggtccaagtccgaatcccaatctgggtttgggtccctagtctaggtctaggtcctgacttttgatcccggtcttggtctaggtgcaggttcaagaatgggtatgggttcaggtcaaggtccaggtccagatcctcgtcttgtccgggcctaggatctaggtgcgaatattggtcccagtcctagtcttgttctagcatcctggtccaattcctattcaggttccaatttcagctctcgggtctgggttctggtcttggtcgaagtcccaaatctagaaactgactacggatttggtccaagccccaattatcataactttggtcaatatctagatccaagtaagaggtactggtcttattccagtttaggtgctaggtcctaatccagacatcagatacgtgtcgggtccatgccccagttccagatctggatcccggactagttccattttaggtgtcaggtccagacttgggtcctaggtctgggtctggggtcgagtcttgggtctcgtttctgctgtccaggtccctatcatggttccaggtttgggtctcgattatggtcttggttttggtcccagtttgagttcttgtataggtttgggtttgggcttgggttggtcctcgttcgattctggttctagttgcgattttgggtccgactttaggttggggttcgagtcccggtttgagttcgggtccaggtccagatctcggtatgggtccgggtctagatctagttctgggttcgagtacaggttccaatcccgatctaggtctgggttcgcatccgggtccatgtcccaggttttgctcccagttaaggtttggctccaagtcctggtccgggtctaggttcagattaggtttcaggtcttggtaagagttaggtctcgggttcgggtcctggtttgagtttggtcccggtctgggtctgagtccaggttttgttcccagtttgggtatggggcagggtcagagtctaggttcatgtcccttgtctaggtccaggttctagtccctagtccagtcccaggtcatggtttgcgttcgactcccacgttctgatccgcgtctgcgttcaggggcttgagaccaaggtccaagtcctaggtcctggtccaggtccaggttcgggtttaggtcccaagtctcggtctgagtttaggtttggggccagtttctggtcccgatctgtgttggggtcttagttcaagtctgggtcctactctaggtcctaggtccccggtttgggtcccatgtctcagatcctagtcacggtttgggtcagggtccaagtcccgatctgggtccaagcccctatctaggttcaggtctcgaatcttaggtcccggtcatggtctaggtcctagtctgggtttgggttcagttttgatcgtaggtctgggtcctaatcttagttctagttcctattttgggtttgggttcagatttgggtctgggtcgagtccgaaacctggttcgagtctgagttcagttttgggtccaagttgggatcccaatctaggtctaggtctgggtctgggtcttggtcctgttctcgggtttctatcttagtctaggtttgggtttgggttcaggtctgggtctaggatcgggtcttggttctggtccaagtctgggttcggatcctggttggggtgtaggtataggtttgggttcgggattgggtgctgggtttgactccaggtctgggtttgggattgtgtccgggcctaggtttcgatctttgtttgggttcaagtctagttctaggtccgggtccaaaacctggtcatggtcccagtcctattcaggtcgaggtctagttttggttcaggttttagttccgggcattgggttttagatgcgggtttgggtctgcgtttgggttcgggtctggatttgggccctagtttgggtctaggttcgggtccaggtcgtccgggtctgggtccgagtctgggtccaggtttgaggcttgggtttaaatcgtaatctcggtctaggttaagttctggctccgagtctcaggctccgatcccggtcttggtctgggtcaaggtctaggttcgggtctaggttcgagtccagtttcggatcaaggtccaggttggggttcggttccaggttcaagtctgggtttgggttggggtgtgggtttcgatctcggtttgggtctgcgccaggatctgggtctgggttttgctctcgatttgggttcggggtcaggtttaatttcgggtccgggttcggctccttgtctcaatccgattccaggttccaggtccatttccggttccggttcaagttttgattttagaactttgctctaggtttgggtcttggtttgtgtttgggtctaggtctgagtcccaaattcagacgctgactacgggtcaggtcacagcctcgggttccagatctagggtccaaatcctactcgcagttcaggtcttgggttcgagctgggtcctaggtctgggtctgggtcttggttcgggtcccgagtcctgatctaaattttgaggcccaggttgtggtcccggtgtgggggcccaggtcctgggtccaggtcccctatctatcgggtcttaggtttcggtttgggtctgggtataggtttgggtcctggtacaggtttatgtctcaggtcccaagtcaaggtctgggtccatgtctcagttcgggtttcggttcccaggtctgggtcctggtcgcagtactggtccaattctagttttgatttcaattctaggtttggctttgtgttcgggttcgggtcgacgtctgactccttgtctgagtttgggtctcggttcaggtttgatctcggtaagggtccgagttcaggtccgggtcccaaatccaaacaccgactactggtcgggtccatgcctcgattccatatcccgatcgtagtcttgggtccttgtcttgttctagttcaggccccgggtccctcaccgagtcttaggtctgggtttggtgttacgtctagggtcccaagtcaaggatcaagtctcaagtccccggtctagggtcaggtcctgggtcccgttccttgtttcgaggtctaggtccccatctatgtttaaatcctaggtcctagtttagtccaggttcgggttcagggcccatgtctcgaatttgggtcccccatctaggtccggatc

SEQ ID NO: 318224 - DNA, 2060 bp, Cannabis indica
atatatatttcatttaaagtgcacatttgaatgtagttgctgtattataaaattatattattctccattaatttcatttagaaaaattacaattaactttatattttaatagattataaatccatatacatgtataaatatacgtatacaagtttactttaatcattagatttactgatcatccaatattcttattagaatttctttgcactgaattcattgtacatacacagaaatagcagcaattatttattctgaacatatgtaattaattatacatattacataactcgagatacaatgaagaaacactcataataagaacaatgatcataataacatgatataagtaattttttattatattgatgaaaatgtatagtaattaaactacatactccatcatatcatatcatgtatacataactatatatagatatatattatttttcttttatttaatttaagtttcatatttgaggggcccaactagtgatgaattttggatggtggtggtgatttatgtaatatggtgggtaatgattttggaggtgaagctgatcgaggtggtgttttgggtaaaattgatggtggcagtgatggtaaagagtgtggtggcaaagttggaagtttaggcaaagagtgtggtgacaaagatggcaaagagtgtggtggcaaagatggcaaagagtgtggtggcaaagttggaagtttgggcaaagagtgtggtggcaaagttggaagtttgggcaaagagagtggtggcaaagatggaagttttggcaaggatggaagtttaggcaaagagggtagtggtggcagtgatggcttaggtaatttgtgtaggattttgggtagtaagagacctttttgatcttgtgatgatggtttttgatgatcatcattgtgatgatcagctttggccagcttggttaatccaataaggcataacaacaatgtcacaactataataagtttattatttttcatactcacaaatttaatttctctgtattttcttacttgaatatataagtagatgtgagtgagttaattgtgattctctattcacaatatatataggtgatgaaaaagttgattgtaagagtttggtacagtagctattatgttatttaattatgtacgtagggttgttataaggggtttgtataacatattgcccaatatacgttttttttgcaaaatcatatttactacctaacttaactaatattgcattatgtactatatatgtatgtatatgtatgtggtatgattatatttagagaaatgtcgtatttatggtcctaatactctttgtcagatataatattattattggtgtaatttaatatcagatttcacttgttttactttaataaatattataaaatataattaactaattattaggcattagcctataatagtgctaagcaccttagtgccataactcttttagatttattagataataataaacatttaccaccactgcacgtaattatatcttattattattagtgttatttaattattataaaattttatatgttttcatttaataataatattaaaaattgttaaccactcataatgtattatcttgattatatagtgttagaacattttaatacaaaaaaatgtaataacccaattttatgatttggattttaatttattttctccgtaaatatatatacagttgtgctcatccaactaaattcacattattttatttttgatgcatctgaatgcagatttcacatttttaaattcattattttagatttgttacttttcaatattagattatttaatctttattaaaatactaataattttttcttgttgccaaaatttgttaaatattagaaataatatatccctttttaatttatgtatccaatgaaagaaaagtaagttataattattcaacaacaaataaaaatatataaatagaaaatagtaaactccataaaaaaaaaaaaaaaattgtgtagaaagtgtaacgtccccgtttcaagcctccattgggcccttacacccacggaatgaat

SEQ ID NO: 318225 - DNA, 858 bp, Cannabis indica
ttttaaaatattttataatatatgtgtgcgatattagtattattttatttatttaaatgaataaaatatattataataagattattattattggacactaatgatgcttaacacaacttagaggcggtatcttataattggttaacgatattctctaaaagttattactttaattacaataatagtgatatatgacactaagaagggtactagacaccattggtactttttagcatttgtcttatggtaaataatttttaaataattgataagagtactttggactataaattattaattatctcgtttttagattgtgttatttcttagtatttttagtgctttagtttgtgtaatgaatttttagagtttgagaattagatggaatattacgaaggaaaattttgatgtttatatgttcaagagatgtttggaggatgaaaagactcaccaaaatgatatttcttttagagttttgaaaatttatggaattccaaaaccttagagttggagttacaacaaaggttagaggttcgctgcaacgaacaaaggagaaattttagagaatatacagggaagctgattaatgtaaatgtgtatactagagtagagaatgtgaaattttaatatgggattttaaaggatagaagtcctctttagtgttagtactagggttgagcatccgatctaatcgaactttttctcctcatctagtccaatccaattagtaattggatttagaaaatcgtcatcctatctaatccaattagactttaaaattcaattcaatcatcgattttttaattagatatccaattacacatgtaatttttaatattcttaaaaatataaataaaa

SEQ ID NO: 318226 - DNA, 1293 bp, Cannabis indica
tatattttttagggcctcaaaatttaattcgtcttgggcccatatattttcagggccggccctaaatataaatatatatatatatatatatgaatatataaatttggttaaccgtagattatataagattgagcttcaagtacatgtatatatattatgtaagagaactgacctattgtttagtgcaatcattcttaggtatcattttataataaatcctgcatataattgagattaaaagtggaggtagtttggatgagcaactcaaatttttggggtttttgtccctgtcacttttgtgacttgttgatagttgtagtgtcaacttaaatcaacctatatacattgttttttttttcttgagctgacttgactttacgcatggagtaccaactctatctattagaaccctcatcaagatagatgtgaggtgacaataatgaatataataaattggtccatgtagctaagtaagaatcaaccttgtatggataatatgatgtgttgtgtacaaaaactcattccaatatataaatagcatggatttgtcttatctaaggaaagatggtcttggatagttaatattttatatatacagggctgacaatagatagttttcattgtatatatatattttttgcataaactaacttgaaatcatatttttgtgagcaaggtctgagaagacatgtacctataatcactatgcatgatataatgcatcatatcttgttgtcaatgtggaagattgattgtatttgtgcatcttctcttgagcttaatgcttggcatatacgtgtttaaggatttcttctacacctagatttgtcctcaatattattgattctctttatggactgaccgtggggtctagagattgacccacctatgtgggatttttttattcatataagtcaaggtatatctattattttgatatactatttactcacttctttccattcaagtgttgtagtgggaagacttgcgtagtagaaaacttttagtgttgaagagctagaaagtcttctttgttggtaagtatttttaatcttttcttcaccattcaaaatgttattgtgttattggtgttcttggtattttcggtgttcgtggaacaatgtattattcataatcttagatgtgtagtgtttgtatgttttgattcaaatttgtaacaaatagtagaatttttgtatttttaacttatttatgatgcatagtatgaccataaatttttgtatagaagttacaagaatttattgataagcatagtgggtgtggtatgaccgt

SEQ ID NO: 318227 - DNA, 893 bp, Cannabis indica
ttaaaaataatttttacataataatattaggtgtaccaatataaacgtatcatgtgtacaagagtgtacacataagcagtctatagtaacagttaaccgcatgacaccttaaatttgctactatttcagtagtttggagggttttaccaccacaatttgagcttggagagttaaatgcaagtgaaacaaatgttgggagagtttagccgccaaaaactcaaaaatttaaataagtttccagcagtataaaaaaaaaaattctttgacaaataatatgctaattttattttactaataaaaaactttttatgtttggagaattttttttctttatttttactattttttttatataaatttcctataatagatgtgttgaaaatattatttttgagatgatgtacaatttcttttatttatttttttggattatttattcgctatttttatttcaattctatatttagacacactattttaatgtttgattaattttcatattaatgcggagttgtaatcaatttttttagttgttgttatttagttgttcaattaaaagaaaaatgaatatatatttatatatatttagttttcaaggttacttatatttttgttgagtaagtatattataattgcttttaagtttcttttattttataagattattgatgtcttaattttttatgcttattatttaatttgtatattaaagtagagtagttatacagatatttgcttgttattatttagttgttcaatcatgtattaaagttgtttgggtattgtgtatatttttttaaggttgtcgataatatttttttatgtccacttgatttacatatttaattagtgttattttttacatagttgtatttttgttgcatatttaattg

SEQ ID NO: 318228 - DNA, 605 bp, Cannabis indica
acgcctaaattagttagggtgttacaaaataattactaaataacaagaaggttttaacatgattttgaagttaaatcttcatagtccacgagtctatcttattaaggataaatatgtttgaatacaaaatacaatgaaatgatttagcaacaggatttcttctttctctctaaattggtcgtcctttttatcctgggttccgtctctatttatagatgtacgggatgacagttattctcttaggatctactcattcataaccgttcatgaaacgtggacactccccacattttattctttatgtatatggggtaatgttaaataactattcaattattttttgtctttatctattgacgattatgttgaatgtattggatagttctctctgagtacacgtaatctttcttaatcatctttgtagggaaaatgttgtgttaagatacaatgcatctcgcggttctcctttctcatttgaaatggtattagcgaggtggttacttccatacgttgacagcgatatgaataaatgttgaagtttccattccttaagcatactcgcgagtatgtggatcaatgagttgcaagctcttactcacaagtat

SEQ ID NO: 318229 - DNA, 1383 bp, Cannabis indica
gctccccagactttgatatctaccaaatcatgctcctcaaactttgatatgtactaaatcatgtctcttgaactttcatccatgttagaattttttactaaaattaaacaaaagtccttaaatttaacaatctcaatagttcgagggaatttttaacggcaaaaaaagttcaaaaggcacgatttagtacatgtcaaagttcaggggaaaaaattactaattagcctaaaaaaaagtaaagagtgaagtcgccccactcgcactatgtaaacatactacaattttttattcttatttattttaataacaattattcggatgtttaatatattatagttattttttttaagtgctttaatgtattatagttcgcttacctaataattttactccaatttgttcaaaataataagatttttttaaaaaaaaaaaaatttacactttaaaatagtttttctttatttatttttatggaaattaatataaaaactcacataataattaattgagcgatttaaattgcaactaaaatttacatagctaaaaccctatataaaaatgaactgaacaaccactaaagcaactaaaattataaattaaaaataaaattaaaaaataatatataaaataattctccaaaaacatactaaacaataaattacatatttggtctaacaatttatttatttgaaaataattgtaaatataaatatttaattgaataaaattggctcatggctttttattctttaacatttatttttatgtcgtttttaattacatacgaattttacattattatatttgaataatgtttcaccaaaatatatttaaataatacatattttctttttctgttagaaaacaaatgtgatatttcagaatttaagagttaaaagatatataagcataaaaattaaatttattctttatgttttattgtgtttaggttatacatatagctgacaaggcagagtacaacagtgagtgtttatataatctgcaatttatatatggttccaaattccaatcaattcgaaccaaatcatttgagaccggaccaaatgaattcggtgtgtatgatttgatcaatccggaccgttttgaattctctagttcagtcatgtttttaaaaatcttagtaacggttcaaaccaaaccaatcagtataattatcatatatgtacttaatatattatttttagacaaaatgttgacatttagaacaactttaagtagaatattgatattgagtttatattgttatgataataattttttattattactcatgtattataaatttattaaaagtaaaaaaaaactatcgaaaaaatgaacaattaattgtaaaaaaaaaaaaaaaaaaaactaaaagtaaca

SEQ ID NO: 318230 - DNA, 1222 bp, Cannabis indica
aacataaaatgttatttctgatctttattaagtagtaaatctgattatattgaaatgggttttatttagggcacaaaactcaacaaggcggcattactaagtcagggaatttgaaataatgggttacactcacaaagtacaactaagcttccatgttgttacttgttaacctaaccaaacaacgatactttatatttttagaatgaagaattagacatttaagtttcaaaattaacaagatgagaacactctcataagctcaataaaattaacttgataccaaccctaaggcggcgatcagttatcaaagagttttatcatggaattacttaaactatattttatgtagtttacttgtatgcgctcatgcatcacgtttaaagtcattgtaaaatgacatttattattcaagtatatttattatgttacctttatttattttaggcatgtctacaatgtcaaatcctcttactgcttcacaggcacttgaaaaactgaatggtaaaaattttatgaaataaaaatctaatcttaatttgacgttgctttgtgaaaactacaattttttcctaattgaagagctccctgaggagctcactgccaatgccaacaaaaaatattcgacacaaatatgactcttggattcaatcaaagaagaaggtcaaatacttctgtaatacccagtaaaaatatacatatttaaaatttctttgttatacaatttgtgtgagagtaagtattttatttatttctactaatcgtgaatagagataattgcttagaatagtattgatagatttctaaacatatttgaaattatagtaagtgtgaaggtaaaattatggtgtttttacgaattaggataattactcaattaaagcccaatatgaaaatctattagagttttatagattatttagtaggtttaatttattgtatgagtgcattaaataacattataatggaagtaatgttaaaaaaattcgtaggtttggataaattcgaaggattaaaaactattttagtaaaatgatcatatctaaagttttagagctatgattgaggtgattctagtggcgtttaaaagataattcaaagatgtataaattttatagaaatagttatatcctaattcagaagttttttaggtcaaaactgagcctaaagttacgaagatagaggtcttacttttaaattttaaaaattagatatttgttgattt

SEQ ID NO: 318231 - DNA, 1041 bp, Cannabis indica
aaaataatctttaattttttattaataagtaaataagattaattaacgaaagccttgatgattagcatcatggactcaagagttatgttgcctaaaaccataatgctaaataaatcagggttgcatgaatccaaattttggctcaaaaagtttctccattaaattttgtatcacatcacatatttttaatggaatgcatatttatataatagttactttttatgggcacattttacaacatgaataaattaatgaagatcttaagtagtaagaataggtcaataattctagggttatgatgtactataggtatttgggacatttaggggtgtcaacaattcgtattcataataattcatgttcatgtcatgttgagacttagatattacaaataaatattaaattcaaaccgaattcacttattaattgcgtgaaaaactaaaacccaaacttaacttattcataaataaatttacccaatctatgtaacctatttatatatttttacataaagaatcatatttaatttttgttaacatattaaactattaacatgtttataataactttaatatgtatgtgactctttcatgacaaatttatgagtataattaaaatattggtgttctatttaactaacttaatacaatttatatgtaataagtataatgttgtatattttaaataggttgttgtcctattattttcaagttaggtgtgttaatccaaaaatgactcgtttagtaaatagttagctgtattaattcgaaaaataacttaaattcatttaaggcaaattcaaatcgtgttaatgtgcctgactcatttttttatccaactaaaaagcccattctatcattttttatagacataagttgaaaagtacctcttttattaatcaattaatcaaatttacctctaattttatatttatttgaaatatacctctttttatatgtattgtacccaaaataccctgacataagtgagtcacatggagagtatcttgaaatgacaggggcaaaattggtacaatgttta

SEQ ID NO: 318232 - DNA, 768 bp, Cannabis indica
ttaacactatgaaaaaatttctcaatgctgaacgttaagtattttaaacttcatttacaaattgaaaatgaaattaagcttaaccaaagaaaagacaaaaaaagtcgagcagtgaacatacaaaatttctgggtcccctccacgtctatggaaatcaggatggttcctgatgatgaagcaagacgcacctccgcagtgctcctaaaaaaacattgaaaagtagcgttagtaagcaattttcttggtttagcgaccagcataaagaaactaagtggagaagaaaatagtggaccttagagacaatttgaaaatcgaaggaggaagaatgagaaggaattagccggcgaaggacgccacgagcggcggcaagttgaagggaaggtggagacctctcgcgatcctgcgtttggagaaggttggagaggtgacgaactccaatagtggagggatgagcggtggggaaggtgagacatgttaggagaaagagagtgaataaaatggcgggaaaggaggaggccattggagaggagtggagtggaggagagtagagaagaaaggaacatggtgaggaagaagggaatcttgtattttggagagcaaagaacgaagtggttgagtcttggattattcagagagaatcagaagccggccataacaaaccaaatagccccactacatgtgtggtggacttaaaataaaataaaaaataaataaaaacaaaaaataacaataatttatatagtaaggtgtatatatatatactagtaa

SEQ ID NO: 318233 - DNA, 1133 bp, Cannabis indica
gagtgtcaggctcagatcttgatactctgcgaaagaaagaaacaagggttagagatctgagcagaaggagtcatttaattctactgcaaccaatgtaaggtttctcatacttttatgtgtttaagtttcattgttctagaaattcatgtttaggatgttaaaaaaacataattgttagtaaatctaggtcctggtaaaatataatccaacaccattcacctagactttaatacagactgcatttcaaaaggcacagagagaatctacgattagttaaaatgcactaattgttttatgttagtgcaagtggaagttttttgggttttgcgccataactaaaactctatttcaatgtaatcttaaatattcatttctcaataaagaaataaaattatttcattacttgtttaatgtactacttagttcacatgtttatttcatgatcatttgtttgatttataaattcatctaaatccttatcacattgatattcttgattattgtgttgtcaacatagtggaaagtaatcaaaattatgtgattaaatatagtctcccaatttatcaatacacataatttccactgatatgaaaattaacaatgtaatttacttaaatcttagataagtattatgtcattttcagggcattggtaaagcaagcttagattagatgtgctgttatacatcagcttataccgatattgaacttagataagatataataaacttactgtaatatctatctaagttaatatcacctagttgatcttaaatcaatgatctcaatcctgagatggttaggttttagttcaattgtattatttatattctttgatttgttaatcaaattggaccaattggattttcccgatacttacagattaagaacacgatagttctattgagtgggagcgccaatcatagatatggaatctatagcttttataaatgcataaaagtaaaataatgatttctttcgatcttagcttaagagataaatggtagagtactcatttcaataattaaattagtttactggaatattatttatgggtagctaagtatttaaagaataaaatacattgaagggtagaacggtaaatttatccatactcgatgtagatcatctata

SEQ ID NO: 318234 - DNA, 709 bp, Cannabis indica
aaacaaaaaccctaaagacaagcaaaaccggacaatgaaacctaattacctaacaagcgaaaaaacaaaagtggtaaatggtaaagttgcataatccgaccatgaaaatcaataagtcttttacatagcaataaaaaaatataataaataaaaaaggaaacaacttcaaagatagatgcgaaaaatgaaaacaaagtgagccaaaactaaagcaacccaaaatacagagcagtctgccaaaatatatacatatataacaccaaaacatgcaacgaagagtccaacttttcctgatcaacgagcaaaaaaaaccctagataataacttagggacagagacaatggaaactagcaaggaatttgccgaaagaataacaaataagatccaagtagatgtagaaattgagagaatgaaaaggttacctgagtgaaattgagaaaaatgtcgaaggagagaaagagaactctaagaaatgggatctgagaccgtacaacccttctgagagaaaactacgcttccgaagggtgagaagcgtagagcaagagagaagaaaagcgcgtgggcctttttggaaatttatagcaaaaagtggaaacgaggagatattattttcgctttcgttaggtcagaattttctttattttttttaataaataaaaaaaaaaaaaaaaaacaaaaaaaaaaaaaccttaagctaacaattaaaata

SEQ ID NO: 318235 - DNA, 750 bp, Cannabis indica
agaaaaaaaaaaaaagtggtcatgtgaagctgaaaaaaaccatactggcaattacacagaagaatacacttcaccatatcctcaaacaaagtaggcgatctaaaaactcttccaatgaccgagccttcttcttcgtcgctggagaagtataactcgcgaaactctgtggagattctctcgtcgttttccgacaggcgcagcattctcgacacctgggtctgtcaaacaacactaaaaaacataagaaacgacccaacccgataacaacccaaacgagaaaaagcttcatacgagtatagcttcttcgttctcaggagtcagagagcgagtcccggcggagacacgaacatggatatactgcggacaatcttggggttgggaaacgtggaccatgactgaatcggaagccgaacaatccgcctcctcagatgggtcccattcacattcatggcggtggagggagttggggttcagccgcagagggcggaggagggtcttggaaattgggtcccatcggttgggggccatcatgaacaggccatggctgcaaacgacactggcaagctcaaaacgctccgctgcttcaccaagtggtaacattaacgacacccactctagtctgtcactttcaaatctgcctcttctatgcttcttctcctctgtcattttgtaaatttctatgttcgacataatccaatgatgttcatttgtttccgaataaaaaagcctcttcctagtttgtcccttttt

SEQ ID NO: 318236 - DNA, 1179 bp, Cannabis indica
atttgtcaaaataatctttaatgaaaaaattttgggaaatttgtagtaaaaattctaaaaaagttcagtttaatacaggtaagtctccaacttcaaaaaatagtggtaagagtctttaaggtcatgctttttatttgtccgttagtcctaattttaattgagctatttatttttttaaaattaccacggtcgaaatattattggtccaaattattaaataatttcttttttcttttttctttttctttttctttttctttgctttcttttcttcttcgtcttcttcttcttcttctcactaccagaaacaatctcaaatcagcagcaccaccaaaataactccatttatccatgaacaaacattaaattcagacatgaaccaaaagaaaaagaaaaaaaaaattgaagtcgccccgatttgaaatccctgcgtacccaaaccctttgagcccaagccctcgcaaaccaatcacctgaaagcagacaccatcgacccctgcaaacccaaactattgcaacctagaccagtaagaaccttcgtcgaaaaaatagtagattttcttctacgtgtttcgatatcttagatctaggaatttgtaggtttttgtggtagctaacagttggagctacaaatctagttttgaaaagatctttcgccgaaaaaaatggtgggtgacggctggaaagttatgagtttctttagtatgggattcaatcgattctggccatggtggttgtggaggtgcgtagaaggaagaagacaaaggagaaagagaagagaaagtgtcagggtgatttctggagattgaaaataagaaagcaagaggatgactaataaaaaaaaataaataaattgataactttaaaatggtttttagttttattttattttaattatttttaattaaaattattattttgaccaataaagcttcaacacgtgacacttttgaataaattaacggaacagttaaatttaggactaacagacttacaaagagtgtgaccttgaggactattgtatgttatctaaattttttatttttacagttttatttgcattttaaagttgggctatttacaaaaatatgggaaaatgaagatatattttgatatatatggcataaaaacttaattaccctaaatatgatatttttttaaaaaaaacttacaaatatg

SEQ ID NO: 318237 - DNA, 1438 bp, Cannabis indica
tatatccccttctaatccaaaccctttacttgtttttgcttatctatattgtaatatgtgtatgtatacaaaacactacatacatatacaacaagatctatctaattaatcccagaaagatgtggaatggatctatatgatgatgatgatgatagtggagaaaatatatactatatatattcatcagatctgagaaatgatgagattgtacccagaaatgacactatttatggtaaaaacatgttagtttttcaacgcacacccacccttttctagcttcctatagctaagtaccttaattagaattgaatctctacagctatagctacatacatctaccataaaccccaaccttctcattaggatctagggttttttttttggtaatttcagaaccacccccacaactaaaacaaactatattatatatatatatataatatatagtctatattactcccaataaattacccactacatataatatatagtctatattaaatctctttttctttttcctcttccacccatctccctctatagataaatttacatatagtaatgatttcatgactggtttgcaagatcaatattttgtttttcttcagaaaaagacctagctagaagaaaaagaagaagaagaagaggaagaggcaagtgtgtggagatgatgggagaggactaagttcatgaaataaagagatagtaggtataaagtcacaaacatatgaagaaagagaaatttcaaggtaagaaaaagaacaaacaataaataagagaaacccaccttttatatatgcatgctccttctttttgtactcccaaaaatttgagcctctcattttcatttcaatcattttttttctaatgtttttattatgttcctttatttagttgttgaattttagaatatgtatttgtgtagaagaaagctcatccatcaaccaaagaaaagaaagaaagaaaatgatgataacataatggtgctagactgctagtacttacacaagtataaatgtacaccattatttatttatttattttttttgaaaaaaatgtacaccattattaataggtagtagttgcaattttttataatatagtttttaaattaaattttgtgagatttaattaatattaaattgtaaacacatttatgtagtagtgttgggcatttaatatttttcatataagacagattttaaattgggatttttataaaaaaatattagattttgagtaaaaatttacaattttattgctacatgaaaattcttataataatactgtctttttataaaataaccgtaaaacaataaaataaaacaattaaaaacaaagtagaacaactaaaaataatccttgaacaacagtgaaaacttaatacagtacacaatatttttgaaaaaaattctgtcccacaattaaaaaaaaaaaa

SEQ ID NO: 318238 - DNA, 1260 bp, Cannabis indica
ttttactgagccaaacaccgagctccatgttaccgggcaccggaaatgcaaaattatgaaaactactgaataacataaaaggcatctcagaattcaacaataacagtataataaattatttaaatagctataaataatttcataattaaacatgattaactgctaatttccaaattaaactaagcgttctttacaaacctagttccaattcaatttctataagaatccagtatcacctgtgtgaaaggaattgaaatgatagatactacatcaagctggatgactcccataacagcttatctcaacactggagaacttccaagcaacaaaaatgaggctaaaaaaattatgagaaaagttgcacaatatatcatagtggaaggtataatgtatagaaggggcttctccatgtcattatttagatgtgtgacaacagaagaagctacatggctcttgtctgaagcacatgaagtattttgtggtaataatgctgagggcaaagtttatcaaagaaaatactaagacaaggatatttatagcctaatatgatcaaagattcaaaggcccatgtgaaaaagtgtgacaaatgccaaaaattttcaaagattccccgagcacccccaaatagctaatgcaaatgcaaagtccatggccctttgccatatggggaatagacctgatcaaatagttgcccaaaggtaagggtgaagtataatatgtagtggtcgcagtggattacttcactaagtggatagaagccgagcctttggcaacaataacatccaagaaggtattggattttgtagtaaaaaaacataatatgttgatacaaacttccacactagattgtttcaaacaatggcaaacagatcgatagccagatgatcacagatttttgtacgaaacatggaatcatcaaaagtttcttcgcagtagcacaccctcaaataaataggcaagtcgaagtagtcaacaagacaatcaaagacaccgtgaaaaaatggctcaaagaagctaaagggaactggccggaggaattaccagaagtaatgtggtggtacataacaactgaaaggacaataacagggtaggcaccttttgccatggcgtatcgttatgaggcaatgctgcccgtggattacagcacccatcccatagaagactaatttatgatcaagaaactaatcacgccctcttagcagaatcacttgatgaaattgaagaaaaaagagcttcggcaaacctaaagctagtggctca

SEQ ID NO: 318239 - DNA, 5750 bp, Cannabis indica
tgtacttagacatgaataagaccagtcacaaacatgataaaggcactagaattacaatccaaatacttctcgtttgaggcacctcggcaccccgccagaatgacatggtgatgcacccaatgcccaggttgacatgttgtcaattggggagcttccaaccacttttctaaagatgtttctcgaagatttctttgttttcatccaaaataaggaaacaagtgatttcgagaaatacacaaataacttcgaggccaaactggtgaatcaacgcccaggttgacaatgggtctgttcactagcgcccacgttgacatgttgtcaatttggggagcctccaaccacttttctaaagatgtttctcgaatatttctttgttttcctccaaaataaggaaacaagtgatttcgagaaatacacaaataacttcgaggccaaagtggtgaatcaacgcccaggttgacaatgggcctggtcactagcgcccacgttgacatccaacgcctaggttgacattttaaagtcttttttagatatttctgttttcatcaacaattaatttaagagtgctttgaggtgtcaaacatagccatctggtggccaagagagagacccagcgccgaagatgatgtggtgctaaatcccagcatccaagttgacattttgtcaacctaggccagttctaagtattttttccaggaagtcccacaagaaattttttttgtttttaaacgaagataccaatgttctcgggaagtaaacaagactgtctgatggctgaaacattgacccaacgcccaagttgacactggtgctgtgtcctacacccaggttgatgttcaatctagttcgcatgtttttgcttctcaaacgcaaattctgatatgagcattcttcttatcttggtcaaaaatgaggtaagagacctcgtttgtaatctcaaatgcgatagaagtaacaaaacaagtctcggaaagctcaccaaggagcacccaacactaggttgacgtatagcctagtacattgggttctctttattcgattccaattctgtctcgagcatctaactattttttcttagtgaaagagagctacgaagtgtgacaagtcaaattcacacttttatatttcaccattttcttcaaagtgaaatatcggtaacaaattgggtagttttgagtctcacgattctataaaaatacaatatctcaaagaactggtgactgaggtcaccataactatgaaattgactaagtgatatcagatataacttaggcctcaaaaaatacaagtgcaacacattttcccactcatacaacatctaggttgacgtcagaatgtcaacctgggcgttagatgtcaacgtgggcgctggatgtcaacgtgcaacctgggtgccagttattgaacaatcttcagtaaaacagctataactcactcaacattactctaatttatgcgattctagtttttttaaaagcacttctcaagctctttctagacatgtcactcactcatatacgcaattctaaagatattaagttaaaaatttatccccaagtcaagtgtgatgtttctttgcaaaaatccttaaaacaatccaacagacacaatttgagttccaaaaattgatgattatcatcagaagtcatttaaccattagatcaccatcatggtcaaccaataaataattttttttttcatattttgtattattttattaatattttaattgacctccttccctataaaatgagagcttcactagctcatttttcacattctactaagtccccataaggtcagagcatctctctctccagtttttctctattaggttaatttttatgtgtttttagagtctattttaatgtgtgtatgtatttttttttttatattatatcttgttcagatttattcttagtatttatttttgtgtatttttcaggtgaaacactgggagatttctgtttttgtttattttggtgttcttcaagcctttttgaaataaaaatagttaattttgaggaaaaaagaaacttcaataatgtttagttggttcttattgcctaaaattcgtcaaagttcacatttttagcttcaaaaattgtggttcactttctaaaaataaattaaaaaattctaagttttggatgatgaacacgttctgtttgtaactgaaaacaaagtctgaagcttcaagttaatttttgactatgattcattcacttccaaaaaaaaattcctcaatgaaagttttagatcgttcttttatctttctaatgcatcttgaatagtctaattctgagatatatcgagtgagttatggccaaaatactattaggcgtcgcaacataatttcagaattgcaactgttttgaaaattttgattggaataccttggcattctctgttgatttataaaaggttttggagctaggttttcataccattcaaaatttttagaaaattctgagtgtagaaggagggcagggagaagaagagaccattggaggacaccaaatagtgttctatcttctccatctctatcttttatgtttttagttaaatttatattattttaaaatgacttctagttgctaattttctgaaggattattatgtgaaccacttgaatttattttatggattaatgtaatagttcagtttcttcttcttcttcttttaagtcaattcaataaaaatttgttttagttttagaattatttactggtcatctataattgttaactatgaattgaatcaaaattctagaaagtgagatttgaatatgctccgattgttatggatgcaaattgatttaggatgaaatttcatatgttgtttgtatgatgttattagttgctttgcttaatgttatatttctgattaaactttaccataggaatatagggagttttcacatagattggatttataagtcataaccagattataaacttcttttctcaacttgtcaattgaataggaagaagagaaattgggttcattaaaaagtaaataaaggatagtctgggaaatttaaaaaaaatgatagtcttagatcataataatccttgttattattattatttctttaaattttaatcattgtcttgatttatttactttatctccaacaatttttattcatcaaatagaactaaagaattaattgattggtaattgataatcaattctcatgggaacgatactctatctatcactatattacttgtttcgattgcgtatacttgcatactaattttaccgaatacactctctagaaatctgagctttttccttagtcaattctcgagagcaataaaaaattgaagtagacgtagctccattaccatcgcgatatgggggagtgaactattataaattgtagtgtctcttttactttcttttcattcttttattaattttcttgccaatttagtgagatggtgttggccaatttttagtatcaataatactatagttcaattcaatattaaattttatatattttaatttaaatattaatatataaatttactaactactcgtacaagttaatatacaagttaataatcatggatgctcataatgttagggttgttcaatggttcacattaatgttgcgtttggttagaaggaaggataacatatatagaaaaagagagttggtaccatattgtgaaaatagagaaaagagagaaagagagaaaaagctttcattgattgaattgagtgaaaaaaagaattatatatagctataggcttgtgttaagtcctgttcttctaccttgttgggccgctaccttatcttgacttctacattattatgatattgtccgctttgggcctagagtagaccctcacggttttatttttagccacattcccaaaaggcctcatactaatagattacgtggaacacttatattcaagacagctctatctctattcttccaatgcgggacttaggttcataccccaacaatcctcccctcaaactaaggacaaaatactcgtggcctcccctccagtaaaactaccttatgcagacgctattaccaacgaaactcactacccgaccatcacctttgttaggaagactttcgacactggtcaccgatctccatcttatactgccgtaatcatcaacgggacacaccacttgaatacctcaatatctggtagacttttgatacaaagcaccatatagatcttcaatcgcgaggtcatcacattgagggcttctcctagacatcgcaaatgtagctcacaatcccaaggctcgtaaacctttggctctgataccacttgttggtccttattcttcccccttgtcaggccgctacctcacattgactctcacaatagtatgatattgtccgttttagacctagagtagactctcaagattttatttttggtcaccttcctataaagtctcatactaatggagtaggtagaacacttatattcaaaaaaactcttacatattcttccattttaggacttgggttgataccccaacaacttgagctaaagagagttgaaaaccagttaacaaaaactataactgaaagccaactgaaactaagaaacagaataactaactactaacagttataactgagaatcaattcctaatagttgttcaatggttcacaataaggtggcatttggttagaagaaatgataatatataagaataggaatatgaatagaatggaatcaaattgaagatacatagaacattgatgaaaaattattaatttttttttcttgtattggaatggtctttccatccattttaaaatggaatagtaattctactaaaatgataaaaaattcattgcgttagaatgaatgaaattttaatattttaaaatacaactaaacaaaaaaatagaattaaatttcttcatttcaattctattttatttcattaccttcaaccaaatatcatctaaatattttattaggcctatgcagaactattcctataatagattgaatgttggatagtcaattgtaattggaatataactatattgattctttaatggaaaatttttattataatttttaaagtataagtttagtaaaaatatgattttttctcgaaaaaaatatattttaggaaaaatatagaaaaaatttaaaattatagaaaaaacaacataaggtacattattactcctttatggtaactgattatccgtcttaccataaaggtacatggttacccttagctcattttctcatatttttacaattttttctttaattttctcataaaataaaaaaaaaaaaaagtaataaaacctctcttggtacaaaatttatgactaattggcatggatgaaaataatggagaaggttggtacttcggtaaaagagaaaagtagctagaaaaaccaagcaaacaaaaaagaaaagatagttaggtgattcatcctttttcttttcgatttggggagcccaaagcttttagaatttactagcatattctagactcttatttagtaatgtcaaattttgcacgaccacaatagagagtggagtcgatcaaacaatatttttatattacattgtagttgtagatacatgtgtcatgtgtgtgtgatcgtattaaatatatacgtctgtaatataatagattatatagaatgtgatatatgatcatgcatgaatggtcctttggttttagaattcaatagtaggaaaggaagaggggcttgggaggggtccct

SEQ ID NO: 318240 - DNA, 707 bp, Cannabis indica
gttgcagtggtaatagattgatattagctggtgctggtggctataatatatagtgtgtcactatcactgtgccgttaaactcttctaccaaacaaaaaagaaatatgccaatctttatgtcactgtataatattatgttttttttttatggtttattacatattaattagtgaaacacaatttctttttttcaaaattggtttttaaattttgaaatatttaaaggcaacccaaacaaaaaagaaaaaacaatcactttccgttagataatggtcttttatataaaaaagacaatatatatgacttactataatatgtgacagataatatttttatttttagacttttctaaattaattatatacttaaaataaattaattttttaattaaaataattaataatttttttctcaaaaaataatatttatgtatattttttattttaaagaaataaataaaataaagttagtatcaagttataagtaatttattaattatttttaaaataattacaatagtttaataatgatctaacaactaaagtaaatataattatcataattatatatttaatataattatataaatatcttccatatatataaatattgttaactatataaattaactagcgagccttatttagtaggctaattagtaatttttttcctcgaactttaacatgtaccaaatcatgtcctctgaa

SEQ ID NO: 318241 - DNA, 2205 bp, Cannabis indica
gtatatcttaaagaatataaaaatggagaaaaaaattaaaataaataaagtgcggtgggtatacaatgcaattttctcataaaaaacagatacgaatccaaaaggcaagagcacgattagataccaaaaaaatacgagcttggacacgacacgacacgatgctacaaataagcatgacatggcataaaaaaaatatgtcttcaagtacgacacaacgcgagaagcacgaaagccacgacacgtatatatgaatagactagcccgaaaaacacgacacacaataagcttaaaaagtacggcacaacatattaaaaaacttataatttattaataatattaaaatatgaatttattgattataaattataaataaggtaaaataataaaaaaaacttaaatattatatttatttataaatgtgatataaaaatattgagtgtttataagtaaatatttaaattctaatgatgttgataattttttatatgattatctgtaaaatattgtttaaaagttatataaatagaactagaattttgaaatatacatttattttagtaattgtaaaaaaaaaatatatgaaaaagtaaagcacgaatttaagtctaaatatgaaaacagactgacctgtttaagaaatacgagtcggcacgagcaaagcacgtcacgaaaatattgaacctatagggcgtgtcgggcctaccctttaaaatattggcacgacacgacacggcccatatttttttatgggaagacacgacacatcctattttttaaaaagcacgaataaaaacgagtcgggccagtacggcacgcacaaacttacagcactagttccaaccaaacactaaatatcacaagagtctacagtatctcactactaatagtgggatacagtaaactacgataatttttattattattatttatttattaataatttaataaccattttatataaaaaataattaaataatttaatgtttctaaattggattttaagattaattatcatttaactaagagaacccaattggaatttttgaaaaaatataaacgagttaagagtcatgcgcgttttaagaccaaaaaaaagggcttcgctactgtcctgattataggaaaccaattccaaaatggtctaccgattttcagcaggaatgcataggttttcgtgcatagcaattataaatagatagtttttcattccatgcctataaatactactttttacacaaaattgtgggtggctgagcttctattcatatcatcatatcattctaagtgttttaagttaaaattttatcattttaacataaacacaccaaccacacactttgagccaaacttgttcttattttctataatgtgctaacaattctctctgagatttcaaattgtatttcatcttattagagagaatttactttgtatttcaaaattatatttccattatgttgaggtgagattgacatcggtatttaaataactcagttgtaggtgaggttgacaccggctttgtaaacaacttgaatagaatgagatgccactataaatatccgagagtgaaattggcattcaaaaatacggagaggttgatagtcatttgaaaaactattggttgaggtgaagttggcacaaatggaaaaacaagtcggttggtgatattggctcttcaacaatatgatgaggttaataatccttggaagaaaactattgtgaaagttttaagggttagccaagctggttaaattggctcattaattaaacttaaaactaggcctatagctttgaagaccaaggacgtaggtgactttgttccaccaaaccttgtaaaaattgagagtttgcaaattctacccctaatcttcttacatttcaagtttgctatttgtttatacatgtgattatctttggtattgcattaaacttgaatatttgcataaattgtctttagggttgttaagtttccgaaattagtttaaatttttaattcaccccttcttggaaacatatcttagtttaacacttagtaaatcgtactagcaactgttgattaaagattttatactttaatatgttgctggctatttaattcattgtgtggatcttaattctctcgtgccagtacaagatcacaacttcataaatttaaataagaattttttttgatatttatactctatactagatagatgttacgtg

SEQ ID NO: 318242 - DNA, 1695 bp, Cannabis indica
aacataaataactgctaatttccaaattaactaagcgggctttacaatgattcttgtgtaatccaggatcctactctgaatgtggtgattgggacagttgaaaaaatggcaaattgtacttgcttcaacaagacaatctccccactgcagtagctactattccctttctttctttcaataaaaccagtgtaaaccaatggcacaatcgccttggacacccctctatgtgtatttcaaatttcttcaataaagagaacaaatttcacataagaattcgattttacattgccacatttgtcatttggctaaacaaaaacgtttacctttcatttccaataatatttttttcaagaatgtgtttgatttaattcatatggacatttggggtccctttcacataattagtgtggaaggttacaagtactttcttactatagttgatgacaaatctaggtttacttggctttacttgctcaagaacaaatctaatgtccaacatataattcccaccttttttaacatggtttgcactcagttttcaaaaaaaaaaattaaggccatccgatctgacaataccaaggaattgaatttacaatctttctttgcctctaaaggcatattcaactaccactcatgtgtggaaatacctcaacaaaactcagttgttgaaaggaagcatcaacacatatgtatttatgtttttatatatatatatatatttttttttgtttaaatttttgtagctatatatagtttgcatttatattggagccaccacaagctatatgtttagataaaccgctcatataccggaggtgtcacactgttagtttttatttttcttatactttaaaaaaatttgatttgtaaatgttatatgtgattgtatgtgttttttttaatatatattaatattctgaaattgtgatgtcagtttatatgtgtttttttttttattttattttaataattttttgatttattctgaaaatgtataatttttaaaaatctgtggtgtatatgaaaatttttagattgtttaaaacaggttttaaaatttttggttagcttaaatataaatgttgttccgccgaaattttgttaaaataaatttaaataagttagtaatttatttaaaataaatatagaaaagttatatttaaaatggaaattatttaagttaataattatttattaaaattaataaaattaattctaattttaagtaatttaattaaaaagaattgtatattttttgaaaaataataataaataattaaatatttaataaacaacttttattagttaacataaataattaataattgaataagtaatgaacttaataattaataaattcttacaataaaaaagattaataaataattaaaaaataatccaatattatattaaataaaaataatttaaataaaataattttgttgaagtttgatgataataaaaaaaatttgttaatttaataatttatattaagttactagtttcttataaaagaaagttaataagttatattttaaatagataattatttaaattaatagttatttaaaaaaattagttctaaaattaagcaatttatctaaaaagacttttcgtaacgccctaatgctaaggcacgttacagtgctttttcaatcatagtgcaatctttgctaatcaaagaattttctcgaa

SEQ ID NO: 318243 - DNA, 644 bp, Cannabis indica
gtaaaataatttccaacaagccaaggcttccatcacatgtggagagaagaacccgcgataaggaatggccatagcagccacaattttaccattactatcccgaagaacagctccaaaactagaagtcttcaaagtagcattaacagctgcatcagtgttcaactttagccggcctgaagagggtttaaccaaggagcatctcggttgaaagcagagtaagaagatgtacttgttgcagagttaacagcaggtgaagttgtttgagcagctttatactcatccaaatacgacaattcatagtaaagaattacctcatgcgattttggttttgtgccatgtcgttctttgtttctttctgtccaaatactccaaagtatagtcgcaaattgctcaagtctgaatgatgaccaagtagaggacacatgaagaaggaattatttatgattcatgttgtttgtgagaagttcttggatagcaaagtcagtcgatttccacaactgtttagctagtttgtagaagaacaaagcgtgagtaaccgtttctgcaccatggctgcatagagaacagctttccgaatcagtaatgtgtcgagtatggagagtgttagcaacagggagacagtcatggatagcacgccacaagaa

SEQ ID NO: 318244 - DNA, 2773 bp, Cannabis indica
gatggcttacacttaaagattgatgaaatttattgtcttcagaaaattgagcctcctattctattctttaggccgaaaggaattaagggctagagatctagacggaaggagtcattatattctgctgcacccaatgtaaggttttcttaaacccttttgtgtttatttcattgttttagaaattcatattggatgtcaatgaaacatactgttagtaaatctagatcctggtaaaatatttccaacaaattgtcctttcttagaattcttcattgaaaatcttcttagcaccttattaatataagttgcttgagaaagtactaatgttttccactttttatctctatagattttgatcttgagaatatagcttgcttctccaaaatccttcattttgaatttatccgctaatcacttcttcacatctaataaccttttctttacattattttcaatagtagaatgtcatcaacataaagaactaggtataccactcttttacttttaatgtatctgtatacacaggcttcgtctttgtccgttcgaagccatactatttaatactcttattaaaggttgtattccaagatctagaggcttgcttcaatccataaatgaatttaaacaacttgcacacctttcgatcattcccttgtaacacataccattttggttgttgcatataaatggtttcatcaagatttccatttagaaaagtagtcttgacgtccattttccatatctcataggcatttatgaaaagaagaatgtgaatggatttaagcatggtcacaagagagaaggtttggtcatagtcgacgccttctcactgtgtgtactctttggcgacaagcctagctttaaaggtctctaacttccctttagcattttttcttcttcttaaaaatccacttacacccaatggatgtaatatcattaggtggagtttcatatacccagaccttgttagtgcgcatggagttcatggcattgttccacttgtttgaatcagggtcttccatttcttactagtaagtcaatggatcattcttgtctgtatgagaaacaagaacatgtgcttcatgttcatgcatggtggatagattgtctcaaaatcctcccagtacaacaatgtctgggatttccttttcaggaactatggtaactgctgttggtcgttcaactaatggtgctgaaatcgttagtttagaaatctaatttctgatttcctcgaatttcatctgaatatcttacaatcatacacacttcaattctaggaataattttctcagtcttcagtttaagaacacgagcaagacaaccccaaatacaaaatgtttcaaactagattttgttccattccataatttctattggagtatttcttctgcacttcgagggtactacattcaaaatgtaagtagctactggaagtgcatatccccaaaagtttagtggcagtgatgagtagcatatgattgatctaaccatgtctaataaggttccgtttcttctctctacaacaccattctggtgaggtgttccaggtggtgtgagttggacaagatccattcttccaacgaatagtgtttgaatttgaatccaaatactctccaccacgatctgatcaaagtgtctttaatgatttacctaattacttttcagccatagccttcaagtcttttaactttccaaaagtttcagacttcttggccattaggtaagtatgaccgtatctaggataattctcaataaaagtgacaaagtattcataaccaccttaagcttgaatattaataggtccacacacattagtgtatattagctcaagttattctttggctttattgcattttgtagaaaaaggtctttttgccatcttgcctcttagacaagattggcatagtggaagagtttcaacttttagttctctcaaaggacaatcctttattaactggtttatactgtctaggtgaatatggcctaaacgtagacgttatagatacgtttcatcatcattagaaaccattttgtctcttttgttgttaaggcaatgttactctaaataatttttttttcatgaataagaaattttattgctccaaactaacctttacatcactaatccttacattttgctaacaaatttacacttaaaacttagaatttttacaaatcaaaccattagaatccatgctttatcttcttccttagcctcttgggaagcagtcccttaattcttagcttactcatttgctggaatttcttcaccgtagtgttaatgtgccatgtttgttgattccataatacttcatccctaaataattcattaattgctcacttggcttgagcacataaagtgtatggctttgtttttcataacaaatttggtgttctaaacttggaattaataatctcattattaataaactcaaacggactattccaagacacttggcagacacttgtgctctattacccattcttatggtcacctttctattagctagttctcttgacaaatcaagtattaactttgaagaactaaaattactaatggctcatgaatcaacaattcataaggattgatcctcttccactaattagcttcaagaacaaataaatcgaatttattttttcttaagctcggagagatacttgagacagtttctcttccagtgttccatcatgccattatggaaaaccttcctatcttgcctttcttgtccttggacttaggggtgactttgttcttcttggctttaggtgcctt

SEQ ID NO: 318245 - DNA, 563 bp, Cannabis indica
tgtgactctaatggccaaactattatcgggcataaattataaaaaaatattagaattcaagctcatcataatacgcgtagaatttaataaaacttatagaattgagaaattataatgcaaatgcctatctcttaaaaatcggacacacatcacagaatataattaattaatacaaactgtctactaatttattttctaagtatgcgatcattatagtcaggatagttcaatgactagttatcaagcatacgccaagaacatgtgcgattgatcaacaaaatattaacaaatcaacaagatatgaaaaaagtgtcttatatatatattttaatattttataatttaaaattaagttctaaattatttaaatatttcagtttatatactcctaaaggagtaagtgagtaatctctatcttttagattttgaatctataactagagggtataagatttctattttatttaacctgagttattttgctagaagtttatttatgctctcaagtgcatattctccttctttatacattcttcttctcatgcttattattattattatta

SEQ ID NO: 318246 - DNA, 1515 bp, Cannabis indica
tatcattcatataacaatctcaacgtaacaaaaataaaaaataattccttaaacgaaagatgccatgaaagcctaaactttgagctttaaactcaagcttggtgcttttccaccccacaaccatcaaacctaccaaataagcatcacaaatagtcctaaaacatcctagaaaaaaaaacccaaaactcaactaaaccctatacatcacataaagaaattttaatttctcaaacctgtaacttctagcttgaaactttaagaagtgctataccttacctcaagtcctactagggttatttttagattgaaatttgaagaaaaaggagtggtggtgttccttatatcacgaagaggaaggaagagagagagcttagttttaagtttttacttttcaaagtaataatatatataacgtttaaattttattaataataataataaaactttataattaataaaagttatttatcagtttttagtcactaagaaatatctaatcctaggacattagaccaaatctcaaatacttctaataaccccaatacttataccattaacttatcataatattctcatcaaatctattaactaaacatgttatgacatttttgaccccccgattgagtctttaaagtcgcgaaacctaaaaaaaaaattattccacaatagctcatctgtaattaataaattacgtttatttgtccacttataccacatttaacatttatgctaaaatagattagtaggatcataatcccacttattaccgattagcctatgatatatatatatatcctaattatttatcattaggcttatcgggatattacaacttcaattttaaaattatataatgagttttctattagatttatatttcaaaaccttattaggaaatatatcaacaattacaaatgagatatgctgataataatgactttgaatgtaatagcaactacaagtgagatgcggtgatgataatgattttgaatgtagtagcgactacaagtgagatacggtgatggtaatgactttaaatgtaatagcgactacaagtgaaatacagtgatgacattaattttaaaattatacgatgagtttttttatgaatttatatcaattgttaattatattttttgaattttaatttaatttactcaaatgatatatattttaaaaactaattgtataataatatatataataaatcaatttaaaaaatgaacatataaaaatatccaaaaaaaaaaataataaatttagtgaatttattattcaatgttggaatttgtcattataagttcgacaaaaaatttaccactcaaaagaacaattctcattctccaagggcttacttaactgaacaagaatcccttgaagataatgatcctcaagctcatgctaccacctctggtcatgactttggagatgatatatgtgacagtcagtagtcccgtgatccgtaaggggaaacaccgggtaagctgtgcaatcccacaccgcctgggaaggtca

SEQ ID NO: 318247 - DNA, 732 bp, Cannabis indica
gtccgtatgcgtaatttactctaaaatttattagtagttttgttaaatatccttaataaatatttagtggttctatgataagagcttggcaacacaacctagcaatgacaatataatatgtcgtttgtggtgccctatatgttggacacacatcctctaaacctgtcccacaacatattatataattaatgaataaaaaacaagtggttttattatatacataaacttctattcctaattacataatttatattattaaaatatatattaatcacaattaatgtatattttaatttgagatagtacatatatataattaattacatgtcttgaaaattttttggtgtgtctctagttggtctttgtcttggtcttgcccttaattaatctcttaattaaaaaagtttaattctagagtaacattataatatcatccattaacatgtgttaaagtattgttattaagtatcagtgctgcttagcactattattatttaaaggtaagattttgtaaatgattagcaatattgaataataattattaaattaaataatgtgacacctaatatttaattataataaagttacaatagtgcaacaccatgcataactttatgatatgcaattaattatgcatttgaaactgttaacaaaaacttttatggaaagattattttgtaaaatattatcaaaataataatagtgacaatattataaaaaatattactttag

SEQ ID NO: 318248 - DNA, 1055 bp, Cannabis indica
agagccatggcgccattaatggcgaacatggcaaccattggtcctggaaacttaagctctcaagttgctcaataaggagttctgattccagctctaagaaatcgaaccagagatcaagaagatgcaattatctacttcaatcacacgatattgactaagctcaatgatcacaattaactcctgtggaaacagcagatccttgctgccattcatggaaacagattacagagattcattcaagatcttcctcctcctcctcaatttctcagtgatgcagacaaagctaaactaaatttcaatctcgagtttctgaactgggaagttcaagatcaacttctcgtgtcttggctcctatctttaatgtttgaaagcttattaactcgaatggtgggatgtaattcagcgagacaaatctagaatgctcttgaacaacactatactctaaaagtttcatctaagatcctcgagttcaaaaccaaacttcagaagctgaagaaagggacattgaacctcaatgactgtcttcttaaagtcaagcaacatgtcgatcttttagcctcagttggagaagttttatctgatcgagaccacattgctgctattttcaagggcttaccaagtgaatatgatacttttatcatttccacaaatattcggattgaaggctatgcagttggggaaattgaagccttatttcttgcatctgaatcttaaatcaagaaggaggatcaagaagttgaacctagtgtgaatatggctactgcagatcaagatccaactatggaagcattctttgctcaaactaatcgaaactacagatcccatgcctattccagagctcagtattggcctaacaacttcaattctccaaatttttctaacataagaggaaattttcgaggaagctcctctcgtggaagccacacaaatacacatgccacaactatggcaagaggtcgaggaggtcgattccctgctgcacccagtggtggacccaggattgaattttagggttggcttagttatacatttaatataatccaaaataataaata

SEQ ID NO: 318249 - DNA, 524 bp, Cannabis indica
aaaaaaaaaaaaaaaattagtacccataaagtttatagcctttttaaagtttctaacaaaaataacattttactaattcaaaataccttttaatttagcataatttctcatttatatgcttctctttcaatttctttttacattctaaaaaaagctctctttagaaatttgttgtggtctggtaaccgacgttgttggaagagaagggtcttgcatctttgctacatttgcttcttccttacgattttttttttttttgaacttttttatgcttagataccgctattcaattcctacttcagacaattttgaacctattttaaaattattttgaacaagtgtagaaataaatctaaaatgctatgatataaataaatttatttatacatgctattaacattgtactaataaatctaaaatgctctaaaattaatttaaaatggtcagaactacaaaaaaatttacttttagtcaccataaaatttataattgaaagtgaaaaaattgtgactaattattaatca

SEQ ID NO: 318250 - DNA, 755 bp, Cannabis indica
aaaaaaaaatgtttacaatagttttgtatacctattttattgtttaccctagctctatcattctttccctcacttctctgtatgttacatacttaatttttctctctttatcaagtttttcgaaaaatgaattaaaaatagattgagctaaagaaaatgtaattagaaataaagaagacatatttttaagtggttagagtgttaaagaaccttaatccacgagtcaatatatttaaactatttggctatagagtattttacacaaaagagttcttgccaaactttttaactagggtttgtagccaaaaatcgtaaacttttgcatgaagggttaggtcaatatttataggccaaagttgggttttcgagtaaatccgaatcgttagggtttgcatgtaaaagtaagtccattgatgggggtaaaatacattataatattgactttgggccgagtaagtgaggtcaaattcgaggggtaaccttcatccgtatgagaccgtaccatttgatggtgacaggtgggcatgcaacgtcgaccgtgcatagtgaatgccagagtagtttacgttggataaaaggtagtttgtgtttttgttgtgcacctttcaaggcctgacacaggggacaaacctctgattctttgggatttggtgtcagaagcgtgccatgtcggattggtcctgaacagtcaacgctccacaactctgttgggttttatgccctaaataaaactctttacaatctgattagttatc

SEQ ID NO: 318251 - DNA, 876 bp, Cannabis indica
aataataataataataattgtggttttataaattatacatagtgtgaatagaatcaaaagcaatataagtatttgtagaacaagattctaaattgagggatgtgatgattgtgatatcaaataatagtattttaggataattaacatttattattaattattaatgatggggttcttcattttaactcaaaattttaatttatgtgatatcatttttgacaaggcagagaaatcgttgacaattttatttttgtttggtttgtcatttttgagctatttaggtatgtagttttatcatttaattctgagagattagtttacttaagaaataggatatttacaataatagaatagagtagtactctctatacatatactactatatatattcaatgatacaaattcaaaaacagatttattattctttctctttgcctttgaataatatctttgcaaaagttattatcaaaaaaaagaatgttcttggaaaatttattatcatctaatatttatttttgtaggaacatgacaagtttgttcacaaaatgacaatttagaaagaatgaaaaatgtgagaaactagttactactaagtttcatttttctaatttcctattaaaagactattgtgttttcttttcttgaaacgttatagtatttccctttattcaaaatacttttatattttcttttcatacattatatttgccagaggaacctaacaaagtccttttgggaaaacttatatgtaacttcctattatatgttactgtatgacaaaactattattttatcacacttaattatttaatctaaacattataaattgagctatttacaaaaatataggaaaataaagataagttttgatatata

SEQ ID NO: 318252 - DNA, 562 bp, Cannabis indica
ctaatttcgcccaaaatacgtggaccagtatggcgacgacacgttgatctaaagggcgtaactcttaaatctatcaactaagtctcttagctacagaagtgtcaccaaggatataccctcccggaggagagggaaaacctccacgtactcccagagaccagaggaacgccaagggacctccgggaggaacaggatattatttgaacagtcacctcgcatttaatgccgcatgggataaaacgtattagaactgctataagcaataagtttgacggcgaacccctcttatgcagctcatacgctatgattaataaggctagtgacgactagtttatgagtgatcacatcaatcaagaaggaataaaagactttatccacctaacccctaagatacctaaggtataggtcatgtatttcctattttgtatctgctgggaatatgtgcccctactgaaactacacagaaagacaagtgcttcagttctaaggatcaccccagaaaaacactataaatacccccaaatacactgaaatagggtcgagaattctaggttcataagaa

SEQ ID NO: 318253 - DNA, 1190 bp, Cannabis indica
tttaataattatactcttatagttaatatatcatttatcttatgattgtatttcatatattctctaatatattatctattaattatttatttttaaggtataaatcctaatagttgaggtgatatgacctccttcgtatacagaagacaaataaatgtcatatccttcaagtttttgaggaataacagatactaggggatctcaaatcttcatctattttgcttcatttattttaatcaatactttgctaaacatatcacagtcggtattcagtgtaactctatgcacactaatatcgctattttaatatgttatctaacaggtattcataaacatgcacgctaaacatataatcacatatgcatatcattatactaatcttacctcgattttaaattcagtagtgccagtcaacctgagtggaactgatgcttgacgatttacaggcccctaagtcacaatattcgtaaaattgataagtgacacattaaatcactttttggggacttaaaaacaaaactagaagtttccatatcgatggataatgtggcaatatcataagtatcgccaaaacacaaaaatttagggttctaaaatttctaaaactagtaacccagatttccaaaatggataaccggttttagggttatgcctggggaagcggtgaaccggatctacggggctgcctgaaccagttaaccggttccttgtaggaaaccctaaaacctcaccctaaactcaatttcacccaaaattgagtcaaaccttctagaacacctaattaagttacaatgaacataatttaagaaacaaaaataggtataagcctctaaaataagatttaccattaaagacctaagtttgagtttaaaaaactcaaaccttggtctttctcaaatttagcagctaaaaccaatctaaaacaacttgaataacctcaagacattcttagaaaacaaattcaagcaaccccaaacattcagactcttttcccacaaaacaaccatgaaaaccaaatttacttctaagaaaaattaaagagaagaaggtggatgagcttaccttgggttggtacctagaattcctacaaaattcttaatgaatcaccaagaaaatgatgggttaaagcttggcttgctgggttccaagggaggtcgagagagagagagagagagagagagagagagaga

SEQ ID NO: 318254 - DNA, 740 bp, Cannabis indica
aataaagatgttgctaatctctttgattagcttttgaactctcatttctggttttctctgtttctactttctctgttctttgtggttccatggttattgttcttacatgtatcaatcgctagttaactaccatccatggcttcttccacaaccgatcctgcttctacaccaatggctcatgccacagcttctgctgctaccccatggaatcctttttctcattcgcttacgtcctctctcactctcaaactagatcgccttaattttctctcttggaaatctcaggtcgtgccaactgtgattggacacgatcttgatgatattctcttcaccggagtaccaccacccaagaatcttgtcaatggagcatcgaatcccgagtatgttcaatggaagcgaaaagaccagctccttctttcgtggctcagatcatcaatgacagaggttgttcttgcatcagtcgccaactaccaaagctcctttgctgtgtggcaagcactggaacagaaattcttgagccaaactaaagcccgtcgccttcaactcaaatgccagttctccaacattaaaaagggaagtctttctatatctgaatatgttgacaagattcaatctatatctgatgcattaagtgttgctggatcaccagttggttatcaagacctggttttacaacttctaaatggtcttggaccagattttgactctgttgtagcagggattacttcacggagtgacaa

SEQ ID NO: 318255 - DNA, 643 bp, Cannabis indica
gtcatttttgtagtagtgttagtctatttatgtgtttcggcaaagctggtcaccgattctcggagatgttattttgcaaaaacaagagactcagaactcttcatttctgggtgagctggaaatgagaaatgcaaagttgtgaatttaatttccttaactttatgaattattatcattgtgaaaaactagagggacgactgaaacgacatctaatttggataagtagaacccagcgcaccaagccttctgtcaacctggcgctgggtacttactcccgaggtctcgggaattcatttttgatacttcaaaggcttttgaacttgaggatgaggtctccttccccgtttttgacctttccaaattgaatggtcttatcaaatttggcatttgagcaattgaaggcaccatcccaggtctattgtctacttgggcgctaggcccagacctaggtcaacttgggtgctgggctgttgggtttcgtatatcaatccacaatcacccaaatagagtcatagtaccctaccgttcttggaagtcccaccacaaaatccatggtgatgtcttcccatttccactcttgaatctttagtggctaaagaaaacccccgaatctctgatgctctgccttgatttgttgacaagt

SEQ ID NO: 318256 - DNA, 1324 bp, Cannabis indica
agtacatataataagttatttattatcactttcataactagataaaagttacacatctaggtacatacaaagatattttactactcaaagtagcaattgtatgtaagacttcttcaggaagcttttcaaataatcattttgtgattctttatcactttgattatattggatcactaacaaatattagtaaattatatatccacttttgggaatatgcaaactgaattatatagtaactatatatttacatatcatcactactacaaaaatcatgatttgcgtcggtcaacacgacagtcaacattgaggaccgacgcaaaaaatagtggttgagttgttgcgtcggtttctaacagacgcaaacaattagtagtttgcgtcgattgttattcgacgctaaaatataaactgacggcaaatgtgattttttttaaaaaaatgtttgttttattcgtttgttggtaaccgacgctattaaattgagcatcttttattaattgaggcaaacttattaaatatattacaaaatccctaatataacttcaaagtttcattttgcaaaaacacatctcgctgctctcttctctctctctctctctcactccgccctaacccaaaaccccatgaatggcgatcaaagctcgccccgaaccccgctgctcgccccgttccctcttctctaagttctagtcatcgacgcaacactccaccccaatcccaactctcctcccgatctcgttctcttctccgttcgagccaagctcggcccctaacattgtcgtttctgctcagaccaagctcgcataaaataaccctatatattcaggtatatatatacattttatttttgaaaattaaaaattctagttgaaaatattagggcttttattctctacatctgaggctctccaattcgagctctaattcggacccttgatttcatatcgattttgagaactggatcgtcctcaattttgcatgattgtatttaattttttattgcatttatataggttacttcacaatatgggaacagctatcatcatgcggagcacattacgttggggcagtttgcgtttgttgcggcagaggctggagattacatggcgttcttttttgcccccgatcacaaccctcaaatcaccttcagtgttgactttgattggaagactagcgttgttgctaaagattggtccaatgtggctatgaaaggctctgttgatgcaaggttttttctcatttttattttatcttttagaatgagtaaatttgcttgatgcagttaataatttaactttttatgatttttatttttgtactctgc

SEQ ID NO: 318257 - DNA, 1246 bp, Cannabis indica
tttattttttgtttttaaaattgaaaaacaaaagtgttaccaaaggacacctttactaaaaaacttaaataaaagttttgtaaaaaaaataaaataaaaagaaaatattttttgttttattcatttatttgcttttattttgaagtactgaaatgtaattcataatttaggtatgattttatttattccaatcaaacaccatttaataggtatttattatgtgaatttgaattaaagagagtaaagttaaaaagaatagaattggagaaaatataaaacccataaattttaaaaaactaatattactactattttaatttaaaaaataatttttttttgagataaaatgctattatattaaaataaaaatcataatacaatagtcattagaggatgtgagaattcttccaaccaaacacattctttgtccaccgaaagagcatactttgccaaaacatgagcaaaggtattagcagaacaaaaaacatgggagatctgcactccaggaaaattggacataagaaaagaaatgtcatgtaaaatactatgaaaatcagaaacactaaacttgttagcttgcaatcctttgaccactagaagagagtctgtctctatgtagtgaatgggtatcttcatgtctttgagccattgcagactaagcataagtgccagtgcttccataacttaatgcttgaaacaaccaggatatggttttgacattgcagcaactacatagccatttgagtgacgcaaaattactccaaagcccaatttatgattcatagtatcaaccgctgcatccgtgttcaacttaagtttgcccgaaggaggatttagccattcaggcaacgaaatagggattcatcggtttagaggcatggacactttgctgctggaaggagcttgctgagccgcatggtattcttctaaaaatgtagcagcagagagaagaacgacctcaggtggctttggttttgagccatgtttctctttatttctttcagaccatatactccaaagaatgcagatgaaatgttccaaatctgattgagaccatagttctgaaactttaaaaaataagtccttaatattgaaagtttcaaaaagcaatttgtccattgaaaataaggaatttctcccaactttttttgctcttttgcaaaagaagagagcatggaagattgtttcaccatggttgttgcagagagaacatctaggagactctgctatgtgttggaaattattt

SEQ ID NO: 318258 - DNA, 1985 bp, Cannabis indica
ccatcaaataaaaaattttcaaatttttatacacatgtgtaaacacataaaaatttcaaacttttatatataaaaaatgtgggctgttgagtgttgaccaaaagtaaaaagaaaatagcatacaatattaaaaagaaacagcaataacataatttttctttcttacaacagtaaaattaaaataaaatggaaaaaataatatgaaatgtaaatttttcttataatatcatttttttatatccattaattaaaaataatttaatattatattttattaaaatatactcatttttttgtgtgagttgcctaatataacctcactctctacttaagtctactatataatttacattaacctaagagatctaatgagaacaccatccataaaagtgagtttatcttaaaaaaatataaaaatagaggtaaaaattaaaacaagtaaaataaagtaggtatgcaatttaatttcttcaatttacctttgtaagcccaagtagagttgtcttagtcactccgtacatagcccatgaaattggctgtacataggcagttatagaagaaatgaaaataattgagccattcttcatgtacggaacagcctcctataaaattaaattaagaatgtgtttggtttgaagaaatgattaaataaaaataagataaaatttaataaatatgcataaaataataataataataatatattcttatgcaatttaatttatttatcatatacctgcataagaagaataggagctttgatatttacttcccacatcttgtcaagaatggattcttgggttcccataaccgtggctatgcttttgccagccattggattgacagcagcatttgaaacaattacatctatctttccaaatttctgcatcaaattatttattattaatttattttgagttacatatataaataaaacatgtcgattcattattaatctaaccacattatgaaacactatatggatcatgtaattcatcaccaattaatttattgaataataaaatgacctcgagtgtcttgtgtatgaggtctttcctatgttgggcattagagacatgacaaacgagccccaatacttggattccttgacctttaagcttttgggttgcttcatcaacagttttcctaataaagtattcgtgtttaattaaacaaaaaatataatattcatttcaatctaatttctatggcattggcatgaataaatcattataatgattaataaatagttaaacctggttgcgggaggagacaacaacagaggcaccttccaagccaagacggtgagcaatgctgtagcctatgccctgagtggaaccagtcacaatggccacttttccttcaaatctcttgctccttatcattttcttaacaattaattagtagacttaatcaccttcctcactctccttcttaatagaaattaatataatgtataaattatgcttgcttaccaatctatatatgtatatatataatctaggattgacaagttcattttcaattcataaaatataaataatcatttactactctaaaatgataaaaattacaagaataagtcaacaataaccgcacgcgagttagctatattttctagttactatataagagacataggcttgaggtaaagaagaaaggtttatactttatagtttttcgaatacgcaaataaactgtacaaactaggcgccgcgcacaacactataccccatataaaatatagtttaaatttttttgcggtacgattgcagtttgtatttttgctaaattatattatgcggtgggatttataattcaaaccgtatcgcactatatattacaaatttatcaatttaataatataatttttaattctttttttatataagaataaacatataatatatgtgtatactattttattttttagagacaattcaatataatgacttgaaaattattatatatgttatgatgttaaa

SEQ ID NO: 318259 - DNA, 1467 bp, Cannabis indica
gcaccaaatccgaccccgatatatagtttccttttatttttcacgtatatatagtatatatatatattactcataatcaaaattattaattacaattgatctttatatggttatgaatctatgatctttctattctattgctatgatttaaatgctcttaaatagtatattttcatattaatttttattatatacggtttcttttttttttttcaaagaacatataatatatattacttctccctaataatacatacatgtattgatgaattttagtaagtataatcgaaaagcaactaagcaagtcttttctagtcaaagcccttctatatctctcgccaaattcttgacattgacaatactctgctactactagagagaatcaaaagcaatgggttgcttaatgtaagtctttattaactttaatttaattttagtttcaattttcataagggtatatgttctagagtttgcatatatgtatatgagactattgtcaaataataataatattgcttttgtttaaccatatgataaaaattttagtgttaaaaaatgtgtaaaatgatatgaaagcaaacttatactatattaaatcccgtaatgacataatatatatcatattaacatattattacataagtctaatgaaattgaaagtcattgtcaatgacttgtgaaagcagccatttaccaataccattgttcttctagtgatttactctcgtcactcgtcacttgttacccccatctttttcaatctcctagtaagttctatataaatatatatacatatttatgtacgcatgttttcagttatatatgtgtataactatatatatatatagatttccttataggaaggttgtcatacaaaaaaaatatgtagtattattgtttatttatcttttttctttctaaaaagttaatagtatttttgttctcaaatatataatggttaattttaattattatgtgaaagttccagtaattagtttacgattatttataataattttaatatttttgtatatgtatggactgaaaacgagatgtctatttttataattttaataaatatttgtgagaatattggtttaatttaaatttaaatgctttttcaattattttaaattattatattttttttctattttgccttaatggataaccgatgggttccccataaccgatgggttccccataaccgatgggtattcccctactccgaatccggtggttattagacggggatggggcggggatgggggcataaataggtagcggggatgggggcggggattgcattccccgtatattaaccgcccgatttccatctctatttgagatccatcaattaatttgagtattttaaggaaaaaaactgtatatatagatggttaatttttattaaatgaaaaattagttgacgtgtcaaacttaaggtttaacacagtatgacacaca

SEQ ID NO: 318260 - DNA, 625 bp, Cannabis indica
tttagatcaattgacgtaaaattaataatgtaatcacttatttctgattttcaaaagataatttttgcaagaataaaaaaaaaatgaaaaaaacaaactgaaaccttatattgagagtaagggcaatttgatgtgtaattgtggacgtgaaaattgtcaagccggtcgattgcctatttgatatcaaggatcttgctgtaaagggtattctttatttcaccatggagttagttgcatatattcctataccaaaatagcttcttttggtcatcacacagccagtgagtaacaaataaattttgttacctattacaaattacagaaagaatattggtggcaaaactactttaattatacgatttgtcacacttaaccacatagattgatttttttaaggtaaaatccttcaaaccttacttctattatttatttgcccattccatttacaaggctagtgtcatagtggactgtcttagtgtacccaagtatacatgtgtcaaattttaagtagtccacataattttaattatttaaatattataaaaaataatttaaaaatatgaaaaattaataaaatttaattttttttttctttttcttttttctgttcttctctttctttttt

SEQ ID NO: 318261 - DNA, 1490 bp, Cannabis indica
cattttaaataattgtcccgagttacaatcttacatcgagtaagatttatattcttcatatatatatattttagtttttatatattttgaataaatatttatattgtcttgttattattaaatagtgagcacaaagttttattacaatctaaagatatagtagacatcattcgaactcaagagttggaattttcattttggttcaaaaaaaaagtaagtagtttttttttcttcataacaatgttatttataatttctaaacgctaatagttaaaaataattttacagataaatgaaaaatatcaatcatctcctcatgaaataacaaaatcaatgttaactcttgcaagtattccagatcaacggatcttctcatataatggatgcatagttaatggcgtgcgctatcacactaaaatttgggacgtcgaacgaaccactcaaaatcatggtgtttgggttgagggttaacatggtggcagtacgtgtgacttttatggtgtcataatagaaattttagaagtattgtatatatatgaccagaaagtggtactttttcattgtgactggtacgacactgataccaaaaagaaaagaaaacaccaagaatatcatatcacaagtataaatgtgagctcaaaatggtataaggaagaacattatattcttgcagaccaagcaaatcaagtattatatatgcaagatgacaaatttggtcccaaatggagagtagttgataaggtaaatcaatgctatgggacgttccacaagtaatacttgaaagtgttaatgtagaagaagatggttctaatagttatacagaagcttatcaagaagagagatcaattgatattgacttaacatttgacgagtcaaatgttaaaatttctcttaaccgtcaaaatacggatcttatagagattacctcatcacatattaatcatgaaataaataattgtgatcaaattttgaatgaaaatgatgtaagggaaagcgtagaagatatatcagatactgagactgatataggggatattgataaaaaattacagcattctgaatgttcatatacagatgaaagtgatgaaagtttataagtaattttatattgttgcataaatttattttataataattaatttatttattttagtatcactttaaatttattagttatttggattttctaggcacatggcaccaaaaaaaaagaatagtggagatccctaataacatcacatcaacgcaaaatgttttagaacaatcattcgacatcccgactactagtccacctttaccagtttcaagggttaataattccactacaacgcaaccaagaggtagcaatcaaaatgaacaagaggatttagaatatgctggtatgattttttttaaatttttattaataattttataaattaatatagttttaattaatatatttttatcaaatatttctctgagatattttttttatttattttaatagt

SEQ ID NO: 318262 - DNA, 892 bp, Cannabis indica
aatcacgtaatacgcctatgttagttagggtgttacagttatgaaactaaagagacagtcattatcgttataaaaccaatgagacaatcattaccattatgaaagtgaagaagcggtcatgatcgctatgatagaatagtcatgactctaaactaaaatcattgttaggtttcctacttgccggttatctcacgacaatgacatatcaaggatacttgtggctaggtatttggattgtctggtttgacaacgacagtgatgtttgaataccgatttaggtattagggatgtgttactaaattgcacctagaatatttatcatatgtagtgatgtttatggtttgtctcatgaggtaatttcttgttcattatggattgttgttatacttatgataatcagcatgggctttattcttgtcttaacttagattggctatctatttgatttatgttgttaattacttttcttgcttaatcttgcaattcacgggtgctttgtggtgcaggtaagggcaaggggatactagggtagccatgagatgacagtcttttctggtaaatgaacatatagacttattcgacttgtgtgttcgagttgtcaggagtggttttgggttgtacctaatgtgtattctgacttacttttgtatataacccttttgtaaaatttttgtaacaggagatccccgaaataaatttttagaaatatcgtcttcttcattactatggttttactttggtaaattttttattattataacagattttattaaatagttaatctactattacaaaactacgttttaaaagcacacatgtgtcgtccctagggattagggcgttacactttacatctgtgttatcatgaagtaactgttagaaattattttac

SEQ ID NO: 318263 - DNA, 890 bp, Cannabis indica
taattaataaaaatgaaatgtaacttatgaactggtatgtcaagagcatgtaaagcctatcaaattgagaaatgtaattattgtagtgaagatcacaaagctagacatcagtaagttgtttaacttgaaacaaattgtgctgtaatgttgttgatcagttcatacaaaaaatttgtatgataaactatgaaacttaattggaaacgattcaacttcagaaaatgagcagagactgaatatgtaattagtaatttggcagtaatttacaggaatcttctatcttagcaaacaaaataacccatcatgccaatgttcaaaacattgaactgaaaaaaccctggatatataggagacactatcatatatatcagaaatcctcttttacttcccctccattcggacaaatgagactttcattaacttttgtttatgattataactaagatggaacacaatcataggttgcagtttcagttaaagtacaattaattatctacttcaaacttaaattcctaaaaacaagtactcgtagatcatcaaagaatgttaccttggcaacacttatagtttgctgttccattgcttcatgtatggttgctctatcatgttctctcatgctgttgaagaaagtgatatcaaacttgatattttcacacgaacaaaataactgatgaaatttatgaaaagattaaaataagaaaatgatatattctctgctctataatgatttgaaaatatcatttagattgactgagaatccaaacaatttcctgttctgtgacaggtgaaaatactcaaaaaggtttttgtagaaaaatgagaaaaatgagagaaatgaattttattttctgatgatttcttttagtgtatacaaagggtatatataatac

SEQ ID NO: 318264 - DNA, 472 bp, Cannabis indica
ttaataatttttaaaaaatactatttatctttagtaagggtccaaaaaaaattcgcctataacctatttcaactcaagaccaaccctgataattgattaaattaactattctaaaaaaaaaataagtaaataaataataattaatggaaatggagagtacaagttgaaccataattttttttcaattataattatcttgaaggaaactttacccctgaaaaaaaaaaatgatcacaatacatgctttacttacttacatgataaaatcattgacatggattttcgagagagttgtgaccataaagagaaacgagggagaggaatgggaggaggttgacagaaaaatggaaagcagaataaggtttatagattttgtttggttttttcttcagaaaataaggttgtatatgactgctattaacccgaacccaatccagaagtggtggggggatcagaccagcatcgaaatttg

SEQ ID NO: 318265 - DNA, 1409 bp, Cannabis indica
taaataggtctatctatggactagatatactattataggtcatcattatccatgaatgttatattaggtttatttcttaattttaacgaaaacaaaattcattcataaatgttattaatataatattcatattaggtctttacttttcagaagcacgtgatttcatattagaattcgtcttatatgatgtgtgatcatgaattgaatttttgcttgtatatattttgtctatacgtgcgatacacatatttatatatgtgtatatatatgatgcaatatttattttgagatgatcttcaataacaattagattcaaattttgatttgagatttatttaggatatccaatattttaattgaattaaaaaaaacaacatatcactaaaatgatctcttttgtatagattaatttaataaacatattaagataattgtatgtatgtaattataaatttattaactaacccaaaagtgagttaatatttagatgaatttcatgcatgtttgtggtgataaatgtgtgacaattataaagtattttgtgtgaacaatgtgttagttcaaagattgtttgacataattattgtcaatgtttgatcactacgacaagagtaccgcttacaattaatattattgtcaaagacttaatattaatgttgtgtttgggatcttgagatgggattaaccattatttaaatttattgttttatttggattctaatatgagcatgttatttatgtaattgtattgtctttttcagctgttgctagtgtatctgctaaccttaatttggtaccggtccttaatggtaataacttaaggactggaaggagaacatttttattgttcttggctgcatggatcttgaccttgcattaaggatggatcgtcctgctcctcttacggataccagtacctctgagcaaaggaggatttatgagaagtgggaccgttcaaaccgcattagtcttatgatcattaagcgcagcaaacctgaggcttttaggggtgcgatgtctgaggaggtcaccgatgccacaactttcctagctaaaattgagaagcgctttgcaaaaagcgataaggcagaaacaagtactcttttaaagaaacttatttccatgaagtttaagggcaaggaaaacataagggagtacattatggaaatagctcaagcatttatgtgggagacgacaagtcggtgaatgtagaagcaatagggcattttaggtttttgttaagtactggttactatttggacttaatagatacttttgttgtaccgtcatttagacgaaatttggtttctttttcttgtttggacaaattgaattattgttgttcatttggaaacaattgttttagtttatctattaattcaaatactattggaactggttctcttatg

SEQ ID NO: 318266 - DNA, 954 bp, Cannabis indica
cagaaaacgagcgagtcgcgactcttgcaaaaaaaaaaagggaaacttctcaaattttgtctataaaatgagttggaactagatttcctttatcattcaaacttggagaccaattttgggcaacggtggattttggaaaacctttctagttgtttatttaaaggagctgagagcttagatctaataatatttaaaagttgagagaaattctaagtgatgaaggagggcaaggagcagaagataccattggaggactccaaacaatgttctatctctccatctctatcttttatgtttttaattgaatatttattgttttagaatgccttctagtagctaattttcttttaaggattattatgtgaactacttgaatttattttatggattaaaatgattttctaattttatcttcttctaatttaattcaattccatacaatctgttttaattttgtaattatttactggtcatctataattgtgatctatgaattcgaatcaaaattttggaaggtaagatttgaatatgctctgattgttatgcatatttattgtaaattgatttaggataaaagtacctaggctattggtatgattttatttgttgttatgcttaatgttatatttatgattaaacttaccatagaaatatagagagtttcacatagattgggtttataagtcttaactacattataaatttcttcattcaactgatcatttgaataggaagaagagaaattgggtaatttcattaggaagtaaaataaagaatggttagagaccataataatccttatttttatcattgttatttctttaaattttaattattgtttgttttagttacttttctccaatattattactgatcaagtaagactaaagatttaattaattagtacttgataatcaattctcgtgggaacgatactttatttatcattatatt

SEQ ID NO: 318267 - DNA, 1510 bp, Cannabis indica
gtgcctgtgtcgactgtcgagaccccactcctgtcctattatcatcccacgccattaaaactagaaaagatatagaaatatgtaatgagatatttgttggaaaacctttagtcttttacactatttttatggcaacatttgtattgagattcatgttactattgagatgttttggagatttatgttttcctctacgatcactacataaaattaagtaagtatcatactacaagaaatgttatttttgttggtattttttttaccggcaaaagcaagcataacatgctagcaaaagttttaataaatttttttaatattaaattagatttaaaagaaacgaaataaaataagaacggtattcatatttataattaaataatattccaattgaactaatataaaaacatgttcaatttgtattacagttagtaactaaacaaaatttctaaagtaaaatattaaaaaatattaaaaaaaaaaagtcagttcaaaagttaattataaaatatatattgttctaaagacggatgatgtcattgtcgtcattgttctgagtctcaggatgatgtgatgacaatccagcaaaaggaggagtggggaatggcaaaaaattcataggaggcatgttcaaaccaggtacaatccgagagagatacttaaactgatcttggaattgcttgaggtagacttgttgtgtttcatactgctgcttcgaatactgagtttcatgttgtgcctcctcaatttgtttctgtaaggcctcatactgttctataataacagtctgcgaggtagcaaaagtcatggaaggtgctcttttggccccaactgacttcaatctcaggagatggccaaagcctcatagatgtcgagatcactcactcaatacttgcgtcataacatgcaggtctcgtgggcactgggttttagggtatatgccctgaaaagtctgtaaagacatttctaattgataataaagacttgaatattttaatatatgcttgaatattaaattattatttattattgaataatttatatataaatatcgaaaagtttcttattcatatataaggttgtgactcgtagctatatagagaactaagaccacttaggtataaataaaatagtcatcaatatatttaagtttggaaatttttaatcaatggtttttagtgcggtttactaatgctcgttctttggtacaagtaatcttgattcaaattatggatgtagtatatgacatcaaagtgaagatgttgtatatgatagatattatatatatgacaaagactaatatgaatgaagttgtctttatctaatatgttgtttactataaagacctaattcatatcataacaatgatcaatagtagatcgacctaaatcctgagtaatcatgaactcttttcatgttattagtttctttgattcacttgttaaaatttttgagagaagatgattcttacaacttctgttttgggaagttaataatgtggatgactgagaac

SEQ ID NO: 318268 - DNA, 1592 bp, Cannabis indica
gacttaatagaatttatacattgtaatcatgaaataaatcatgtgaaccatgcaacataaaatgtgatttttgatctttattaattagtaaatctgattattttgaaatgggttttatttggggcacaaaatccaacagttatctcaatggcaccaagatgtgtcctcctcagtttattctaataactggtgaagctaagtatgaaggagaacttgaaataaaccctgaatatgagcaatggatcatcaacgatcaactactcatgggttggctttataggtccatgatagagggaatcgccactgaagtaatgggatccacaactgttgctggtctttggcaagctttggaaagcctctatggagcctactcaaagtccaaaatggaaaaaaccagaactttgattcaaacagtgcgcaatggtaccactcccatggtagaatacctacaacagaagaaaaattggtctgatattcttgcactggctagagatccataccctgaagtgcatcttgtggcaaatgtactgtcagggctagatgttgaatatctttcgattgtggtgcagatcaaagctagatctaccacgacttggcaagaattataagacatactgttgagcttcgacatcaaaatagagaggctgcaaactctcaacaccagcaacaaatctacaagaccctcttctcctcaagctaatgttgctgctaaaagcaactctagagggaactttgcaagttgtggaagagacactcatcagtatattggcaatggaggtcgtttctcagggaatcatggaagtacaagacgctttcgaggaagaggtcgtgccaacacatcaagaccaagctgccaagtttgtggcaaatatgttcactctgctgtagtttgctacaacagatttgatgaaaattttatgggatctgaccccaacaatgccaacactagaagcaagactacacaaactaatcacaatgcctttgtggcaagtccagaagtgcttgaaagtgatgcctggtttgctgacagtggagccagcaaccatatcacttcagatgcagctgtattaaaccaaaaacaatcctatggtggtaaggaaaaagtcacagtacgtgatggatctaaactcagtgtatctcatattggtagtggtagtttggacactgatgatggtaatcaattacagttgttgaatatgttacatgttcccaaaattgtcaaaaacttaattagtatccaaattaaccaatgacaataacatactgcttgagtttcattctgatgtttgtttggttaaggacaagggaacacagaaagtggtgcttcaaggagtgcttagagacgggttatacagactggaaactcatcaacaacctccatcctccactcatcatggtcaatctcaagtcataaataaacaccagtctgagtcatcgcgtttacctacttgcttttttgttaattctagtgtcaaacaaccaagcgctgataagtgttctgtatctaggcttgatgtatggcataggcgcctaggccatccttcacctagaatcttaaatcttgtgttagattctgttggaaatattttacc

SEQ ID NO: 318269 - DNA, 730 bp, Cannabis indica
ataaatttcatgtgtctctcttactacttaattactttttcattatcgtcaatttagcaaatggatgtgacttagaagtctaactaatcgagatttctaaatcaacaataagaaaaacttgatttggttttcaattgttctctaagaaaaatagcaatatataaggtttactaaaatatcagtacaaagaaacttacgaaactaataaattaatgaaaattgcttatatgtatcaatacatgaaaggaatatttcaagaaagaaaaaatcataaggaatataatataattaactaaatatagagtataaaagtaaggtaacacatactaaaaaaaatacatgtatgtagaaacatatttgtgattgcacataagcatgaagcatcatccaatattattattatcatttatacaatatatatatatttatgtaacaaacgtacgtaaaccatatatttaaaccaagtgtatgaaattaaaaacaatttacaaccgcaacatgcacaatatatataatgaattaaatatataaagaaataaataaggtgattaattaccaaaactgtgtttaatctaaatgcaacttatcttcccttttcttttttctcaaataaaatttaaacaagccaaatattaagttgtgtaatttgctgcagacctctcatgaaaattaaatctcatatatataaatatatatatatatatatatataaaagtaaatatacatatat

SEQ ID NO: 318270 - DNA, 1085 bp, Cannabis indica
ttcagaatacctgtaagcactataatgaaacatattcaagcagtaaaactcaacaacaatctcagaaattcaatccataattaaatgcatggcttgagttcataaactcaaaccttagccaaatcttatcaaaacttaccaaataaactcaaatcaaacaacatgaacctaatctaatcccatgacacgaaatcaaaacaccccaaaacctatagcaacttaaacaccaaaattaatgcataaaacatactttaagctaaggaaaatcatggagaagaggactagagttatataccttagattgaatcttccaatccccttaaaacttgctgaattgagttgagaaaagctaaattcccagctggttccttggtgttcgaaagaaaagagagaaagagggaacttgagggtgaaggaaaatggttctaggttatctcttgaaggtcaaaggttaatattttctctttgaccaaaatgggacaattaaaaacataaatattaatcaggttatccctcataataagacaaaggaaaaactctaactaatttaccatttttgaccctaattaaattcactaatagacaaccccccaagggtaaattagtcccacaaaattccaacacttccaacactcaacaatgataccccaataacaaaattctaatacatataaaatgtgactctctaaaggctcaacgtcgctttccacagtttccgaacctaatcgcaagaattgagaaatttacataaataacataataaacatatatgaactcaaataaatttccacaatatgcatttcatcaataataattgaatctcatgcatagaccctaattatataataatccaaagtgttaatcttaagcggtctttacactagcaaccttttatccgatcaaataagaatccaacgttgtcccggtaggcaagagtcaaggctattcttattttatgagcttccaccattgtttcatacttcgtaaatttatatctaagtagtcaccgtaggggagagtctaatatagacaaaaacttacaaaatacttatcatcagagatcttacggtgttaaatgctttcaa

SEQ ID NO: 318271 - DNA, 1372 bp, Cannabis indica
ccgggagcatagcttttgaacggagattgaaaggaatacctctagggaccaagggtcttcattgattcgaatagtacagtcatctcccacacaccaacgagagcctttaattaaaagctccctaccccaaagaatactttgccacactgtagaaccaaaatgaacaagactagcttcaataaagttgtcgtgggggtaatagagggcttttaacactttagcaattaaacaatcgggcattgtaaccaacttccaaccttgcttagccaaaagggcttggttaaagtcatctaagtcacgaaaacaaattcctccttgctctttaagtctacaaagtttcttccaatttccccaatgaagcttgtgtttattggaagtagaaccccaccaaaaatgagcaatcatgctttcaatatccttaaggatcccttttgtaacccaaaaacaactcattatatagcaaggtatagcttgtatcacagctttaatcaagatttcctttccggcttgagagaagagacccatcttccaacctcgtaatttagcttccaccttatccctaattttgccaaacacttgctttttatttcttcccacaaaggagggcattcccaggtacttagtgtgatttttaaccaatgaaacacccaagtttacagccagacattctgccatacttgtacctatcttgttgtccacacacatctcagttttatcaaaattgatacattgaccagaaagtttctcatacctctccaaaacttctttaatcgccatacattcagccaagtttgcatcaagaaatacaaggctatcatctgcaaaaaaaaaaaaaacaaatgagatagcctttgatccaaacttccaaatcgtaaccatgaattttcccagacctttccgcttcttgaataaggcatgagagaccttcagaacaaaggagaaagaggaagggtgaaagggggtccccttgccttaaaccccttttccgaaaaaaaaaaaaaacgtaggcctttgatcgaaccatttatgagaattgagaaagaaaccgatcgaacacaattcataacctttttgatccattcaccctcataccccaagcaatctgttatagcatctatgaaatcccattcaactcgatcatacgcctttgacatatctagttttaaagccattttgctcccatttccaaaacgccctttcctcgtgcaatggagactttcaaatccaagaatgacattatcttgtataattcgaccaccaataaaagcactctggttagtctagaaattgttgaattcatactcgttttcatgcggttggtcaaggcattttgacactactttataaaccacattacaaaggctaataggtc

SEQ ID NO: 318272 - DNA, 2170 bp, Cannabis indica
aaagcatacatatattacataccatcactgtcgtattgtcgaacgtcggtgtcaaaactctaactagcattaacttcagagaaaatagatcatcaacctgtacataaaagaatatgtaaatatttaataaaaaaatatgtaaatatgtaaatagtgctaagaaataataaaatagttgtggtagtgattaattctcacaaaactttgtagtagtagaatactaatacactattatagattgattttgtggtttggatttttgagtgttgataaagctgttgtgatgttagtatcacaatatcactactgtataattttatactcatatatagtcttatactttagggttaattatatcagtacaatatgtataattataaaatttagttaataaattaatacaaataaatgtactttatatatagtacttttcaaattgtctctcaaattgtaatatctaaagtcaatgataattgatgagtagatatgatattgttaataaataaaaattgtttctataatttttcttttgcccaataattcgtgattgactatttgactcattaattcagcatataaaataaaagttaattatatatataatatatacagagaagtaatataagagaacgcgctgggttgggttgtgtagacgtaaattttcaaaacccataaccaaaccatatataaacggcccatcatatttcaaaagcaatgaagtacggcccatattttacataaccctttaacacaaaaaatgggttgggttggccggtttggtcggctcggcccgtattctgtgcacccctatttggcattgttgcctttttatcatggattatgtgatcgaacaggtggtctttaatcccggctatcttcttatggcattgacaagtaagggtccaaattttctttgccaagccaaagtatgcctgcatgacttagaggctgtttagtagtgttaaccccaacagagttgatttttgagattagtcaacgataagtccaagaagttgagggatatcaattgtaagagtcggtcacaaaatgaccgggtgcatgcatatggccgaaggatcattatctcggatatccatacttggaagtctcggggtatatccgtgcaactcgaaggtcagccccgtaataactcatgagtaaagttagtaagataaacttactagttacaatttttggaagattttcatagtgatatgttcagaattggatctttcaataagcatgagattcaaaggtctcttccttatctttccaatacatcttgaatcatccacttttgatatatatcaagagagttatggcgaaaatactaagactacagaattgtgacaacttggtatgcgagcccatggctattgtgcaagcccatgagctgttgtgcgaccccatggctattttgcgagcccatgggatgttgtgtgagcccatgggctgttggatgagctaggggcatttgggtgagtcatgaaacctttatgcaagtggtagagcatccgtttgacccgcgatggagcacccatgctattagatgtctagtcccttagtgatcaaatgtttgagcgtggtgcaaagactcgtggatgagcccatgggggggtcacgtgcaagcccttgggggtggagatgtgccacccgcgaatatgggggaagagggagtgtgagtcatggggtgagtcgaggtaatgatgattggcatggtaagagaagatgaggactcgcatgcgagcccataggaggggcttacatgagccataggggtggagacgagggcttctcacaatgcaaggatgtggggggctcacatgcgagccacggtatgcatggggggagtgtgttttgtgaaagagctgcgaggataagggagactgcgaatgcataacgacaagaatgacattcgaaaagaatcaaaggacaaggcttgcaagagaagagtgtaccacaacaccttttgaagacagagaacaaggaggtacaagtagcggcaataatgagtgtgcaagccctaaagacccgaccaagggtacgctgcaaccaatctcctacaccctataccctgggaccaccgggcgtgcagctcgggaccacgcgcatgaatccagggaccatcctcctgcaacttgcaattttgcagttttatcatttctgcatc

SEQ ID NO: 318273 - DNA, 1844 bp, Cannabis indica
cttttatttttccacctcgaggacaaggtgattttgaaggattgaggagtgttacatgaaagggtatagggactaattagtaactgttagtattgtctagttagtataaatatgtaatactattacacaaatgggggatcaatgaatgaaatgagagaaaatttgaattattcctattgaagtttagcagtgactcgaagagtgcaatttgatacaattggtaattatatcaaaaaccgtacccaatataagttttcttgctattatttgtatggcttctgcatcctttcaatattattttcaatcaaagtttactgttaaaaaaaattaaacctacaaaggaaaaaaacaccttattcactttccctttctataaatcatgttttagatttattattattttaatatatttttttttttcagaataagctttgaattccagcaaagaattttttaactgattttatgagaaagcatcatcactctaaacactccctaaacaacaacattataaatatatataggttttatttttttccaatacatgggatacttgcgataaaattgtttgaattatgatggttataacacttaaataatcaaataatttttttagcggcaaaatatttaaatcattatattcatattattatattttttgtgataaaattacttaaattaagacatttgtatgtaacttttttttattgtttgagtcaaagtaattgacttatctgcaggtttgacaccacataaacaaaccttagttattaaaaaataattcaccttaccttacaaaaaaaaaaaaaaacttcacctaattctataaaattaaactatatttaaactcggatttctttttgatgaataatctaaattattaattcgattcaaaaattgaaaaaaattctttaaaattcattaattttgttttatgggtataaatgtctaatcccggcccctacacataggattcgacgaccttggacaacctagttgcaaataagacatttacaatgagagtccctaaataggttctattaacgttggcgccctttatttgggtaacaaatttgaataataccttactcagattcaaaaactaggttcggagtttacttcggagagacgttgaggtactttttttttacatttttgccatcgtcttctcgctttcccacattctttctacttcatttctcactaatcttacttgatccaatcccggcacagggattttaggtttgagttttggaaacctccgccatggaaaatgttgtcctcgttgattcaggtaatttctcaagtcggcaaatgcatttctgttaccctaactttttttccatttcttggtttctttgcgtaatgtttacctcttttatgaaattcttgctgggaacttcaaatttggactctatatgttgaatttaacgattaatttctgaattggtggtcagacctcatttctacacatacgattttagggtttttagggcgagactatgttaagtttctatgtgaccctcttcgggggcttaaggaagttgaaaaacgctgttattgtcctcttcggtagaactctggacttgctgtaatttttttcgggggtatggcatttgggtttttgttgaacggttggtatatctttggtatggttagcagtatggtagtgaccctaaaggaaaagctagccgtacattagcaacttacagtcgccgatttaatccgaaacaatcaagatgctaaagcctaagcgtactacattactgctaaagatatgttgaaaagctcacaggtataatgctcgtgtttttgaattgcagagctgtccataggctctctca

SEQ ID NO: 318274 - DNA, 2084 bp, Cannabis indica
tttcattttgtatacagttaacccccttttgatttttttcggtggtaataccccctcaagtcttattctgtttgcaacgttactgttcacttgatttaatcccgttatgtgcctaagtactatatccaactcagcaaaaaaatgccacatgttaaactaaattatttatgtgtcaattaatattaaataataaaaagaaaataaatgaaaaatgaatcgttaaaaaaagtaaacccttaaatcaaatcccaattgatttcaaaaaaaataaaaaaaaaaaaaaatcagatcccaaaaggaaaaaaaacccaatcgtgcaaatctaataagtgttggagagggaagctccatcccatcgttaagaagaagggaacgcaacacaaggtcgaagactccattagaatgtcgaaggcacatggagaagatgatggtccacctgattacggtaaggatttgttactttgtttgaacgattttgtggtttcaaagatgtttgagcttcatcttcgaaaaaaaaaaagttgtttggcatttgttcgttattactttgtctgaagaagaagatggttctcataaacatgtaaataattattgtaggaatttaattttttaggctgtgggtagtaggtagtgggttttgtttggatttattttatggaaaatttttatgtggttggtccatttgtattaaattacatttgaatatttgagaatctaagtgagatgtcatctgttaagtggggtacatattcacatgtatttcttttgttgtctgtatgtgatggaatagggtaaaaagttatgggaattttacctatgacatatgctttgtttattttttttatattttgactcaagttgaggtatgtttttcttataatattataaatttttaaatggtacaggagataatgaacaagaaagccaagaaattgaaggtgatgcacctactactcaactgaacatccaaactgatgcaattattgtacatcgggctgaaacagggttggtgaagaacaacctattgcagatgactttgagcttgaagaggaagagttttttggtgaaccagaagttgagaagcagaatactcgggagccagaagtttgcagctggtgggcagctataacagatttgcatatcgacaatgatgcggaagatgaagggctcgaatctgaatctgatttagcaagtggagatagtgatgaggatagttcgagtaagacaaagttagaatataatccaagcaccaacatagctgacttcaagtgggacattggcttggaatttgggaatgtacaattacttaggactgccgtaaaggagtacttcatacacattaatgcagaatataaattgctagcgaatgatttagaaaaatttagggctaagtgtagagcgccggggtgtcctttctttgtatatggacatgttaaaggaggtatatatttattctaatttaatttcttgttattgtttttgtatagctgtgtagaatatttttatttaagcaaaaaaaaaaatcacaatatatattttgtttatatactgaaggccatatcaaatcattataaataaacaagtacagtaacttggatatacaacatatctcttatttcaataaaaaagttgtaacttggatatcttctatttcaatagttgacatcatgttgtaattatagtttactaatgttaatattgtcttgattgttttggttcttgcagatggaaaaacctttcgaatcaatcgtcttaaggacactcatacatgtggtttagtcttgaataataagcacattgatgcacaatggttagcaaagcattttctcgaccagtttaggatgcaccccaacatggagtactcagcattcaagactatgacacaaaattcaaagttttcagaagtgacaaactggcaattttccgggctcgagcaactgcaagggaattttagacgggtctgtcttgatcaatatgcaatcttagagattattgcaaacaactattagcaaccaacccgtggtacgtactgtaaacgctacaaactcaactaattgatgagaaaagggtgttgagaaggtttc

SEQ ID NO: 318275 - DNA, 1306 bp, Cannabis indica
aaatatataaaaattaaattaatataaaaaaaaaatcagagaaattgttcataaacaaattgcaacatcatcttccccaactttcaaactatccatatagacacaaactcaaatctctccccgtttatcctcctactattctaaaagtaattaaataatcaaataacataaaaaacaaatcaaaagctcctgtggcgagatctaatagattggtggtcgggaacgaagacctcccatggtggtgagccatcgacgtcgacagagctacttgtaggaggagaagttgcatcatgccgtcgccatggtgtttggttcattgctagtcgaaatctgccattaacgtcgacaaaggagactggacatagaagctgagaaagaaagagaaaagctattgagagtgtgagatggggttttgggtttcaggatctctgaaagacgacggtagtcgctccgagggttatctgaaggcaaggaggctctcttcggtttggatcgagtgggttatttgggcaaataagtaataaatttctcagatctgaatgagtctttttctattttgaataaaaagtttatggattattttggatgtgtttgatgggtttttgaagagcatgattccttaaaaatgtttgtaatttttcttattcatgaatcagatttctttattcttttttatttgctaagatgatggatgagacgatgagattgagaagacagaggtggtgttgtttctttttttttttttggttaatgtttttgtgaagaattaattgtaatattaaaagagagatttttgcaatttagatttagattgtttttctaagttatttttttaaaaaaatatatatatataattaatttttccatttttttaaagagcaattaaataatgccacgtgtgtgtccagttgtcatttaacagagaatttaacgtgaggtacctcatttgcaacaaaatattgacagaaggtatttttaccgccaaaaaaataagttaggtatttatctgcaactgagagtaaaacttaggtagttatgccgcaaattactcgatagatattatggtaaatttatcatatctaatacaagttcaatatcggtcccttccaatgcatactccatgcatccaactcaagctttactttaagggtaaatggcggcaaaacccccaatactttcgtttgggtttcattaaacccccacaacccaaatttctgcgggtaaacccccaaaaccactattctgttagcaatttaccctttcgtccaaatttaactgttaagtgccaggttagcttgtccacgtg

SEQ ID NO: 318276 - DNA, 514 bp, Cannabis indica
tatttttgtaaatatttgtatgtgggctgtataaatattaaatgggccggcccatagtaattttgtaattttttttccctttttgtattttcctatttttttcccaaataataatttataatttaaaaaggatgggagttacaaactcgtgagttagtgggattacctctcccattcctcaataaaatagagaagcaaataagttaactaaactcatttcttattctcattccgtaatctaatatataaacacaccttagtatttatttattttttattttttttggaaaaaagtattagccacaaatactaagaaatactaatgatacatttaccatacaatattcgttatcagaataatttaatataaatatataataaaataaataaaaaataatcataattaatatttataatatgttatttactaaaattggttgggaatagattaataatgatttatcttgtttactttatcatggaacataatcagaatacttaaattgactaaatt

SEQ ID NO: 318277 - DNA, 2077 bp, Cannabis indica
agttcgatgtatcccctttttccacattgctcgggtgggcgaggcctaaagacaaaggatttacatcctcgatgacagcgtcagttccgtaaggagggttcttcttggtaacagtttttctcgtaaacaccatggttacagcaacactataggtttaggtctttcttcagctctaaatgaaagtaccaaaatgtttactgaagttttcaaaaactaaatatttaggagctaaataaataacaaaatacaaaaattaataagatggagatttttacgtgattcacgtattaattaaccttagtccacgagtaaatctattagcctgtaagagggtatttgatgagtttacagtattttgcaagaaatcttaactctgtactcttagtttctctctcttgaagaagaattagagcaatattggaagagcttcggctatttaggttgtgatcgccccttcgtatggaagtagaagggtatatataggtcgtgtggaaggtatgaacatgcccatgacccacctacgtttttttgcgaaaggctcactaatggggtacattgcatgcaaaaagagctgaccatagggccccttaaaaataattgtgctcgtgcatgcagcagctggggaccatcgtactgggtagacacgtgtcaccaaaaggtttaacctttaaaagtagaggcatagaataacagtctggcaaaaaggtggatgaggtacacgcactacaatgcctatagacaggggacaagattcgatcctgcgtcaaaaaaaagtataaccgtcgctgggcgatccaggttattctaaaggtagacgttcgcaatactcttgggcggtcagtgtctgtgattggcctgcattcgagaagcaaagatgaggcgaggtagacttccacttatctcttggtcttgactgttcttagtttcgtgaagcttctccatgactagactattatggggatttcaattagggaaattacgagattatctcttcctttttatgccatgtgttactcgttgagaaacacgaataacatcgattttgaaaaaaattaaattccgcaaaaaaatataaaaaaagttgagtatgatatataaaaaatatttttaacatatataatgtaaaagagatatttttttgatattttttttaattaaatagtgaaatgaagtatatataattcaatttttttttattatttacaatcgaatcaaatttaattgttatatatttttaaaattaatatttatatttaaatttatttaataaacaataagtaatctattaaagaaagtgtttcatatatattgtaatatttttaatattcatttatattgtgtaatattcttttcaggtaagtactagtctatttcttagtatagtggcccttcataataaaagtcaacacaaaatttaatgtaaaattttttaaaggaacagttggtttcaagtatagttgatttgtttttaatttattaggtatcactgcatcatcttaagagataattaatcaatgttatatacgatggtgttagtgtataatcaaatcttatatgatggtgtatcatctttattatatatataaaacaaaaaagtggaaatttaaaaaattaaagacttactcgatagagatattaaatcattgtttgttttttttcttatttcaaaccatactaattgtgtaaataattaatttttaacatatgtatgaatataattatatattacgatagaaaatattatgcacattttaactataatatctaatatcgttttctttaattttcaaatattcttacacttttagttttcataactactacagtgcttcaatgcaaaatatagaagatgaataactttttttgacatgcgaaagacacgtttagaatattaatattaattataaattttgtaatttatttgaaaatatttatttcttaaatgtttgatggtcctagtggctgatccaatgaagaataatatggggctcttgcttatgctattttatttttttctttcttttcttagtgtatataaagaattaaaataaaaattaattatgtagaataaaatagg

SEQ ID NO: 318278 - DNA, 1179 bp, Cannabis indica
atcctctttttgcaaatacagctattgcatgtgagcgtggtatctcatctagttggaaccttctgcagctacatggttttttttttcagtatgttgattgtgaaatctccttttacttggacctttacttggtattagattgttgtgattgctatgaccttttttttttgtaaatataaataaagtgttagaaactggttttgcaacatgatcaagaaacagcttgctttgggtcaggttgaggagtttaaaagctcaggatcgtttttcacctggacaaacaagcatgaagtggggggaagaatttactctaagctagatagagtgttcataaataatatctggctgaatgaatttcctaactcagatgcctgctttaaatgggaggtcacttcagatcactgttattgcttaattagatgcgaagttcagaataatgtaggtgttaaaccttttcggtttgggaatcactggccctcctaccctggttataatcaactggtgatggactgctggaatgtaaaggacacaggaaccggtcttgacagcttaatgaagaggttgtttcgagtcaagcatgcgctaaaagtctttcgtaggaatgaggtgggagatgtggcaacgaagtacagggaggctaaggaagcttactgtggtagtcttgaggatgcagccttgaaccctacaaatcatgccctgcaacttctggttaaagacaagcagagattatttttgacagctaaggagagaatggatcaaaatcttctccaacaaagcaagatcaactggataaagtttaatgatgaaaattccacctattttcataccaatatgaggaaaagaagactggaaaataggatcactacattcatgaagggggatgctataatagatgagtttgaggaagtggtgaaacactttgtcaagcactttgaaaatttcatggggagcaagagttcagcggttagctctattgatgtgacttgtttgaagcagggtaattgtctgaacttggatcaacaagttcgtttgattcggccgtaaggggatgtgaaaaaggctctcttcagcattcattcttccaaaagtccggggttagacgggtttggctcgggattctataaggacctttggagcaaaattggtgatgatgtttcttctgcagtcctgagtttcttt

SEQ ID NO: 318279 - DNA, 775 bp, Cannabis indica
gactactgactgtcacaaaaactatattctaaaaaaaaattaacattcacaaaaactaaaaggatgttccaaaaaaaaaggaaattattggccaaaaaaaaatggctagttgttagtgttgacgggactctcaccaacgacttgttaattttactgtgcaaacttaaataaaatacaattaaataatatggcataattatattggttagacacattatgagattctaaatttggacagaagatcttgattcacatgtaacatatcaagttatactaacattaatgttggacactattaacacttaataacaacgtttgttaatctaagtagactttttagtcactaaaaaaaatagtgactgaattaatcattagggaaaaatagttgttgatgagttgctatattacattactctaataatgttgctcattggattgaagtggacttatgaatgattcatgtagggttgtgaaactggctggcatgcctgtaaaggctaccgaccaattttacactcctaagcttatcattaaaaaaaaaatggatactaaagcaagtaagatgatttcatagccacttcatctaattttagctatattatttgggacaaattgtacttgttaaaaagtaagatatccatcttcaagtacatggcaatgaattttgttacttaatattatttacaagatacttttaaatataatcatttctcaaaaagtttagtagataaatttctaagaataatttcaaaaaaaaaaaacataaaaacacaaa

SEQ ID NO: 318280 - DNA, 908 bp, Cannabis indica
agtggactagtcccgttttcgattgacagaattagaatattttccatgaattgcttattaaattgtatagatgagatagtttttgaaatttataatataccttaaatcataatatgaactgcctaatcattttatgactatcttaccttaaagttggaacatcactaatcaatgtgggattgagaaagtgtatgtctaagcaaaactttctacaagaacatatgatagatgaatttcaagtctccaatatttttgctgtcatgagaaaacataagaaatgtttttgtaaaaatattgtcccattattttaaagtttatagttcaattttttttttttttattataattaatgaatcctactattttctgattatgtgcctgtattcataaatatacttcttctcctcacaaaatcattttgttaaccttttatagggttttacctaaaatggccttttgtgattatttttaattagattttgatgattatgttttgagtgttttagaatatgcaagatggtcttcttgtaaccattttgttagttgtttcaaaaaatatatgtattaaggttaatttgtggcattacttcctaaattattttgattcaaatcaatccttcaaaatttgcggtataaataataagtttatccgtatctattttaactgctttattaattcatcccaacatgatacagattaatattttttcctattgatcgccattatcatcaagattcaagtaaataatcagctaaggttttttttttatttatttatttatttattttttttattttcatgataaaaatatacattttttgaaatttcaagataaaattcttaagttgttacatactaactaattattttttttgagtttataaacttttttgtattcttaaaaatt

SEQ ID NO: 318281 - DNA, 671 bp, Cannabis indica
taatgagcttacttgttatctcttgcaacaaaaccttctagttgtcaagggtgccagtgtgaagagtgtgaagagggttaggggaggggaaactaatgccttgtccaacctctcttcaatcaagttgtccagactacaacccttttcccacgtaaaaggatacccatgcagctcaaacgtcaacaagaccatagttatttaacacttccttgaaactatcaattagcactgtctcccacctcgcttctcctcgtgactccctaagttattcatgtcacctaccaaacaccaagtcagctcaaattgggtctttaaagcatgcaacaaacactacgtctcccttctcaactcatgttgaggctcaccgtaaatgacattaaggcgccatggatgcactcactcaccaaaacatcaatattattcttgcagaatccttgaacaacaatctcattctcattcctccacaacatagccaactcgccactatgcccatgggcatccatgcaagaacacccttcaaaccccataagaaccttcactctctcgacaacttcttttccacttaaagtttcacacaaaaaaatattgggcttctttgtagacattaagtccatacgtgttgagaatcatggggttccatctcaaaaccaattggcaatgagtggagtagc

SEQ ID NO: 318282 - DNA, 680 bp, Cannabis indica
gaggaagatcatgaagaaagacattcaacaagaaggagtttcagcatcaaaggaaggagagaaagagatccaggttcagatgataatactctgcgacagaaaggatacaagagatagagatctcaacggaaggagacatattattctgctgcaccggtaaaataatttccaatagctagggcccgataaatggtttggtagtttgtcaaaattttcaagtttagtgtttggtccgataggaccgatgtagggcccgatatagtgtctgattgtgtgtttaattttccaagtttagtgttttgttcgataggaccgatagagcccgatatagtgttcgattgtctgtcaaattatccaagtttagtgttttgttccataggactgattcccaatatatggtcttgatggtgtgtccaattaaaagttttattaatgttcttaataatttactaaactattgtgtcactacaagaaaaacctcttttgccggcgcagttttgcgtcggcaaaagtacactaactgtgccggcaaagcttatctgtgaatcttggtcagtaaaagactttttactctacgcgccagtaaaacttccttttaccggcgagaaatcacgccggtgaaaaagaagcgtcggtgttaaaaaatacccttatccactatgaacctgctttgataagct

SEQ ID NO: 318283 - DNA, 1416 bp, Cannabis indica
ttaatttatattatttagtatatttatatatattagtttatcaatgtacattacaactcagatcataattgtttaattgtttttcttacatttaactttgatatagtcattcattttaataagtttaattgtgattaaatttcttaattttttgagtttatcacgattaaccccattacttaagtttttgggtagaactcatcaaactctagttttgttttgatcactattttgtccactttagtttgttaagtgtcaagattaactgcgacggtgtacaaaagtatacatgtaaaaaaaattcatttgtccacctattaattatataaatattaaaaaaatgatttaaatattaattattttttatccttgtatcctttttctttctttcttctttctccttatctctttctctttgcttggtgcggcgtcgaagtccgaccaggagcacagtgctctgaccatctctcaagtcatacctcatatccattctcccaagcccgagaatcccgggccccagcctctctttctcttccttcctcaccatctctctcccgctccttctcttctgttctcgactcaaccatgaccttgccacgacggccgtccatggtcgctgatggtctaaaaggaccacagaaacctgatctcgaagcctagaaacctaaacccagtgatcccctgagtatgtctctctctatttctcaatttttctatcgatgaggctaaagctttttggcttcgatttggcctctttgattgtcaataagctagaagaacctcgtttctagcttccttgtgtcgagagcttccagatcccatggttcgcttttccatgcaccacttttgatcgaagacgaccaccacgcacgacaatgctctaggttggggtttgatttccaagaaggagaagaagaagaaaaaaagagagaatttttctttttggatttaaaaaaagaattaaattatttttataatattattaatattaggtggaccaataataatttaacacgggtacacttctgtacatcgtggcagtctaccttagcacttaacagatcaaagtgacgaaatagtgaagatcaaaacggaattgtattttggagagttttactcctaaaaattcagtaatgagggttgatcatgctaaaccaaaaatttaaggagtttggttgtaaattatcatttttaacttaataatgttaattcattttcatatgtccaaaaataataagaaatttatgcaatatacgtaaaaacataatttttttaatattttttacaaattttgagaaaattataaattttatgaaattttatactatttgtgcaaatatatgatttttttcaatatatatataatatatatctatataaagtgtgcctatataactgaattcttgcgtttatgag

SEQ ID NO: 318284 - DNA, 1782 bp, Cannabis indica
catttaataggacttagcctgcgaacccataagccaggcaagtcagaaagcgatcataaaaacttaatactgctcttatggatttttaggcaacacatttaaaataaataaatataatctaatatacttcctaacatgctttcataatcacatataatactaaacaagtacgggcttactgaaccgtgagccgagctttctctgatgaagattgtacatgtcttggcgtgctttggtagataaacctagcggatctaatacgaaaattgtaatgccctaatgctaaggcacgctacagtgatttttcaattgcagtgctatctttgctaatcaaagaattttctcaaaaatcgtgacaaattaaaacttttgatattaactgtgaaactttataaacttcaataaaatatttacaagtgttgggatcctgttgttaaacttttacaaaaatatacgaaatagaaatgccaggtcgcacaatgcctagaaaatggaaatccagatgtcccgagaccgagcactccaggtcgcgctgccatgacatgtacaacctcatcccagctcaggctcactcctgttcagcttttttctttcctttacctacacatagaagtaaagttgtgagtcgacagactcagtaagaaaagcatatcgcatatcacataatatcgaggcttaacagatgaagaacgttccatacaagggtacaactactgtaccacatacactacgtacctctttgcacaagtgttggtagggtttgtttgtaccctgagtaccactgagtgatataccacacacaccctgtactttcctgcacttgtgttggtaacaccgtaatgcactccttaagaatatacacgataccaatgcactctgtaccatttccgtacaagttttggtagtgtaataaacatataaccatgcgtatacacttaacatatacatacattcgcatattcacattacatattatacacagttcttacctcctttcaagattcaagtgagttggctgacctatatttaaagtctcgtgctggatggatgccctaaccacataacataaccaggtaaatgagatgttaaatccctaatctaggaaaccggaacctacaattcaaggtttttctattactaatagggactaaaatatcctaggaaataggaaaacacccaactaaggcactgaaatgggcaagtattgagaaaacacgttgattggggaatcttccaaaactggttaaccaattttacaggtactggcaaaccagttaaccggtttgcaccagttttcccccaaagaactcccaactttttcaaaacacatccaaatgctaccaaaccttccagagtacctaaaacaagcttacacaatattttccaaccaacggaaaccagaaaaacagactgaatcaaaatgtgccattaaaggcctaattttgagtttagaaactcaaacttgttcaattccatcacaacacatgaaaactagcatccagaacataaaatcaactcaaataaagcccaaaattcaaaccaaacacaattccaaccctaaacagcccctatatctcaaaatcacataatcaaccaaacttaaaagcttcaaaaatacaaaactatggttctagggttaccttagcttcaagaacacatgaatccttagataaattccagaaaagtacaaggtttcgaagatgattccttcaagttttgcttcagctgaaaaagagaaagagagagttctctatttttgtttttttctttgatttttgattt

SEQ ID NO: 318285 - DNA, 1458 bp, Cannabis indica
aaaaaaaaatgagaaaaaatgtgtgagtaaaagaattttattttagaaaaggctaaaagaaattaattaattaagattcttttataaaatttgagtaactacagaaaaatagtatgaagtagtttaaaagtgaatggtgttgatcttgtatttgtttaacgatgcagagtcaaatatatgacaataaaagcattttatgatgaaatttagaaagcaatggaagaaattttatagatgttcggctccaattatttggtagtaacctactatccttttatggtatttattgaagagatattaagatcacaagaaccagagtcaagtgagtttctcaatattcttctaaggattacaagtgaatgtttctacagcataatagctctcttgaaagtgtaaaaattgcacccttaaaaagtaaaatgagccattatttcaagggttacaagtaggactgaacatttcgagtaggttcgacccgaacccgagcaacccgtctgaacccgaaccagtgaacccgcaattttttttttaaaaaaaaatgttcaggcggatcgggttcaactcggtacccttcaggcgggttcacgagttgagtttttaggagtaccaggtttcgggttgaacccaaacccgcccgccaacccgcatatttaatatattatatatatatattttattttttattacattatatatatattaattaaaaaatcaaaagaatgaaaaataaaaaccctaaaattgttatattacatatgtttaatttaataaataaaaaataaaagaaattattttttgaataaaaaaattaatttttttaaagagttgatcgagttgaccgggtcaacccgaccaatcaagacccgccaactcgtcaactggtgccctatctgtgtccgggttcgatttcatttttttgaacctgaaactcgaaaacccaaaacccgcgaacccgaaactcagtaaactcgcccgatgttcagcgcttcttgtagtgtgtttttaagtggtttttagaatattttttttattccacagttaccttttagttgtttttttattcatgcgcatttttatggtatatacttttacgttactcttcatttttttttcgttgtatgtgtgttgctttgtagatgtagatacttatgtttaatttattttttttgacacatttttttttaaaatacaatgattcattttttttatttttttaattgacacatgtgcactagtaaatattaacatattaaaattatattattatctagttttttttttaattatatattacccattatattatataccatattttgaaaccataaaattttattatttttattattaatgcaactatttatttaatttctaaaaataaattactattttaactgtgactaactcaaaaagaaagaaagaaaaaaaaaaagagttgaaagtatgaagttgtaacaa

SEQ ID NO: 318286 - DNA, 1265 bp, Cannabis indica
tagtgtctagcactctcttatgtgtcaatattattatttatctaattaagtattgaatcctatatagtttaatataataactttaggaagtatcgctagccaacgtaacatgtctagtcatatgtatatttagttaaatttgacttaaatgttacttcaattaaaattatcaagaatgatttgtttaataaattaccacactacaaatagtcttccaaaaaattgtataaactttttatatacacaatgatgcatatttaatttttatgagaatcaaaagacttttaattatatatgtataaataatatgtacaatttagatgtgtcataatcattattcttttcaaaatataacaatcatcattacaagaaaaatgggaaaaataagaaaacacttatggctccactccagttatatcggttagcactagagaggttgtgcatgcagaagcatgtgcctttattgctgatcacaattcacatgtggccgatatcattcaaaacccaaatgctccaccacaccactacattattacattatgttatatctcaatcttccaaaatattcagttattttttttttttttcagtataagtttccaaaattaattttattagtagtgatccaaattatttttagaggagaaagtaagcaagtttagtaaaacactaatttggttattaggcttcatttgttaagtttttttagatattgattaaatgaacatgtgtcatgtaaccccctacttaaataagcacgttatataatgttttctaagttactgtactaatttttacgaattaaaggatttttatgaaaaatatgatttatttaaacttttataaataagatcaattttacttaaataaacatactaaatacaatttttgagatcgcgtaattataattttaaatatttcaaaatacattataatctaaaaggtgtcatctagtaactacaaaatatataagcatatatcgtcctaaagaaccgaatcctccaagcctaaccatctcaatatgtacaatcactaataagctccaaacttattattgctcaatttttgctttgcattacctacacatggaatcatatatatatgtgagtcaacagactcagtgaaaaaacataaaacatagaacataaaatcatatagttcgtcccataaaatcatatatgtagtattatatcattgtaatagtatctaacatgttgtattcaatttcaactttcactaccattcatctcttagtcacaaaatct

SEQ ID NO: 318287 - DNA, 756 bp, Cannabis indica
ccaagcatatttgggactctatgcagaggaagtatcaaggctctacaaaagcaaagaggcagcagcttcaatcacttcatacggagtttgaaacacttcgactgaaaacgggagaatcggtgtcagactatattgctcgaacaatggcaattgtgaacaagatgcggattcacagtgataagatcgaagatgtcactgtagttgcaaaaatccttcgaaccatgacaccaaaatttaattatattgtttgttgtattaaataggctcatgatattgatgaactttcagttgatgaattacagggttctttgttggttcatgagtataaacttactcaacaagaaaaggagaaagaggagtaagctctaaaggcatcaactgaaaacaatacttaggcagctaatagatcagcagatcgtggacgaggacgaggcagaggtagaggtcaaggaggtcgagatggaggagcacgaggctatggaggcaaacaatttcagaacttcagaactgaaaatgagccattttttcctcaaagttggggaagaggacgttctcaaaagcttgacaaatccaagattgagtgctacaaatgtcataaatttgggcattataaatctgaatgttacacaagactgccgcaaaatagagaggtggagaaatcaaatttcgtagagagaaaggaagtggaaactctgttgatgacaactcatgtaatgaccgctttagtaatttggtttagtaaaggcaattagcact

SEQ ID NO: 318288 - DNA, 1107 bp, Cannabis indica
atgtagttcgacacaactacctagggtttttaagtaaaataaatagtctttaagcttattttaatatttcttatttttcccaatttaattgttaatatttttttgagtgcaatggtattttgcaatcaattaataacttaatagtttaaaggtcttgggagttcaaatttatgacctctccctttttcccatctagccatagtagcttttcaatttaattcttaatggactataaaactattgatttctatcacacctatagtatatgtgacagtataaaagcgtcagcaacaagagtagacccacatagaagcgaggtaggcaattgccctccaataaaaaaaaaaatatatatacatttcagctagttacaaaatatatttttcaataaaagtgatagtttatggacataatacaaacttgcgtataatggtaaagctattttatatacatattggaattcttgagttctaatctcaataaaaacatatttactttagtatttgaattttactttttgaacttctaccaataaagacttgtatttagttttttaattattgaactcaatattttattgttacttttttatttactttatactacatttaatgctaaaaaacaaatttgcatcaatttttaaaatattatactgtgtaaaaaaaaaaaaaatgccccctcacttacaaaaaaaagtgttgccatcacttaacttaaatcttgggtccgccactggtcggtatatactatattattgctgacagttttgcacagccggctacaatttttttttaattttgtatttatttccttcattctcaatattatttataattttaattgttatgtattaatttttattagtgattatatattagtttttgttgaaataattataataataaagatttaatttgaaataaaaatacaatttaattatattattaaagttaaagtttacaacatgataagtatttacaagtctaactatttgttaacgcagactttcgttaaccaaatttgagcctcacagtagtgatttcaaacagaaaaaataaaagaatgtaaaaataaaaagtatgaacacagagtttttacgtggttttg

SEQ ID NO: 318289 - DNA, 2647 bp, Cannabis indica
ttccacatatagctcatattacattatataaatctccgtaatttacaaattacgcttatttactcacttatagcaaaatttaaattttatgctaaaataaactaataggatcataatcccacttattatctaattaacccataatataaatataaaccctaattattaaccattagacttatcagaatattacaaaagtcttacttttaccagcgcattaacgcgttgacaaaagtctaacttttaccagtgcgtacatatgctgggaaaaatcttacttttgccagcgcattaatgtgttggcaaaagtcacttttgatggatagatatttgacttttgccaacacaataatgcactggtaaaactttgtaatttaatttttttatttaatattattatataatttaaaatttttatcaattatttttaaattaaaataaataaaaaaaataaaacaagaaagcttaattataaataattacacaataaaatataattttaaattgttctaattatacatgcataatattgttataattgtctaaaagttagtaaataaacatatgcttaaaatactgttaagcaaaaatttcacatttaaaatattaaaataaatacaaaacacaatttcacctatgctgaatttatagcataagagtttattaatttaagttcgacccatccaagattataagaataacctcttaattacaatccttttatttaaaggagataccctttgattccaattacgatgatattaaatgatttgaaataaattagggaaatttggggtaaatttggaattgcagctgaactcagtcaatttaattaaccgagctgcctacataccttctttgtgaaggatcaagccacttgtagttcagaatgcggtattttagaatttgaataaagaattccggtatatgaccactttcaagaattctttgctcttttgaaaatttggaaaaaattcctaggtgtatgaccttttatggaattttgagagttgtgttttataccatttttgtggtattagtgactgcacttagtcttagcaactaagttgcctacgtatccttttataggaatcaagtcaaacgttgttccaagagtattaaaagattttgtatcttcgataactttgtagagaattaacttactttgatattttgaggtaaatgacctcatttgggatttttgaggtagatgacctcatttgaattttgttgaggtgaatgacctctttgtgaattttagaaattgggattgtacctaatcttagcaattaggttacctacgtatccttttgaaaggaatcaaatcgaacgtagttcatagcatattttgtgatgctttgataattaagaggtgaatgacctcttattttgggatgccatttaatttgttatgactttgaattttagtgcactatttaatttttttttaggtaaaattaccctttttgagattttttgtgagattaatgagctctttcaaattttgtgaggtgaatgacctctttaatattccaagattaattttgatgagctcatttagaattttataccattttttatgactttaaaattttaccactttttgtgataaaatttgggccttaaaatttctttattatcattttaaaaaataaagaaattatttaacagatatttaaattaattatttttaaaaatctgaaaacaattaatagatttttattatcagttgaattatcatttttttttataatttaaatttaaatctaaattataaaccgaattgtgcacgattttgacaaataagatattactatcttataattcaaatttcaatcatcttaggatattatctctttgaatttatgtactttaaatcaaaagaaatataaattgacattcctcaacaaaagtcttaggcttggtaaattcaattgattttcttttgttctttacaatatatataatacgaatacatgactatatttctcttttgactcagcatacaagctttctttttccaattcatcgggggaattctcttaaggcttttggaatctgattcaaaattttacatgcacttgaatatatgtaagttacttgctcttttattatttatagagaaaagaaaactgccaaaatttatagagaaatatctcaacaaatttctgtcgagagttagcgattgaacataaatcacttataaaattttgacagtgtaataattctctttgattatgctaattctaattcttaatgagaattttgacagcatcactttttcattatttaagatttttaacttcttctttgattatgtatcccatatttacttattttttgaagtataaatctatgaagaattgggcagcataacggcatggagacattaaactctcttatttttcctttgtctatatctcacttttgaagatcttttatggcttagagagcctagatcaaagtggaccaaagagaaaataagaaaatttactagagaagaaaagaaaaaagtttagaaagatgaaaagaaaataaggaataaccctaatacttactctgtagaacttctttgaagatgagaatatgtgagtattttctctgtaaattttagcagagttttcttttcttcctttttacttttctt

SEQ ID NO: 318290 - DNA, 984 bp, Cannabis indica
cagagtgcaaaaattaggataacatttgccccccaagtctatacgggacttccaaagttgcgtgtagacttcatccaagctgccattgcatttgagtaggtgacacgtgttaggcgcggttgttcgtgattcgatgtgacgctgaccaggtgtctcttcagttttcggctaattaatgctctgacttaattagtgcctcgaaacccactatttctcatcacattttgacggttacacttaattaaatttaatttcccaatatttgcttttgggagagaatcgatgtgtctaaaggcattttgaaatgattgcctttttcacctctctgcctataaataaggctgagtcttcctcataagtatacttttaccaatttctccactaaacaaactcacaacaaaaaagatttttacttcaagtttgtcgtaaaatttccaccaaaagcatttgagcagcttcatctggatcgaacttaggcatcaaattagtgagtaagttttcaatttccatctctttttactttgcatgtttaatttctgattttcatacatgcgttctccacttgtagtagaagtagatagaaaatctaggctcaaagctttgtgattttctctgtaataatctgcatagcttcaaagtttctgacattggcctttgatcgcacattgtttgtctttcaccttgctcattcaaagcttcgtgaaatttaaccctgaacccaaaaatttcaaacatctgggttttgacaaatttttgtacattttttatccttttaatctattgagtactcctggtcggcatatttgcgtgtttactgttcgatatcccgaccaaacactaatctcttgtgttgtctttcgcagatggaccttggtgatttttggggaggcgaataccgaattgaccaggattattataaattgtaatacgtgtataaatattatatttactaaaaaataatactatgataatatagttaggttt

SEQ ID NO: 318291 - DNA, 2290 bp, Cannabis indica
ctctgctacacgaaaggaatcaagggctagagatttgaacggaagaagtcattatattccgctgcaaccaatgtaagattttctcaactcttatgtatttattttcattattttagagaattcatagtttagggtgttaatcaacatacttgttagtaaatctagatcctggtaaaatattcccaacaagtcttctcccataaactgcttggagaggttccaattaaacctaccatcaagaaacaaaaacttttaggggtcatttgtgccagatggaaagtcaggaacagagaaaagaaggaatggaataaaaatcaacaaaataccaaaaaccagaaggattttgggcattataaatttttactagcacttctactgcaaaatgactaatttcaagaattcctaacatggaaaactaaatgaaaatcaacttacaatgcctaaatctaccaataatatcatattgcacaataaaaaagatcccaatttcatttagagcaacacatgcaaataagacgtgtagcagtaaacccagaaaacacaatcaaaatacaagaaaatgaattgatacatacctgatagtggaagtgaaggcgccaagctgattgtcgctgggtttggttgaggtagttgagcacacattttgcgaagatgacgagcaagggtgatcaacaaatcaatctctgcgttgaaatctagagtcacgacttcttctagtgtgaaacttttaatctctgggagttgacgatttggaaattctcgagccctaatacttaatagaataaagttcaacatcatgatctagattgatttggcctattttggctctgagtttggttctaactcttaaagttgtagcgaaactcaaaatctataggctaaaagtttgaaattgggtagaaagtggtgaatggagtcttctaagggtatgtatacccaaggtggcaatccttgtgaagaggatggaacggtccacgatcgtatctccaaaagcatgactacatccaatggttagggactccaatagtgaaagcatgccaatacaattaatgctctctagaatcgaggcgcaaatcaatgatgaatatgctattttttttaattttttgggccaaaaagtgaacaaccgttaaaatagaagttttcctagaaagcaactcctcagtatacgtgctcttccaccactagacaactgtcgcgtagacttatcacgtccaaagatggaagtcaccttccatgatcgaccaacacctagagaattatataatattacttctaatccttcacatgtccacactaatggaatggggcaagcttccaccatacaaaatattctagaggctttagggtaaaagttattcgtgcttccagcaagggacacgtggaatccaggtcagcatcaaaggtccacaaataggccccaaggatgacaatttgggccaaagccaagttacataggacctttcaagaatgtaccttagctttgtgatcaaatgatcttccgctagtgatagctcatattcaaaagcaactccagtatcatgatgccgaaagagtcagacaacgtgtccgtagaagactagtccagttttcctttttattcatgcaaataaataaggaaatagatgcttctcagatctcgataaaaagatcgtatcacgctaaaaggagaaactacctgaataaagatcaagcaattaattcacgattaattgcccacaattataggacacaattttgactaattcaaccgtatttaatctgcctaatcaacaaatcatctccttcgtgggctagacttcacaagacaacacaagttatgtaattcaatgtaaactcctcaatagaaggaaaaggaaaactaagtgtaattctcataacactataaatatccagtgaatccttcaaattaagggttgaaatctcctacaatattttctcaggaaaacttgagaacctacttgtgttcctaaaggcttttttagcttaagttacataataacattaactcgtgaactaaagttcattaacactccaaccacgcaaatttttttttgtgttgttcttactctttctcttttcattatttttttcagttctaactatttataatttgttttctaaaaatctcggtaaacacacatgaactagatcaaatgagtttcttgttatctctcaaagttactagtaatttgacaacgtaatagcactcttgagaatgcaaaatttggtctcccaaatattgaatatgatctactatttgtagggaaaaggtgttggaaatatttta

SEQ ID NO: 318292 - DNA, 673 bp, Cannabis indica
aacaatatttacaaactaaattaaaattattactaaacgttgtagaattgttacaaactattttttatatttttgtaactaattgcccttaccatacatttaagtttttttgtggtaaaattagtaaaaatgtctacaatgtgaaaggtcaaactaaaatttattttatttaaaacccccttctttttttttttctttctctaaaggatatttcaatgatagtaactcattttacaaaattaaccaaaaaaataaataatactattttttcccttttttatttatttattaataaagtgtttataccattttgaatcatgtgtttgatgaattactagtttgaatcacatatttttttaaaaaaattattttggatactactgtatttaataaaagattacaattagggtcaaaatatttctaaaaatgactaaaatacctttagaattgaaagatttataccattttttattttagtataatgacaatctttcaaaaaattattttgtaacaaaatatatgtttttaaataattagaatatatatgggtgtacttttaatgggcaccaatgaaggagtgaaattagaaaattttgagtttttatgcttaattttgtatctaattaaaaaaaaaaaatcgaattatttttacatcatatgggttgagattgtt

SEQ ID NO: 318293 - DNA, 601 bp, Cannabis indica
aagtgcaagaagagtaaatactcaccaagaacattctctgtattgaatatactcataaatatacagactcgtggactaaggctcattaacgccccaaccacgtaaaaatccttctcttaatttcttacagctctttaatcttttattattttattggttgccgaaaacctcggtcaacaacttgcaacagagcttcactcgcctccctgatctgaaaccctagaatctttgattggatcccttactcaagacctcccatcaattaaaaatgccatacacacaatctggttctagagatggtggcgccaaggacaacatggtggccacagtgggtttattgtcttcttcggcattatgctgagcttagaggtgccattaatgggaaaagaggggatcagtttgtgggctacgtttttttttgccggtgtggtttgtggaagataaaggatttttgaacagaagtataaatagcaaaactggatgaggattcaataggttttgtcactaaattttttatttatatagttaagtgttaaaagaaagggtaaatggcggcaaaacccccaaaacttttattttggtttcacttaaccctcaaaac

SEQ ID NO: 318294 - DNA, 883 bp, Cannabis indica
agagagaagcgaggagaagcaacgacgtgtatgaatgatcagaggctcaaacttcttttatatgtcttcataaatttcttttaattttttcctttccctttttaaaaaatatattttcttttagaaaaaaaaaaaattatatttatttatttactggctttctattttaaatttgttacttctttcgtactttgttctccttataaaagatatagaccagttacaagtattcatattcatattaaaaattctataattctttgattaattttaagatcttttcccaaaaaaaatgtgtatgttaagattattttttcttaaaaaaatattaaatgggtgtttaatttataaatattagtttagagaaatagtgccgtcctgtgtggtggctaatgagaaagcgagtttggtgagatattatcagccgttggatgggtgggtgttgtaatcaagggccgtcactgattttgactttgactttgacgtctccttttttttaaaaaaatttaaatttaaaaataaaatacaacaacagaaataaaggctctttggctaattggctctacctcacgtcaccggctgagccgcctaacctataacttttaaaagaaaaaatatgcattttaagcgagttcttgcaacgcgcacggaagatgtatttttagttgaatgatttggaaggtaaatttaatttttgacggtaatactatttaaattaggaaataaatcacattttgtatgtaattatattttgtttaataataatttttattgacatatttttagtgataatttaatcgtaaatttatatcaaatttaaaattttaatatatatatatatatatagattgtatgagtaactattccattatacttttatttt

SEQ ID NO: 318295 - DNA, 1038 bp, Cannabis indica
ttataaaaattttatatatgtttgataatgttattttaattttttttagtattatgtatttactgttacataaaatgattctaaaatctgaaaatagaggtagggtaaattggatggaaatctgcatttttcccttacctgtacttatgtttcattttataaccaacgtagaaaatatttgcagcaagttatgcatcatttaagaactgacagtataagttttttgtgtcagttttgaaatgacattactctttttgcgtcactttcaaatcgacgcataatgttattaagaacattttatatttcgcgtcggttcttaaatgacgaaaattgttttttgcgtctcttttgaaatgacgcaaataaagactatttgcgtctacggcttataagtcggttttgtagaccgacgcaaaatttttatatgtcacttagaaaccgacgaaaatacctctttttgtagtagtgtcgtcacatatagtttcctagtaaagatgaattttgattttgtaaaaattgacttgggcatggtaagaaactaaattttattattattattattatagaaaaagagtgatatcatttacatgaaatacaggcgtaatcatcggtttactgtacataatatgcttctcaaagtaagacaaccttttcaaaatgaattattgttaatgcacacacaaaatgttagttatggtaagtttgaaatctaaagtgaaatgatttatgaatgcactctcttataatattaataagggactgtcattgaagtgaaaatggtcactttgtcttcttcctctatatttatatatctatatatattatataaaattagcgtaagaaggtcctattccatagttgctttctattcacttcttgtgaatataattttctcttttgcattgatgacttctcaaaataataattattatttatccctatctttagctatatatatatatagcaagtttatatataaacaggtatggatggtacaggagttataattatcttcgtgaatctaacatattttttagg

SEQ ID NO: 318296 - DNA, 1335 bp, Cannabis indica
aattacgacataaatacttaatgtttcagatttatacacttaaatacctaatttttatttttggagataaaaatacctaatgttacaattctcttatatcgttactactatttccgttaactcataaatatagacacgtggacgattcagatgcattacatttatttttattttattttaaaacttaatattcttaatatcagaaactaaatgttacttgtttacaaaaaaaaaaattaagttctcataacaaatttcacatgatattggtactttaattcaataatccttttccataaactgcactggttcacccagctatagtaatttatctctcttttttttttttttaaactaagtagtatttagtttttgactatattagtaggtacgtagtagtaatataagatatatatttggatgcatggtacagattgcaagcaatggattgtacaagagtgttctgcacagaacaacagtgaataagagcaaagtgaggatgtcatggccagtgttcttggaaccacctgctgagttcgtggtgggacccatacccgagttgctgactcaggacaaccctccaaagttcaagaccaaactcttcaaggattatgcctactgcaaactcaacaagattccccagtgaatgatcatatattaatttcaaaacattattatatttataaaataaattaataattaataacaatcttaaagcattattatacataagttattattatgtttgattttccaccaatctgcgtgtaatgtgtgttaactagagctaacagcatctccaaatggggtgctagcactaccacaaaaagcttattttctttcggtttttaattgttattaaaagttttgtcattagtttccctaaccgatatgtatattgcaaacaccaaaaacatgtatatttgtgttggttaccaacaaatagttcgcatcggttttcaacacttgcaaacatgtataaaaataatttttgcacttatttataataaacacactaaataaaggaaaactttagatctgagcccagatgaacccaatctaagcataattaaaaataaaaataaatactaatcttacatactacacaaatcaaaactcaaactgcaaatattacactaaatataaatattacacaatatattacataaaaattatcaaatatatattgtgtaatgtacaaatcaatcacctgcaaaaatggagaggcggtgatcagagagagaaataagagaccaggaatgagaatgagtgagaaaccatacctaagctagtacgagcgacaagggtcgtggtcgtagagagagagagagagag

SEQ ID NO: 318297 - DNA, 842 bp, Cannabis indica
ggttcgaattggaaatgaaggattctagggttgaagattgtccaatcaatccaaaccaagaaaaaaccgtcaatcaatacaggcgattcttacaagagatttctgaaagtaagcatcgctctttgtaaatggtggcctggtctgaactcctttttattttttgtaaatgcaatgttttttatatatataccaccactgttgcttcattgatctttcgtttttgtcttaacaggaatgaacgtagatttagggagtatgctcaaaggttcatcccaagccgacgagagatctaggaagaaaatagtccaagctgatgaagtctcggattcaactaaagaatccaaatggctcaagaccaaagcttacgcgaggaaatcctcaagtcagcctaaaacccgaggctgggaatgaggtctcgaccgcagggaatgaggtctcagctgggagagttgtcgagatgcatctcattgggtcagcacaccaaatcgaattccctggtttttttctagagatggttctcctcgaaccttgtcgtcctcatattctttgtttaggaaaatggcctaatggtttgcccctggtggcatttttataaagacaagtttgtaaagttagttgtccaacttagcctttttcttatcttaaatgctctgtacttttacattcgaacttaatgtttatgtttgctttcgttttcattcacaatgtaaacaattatattttgatcaaatgcagagtactcttgatctttccattgctcgtaattttcctatttaagtacttacgtaatctactatgtgcgtgggctattataatctacgtcgcaataacagttataatct

SEQ ID NO: 318298 - DNA, 400 bp, Cannabis indica
gtaaaataatttccaacatatccaaggtgttcaacttgcacaatttcaacaagaaataatacagaataacataataatataatactaagaacttgttggactcaagttcttcacataacaaagaaaaaaagtctctaactttgaaagtaatttaggaaatgatacaccaggagtgctaaccaaaaccagcgacctaagggtgtgttaataaactttaaaaaccatctaggtcgtggtcgaacaaccaagaaacaatcaagtcaataaatgaaaaacgtcccacataggaaagtcaaaatctgtataaacaaatagccagtccgttcaaactggtataatgaacctggacagtttttcagcaaagtttctataagcaaataaggcaactttgactatatta

SEQ ID NO: 318299 - DNA, 889 bp, Cannabis indica
aagtacaattacatacaaaccaagcaaaattatatagaggcatcaagatttaaatttaaaatgaaaaacaggaatttgcaccaagcaaaactccaacaaaaacctaatctaaaaaatatgattaaaaaagagtaaatgtatattattatgattccaaggcttggcctttgacatttttctctctattcttcttgatacaagccacgattaggataataatttaataataacaaaaataataattaaaacaaaatacttacggtaactcttgagactccctggtccatatattttcttgttgttgtgataacctccattgccattagaagccataacagttgtttggatcatggaaacggcgatgaaagccaatctcatttggttacaaataatagggcaaaaaaagccaataaaaagcgtagcttttctttactcttgacatagagaatcgagatctataacaaaatctggatgaaaagaaaagatttgactatgtggtgttgaagttaactgttgcaaagcactcaaatgctcataataataaaactatttcaaaacaaaacgaaatcctgcaataatgaagatgaaagaaaaggagcatgatatttggttaacaagaaagttcaccgttgacggcttattgaatccttagttgagcttgattttcttatgggtaaatggcggcaaaacccccaatactttcgttttagtttcattaaacccttacaacccaaatttctgcgggtaaacccccaatactcgggttctgttagcaatttaatacttccgtccaaatttagctgttaactgccaagttcgattgtccacgtggacacaatatacacgtggcacaattttattggtccacctaaaaaattatttaaaaaaa

SEQ ID NO: 318300 - DNA, 2099 bp, Cannabis indica
gttctgccaccaaaccagaaaatgaatccaaaagaccaaggaaaagaagatttataggtgaataggaagcaaaaaaaacaaaataggtgcagcaaatgtggccaacaaggtcacaattgaaagacatgtcacaaccaagcaattaagtaaagacaacacatttatttgaattgtttaaatttctatgtgaactcttacaacatgaaaagttaatttgatagattgctattactttcaaaaatcgaaataatttttttaagattgtataatagttgctagacagttgtgatccatgttaaaaatacattgataattagatttctactaaattggttttttaagagttcgataatagttttttaatgttgtatgcctaatcaaatacacttaaaatgttcattataagttcataacacatttggtgttaagatgaaaaacaaattaacatactaaaatagttaatttataactgttgctaagcagttgtcgtaataacaaaagcattaagaaccaaattacaataaagaacaaaaaaagaaaaaaagaaagattacaataagtcaaacagaacttaaactagagcataaaactagaaaaataaaataatagcatccattaaaaactcttatcatttaacatataaaaatcaaacaaagagcgtaaatcagtttctcattagatgaccctacttcttccatttaccagtcttcgaagacttgttctgcttctcatccttactatcaatatttttgtcatttttcctttgccataggaagaaaagagggcagcaagacgagtgcagtaaacttaaatgtcaaagtcgttagggacatgtttcctatggatgaagaactctacaaaagtagcaacaaatgcgcggcaatcactattcaacaaaaacaaaaaaaaaacaacagttaaacaactattatgcaacacaaaaacaacacaataacaacaattaactttttctgttgaattagaaggctagcaatctccacaactcctagaagagctttcggatcagaacccaaatcaagaacattggacctatttttccaaaccccaagaagataaaaaaaaaaataatgggagcaaaatagaatacgccctcattgcattccttgttgcaacattcattttggctgtccataatgaactataaggaaatataattccctcattcaaattcagacgaccaaacacccaatggctctctttcctaagatttacaataaataaaatatggttggcttcataccaatgcttaaaataaggaatatataatgggctattgggtgagaaacctgaatgtgagacagattggtttttaatgactttgccttgtagaatttatggtatagagattggacagaatcataaaaaagacagtctgttgtagcgaaattctcagttacagcagaagaatactttcctttttttttctaagagatagaaaatagtattcatgtgctgaaacaatacaaaaaaaattttttaaaaaaaaaagaaaaaacaattagaacatgaacatacattccaagattatcataacaattgtaaaactgaaaaacaatcaacaaacaactatataaaaactaaaaaatgtacaaatagatttaagcatattatcgagtcgttgataaacatatcacagcaagataaatgataaaaccaagttttatcttcaacatagtccacacccaatctaaaacctagagaaaacttcttggcaccatcctcgtaaacattaaaggccctatacatacaaaacaaatgaatatgaacaaaactgaattcaaataattggcaaaaaaatcaaatacaaaaaatcacagaaaagagagtaaacaaaacaccacctaagatatttaagcaatcctttgctaatctatttgtcaaactttgcctcaagttcaggagaagcaatatcaaaaaagaatcatcaagagcataaaggcccttgacatatgtaactgtaatatcccagaaaataaataatatttaaatggacatattttattaaatatgtaattacttggaaaatgaggtaggattatgatcttacttaggtaaattgttgagaaattatttaatga

SEQ ID NO: 318301 - DNA, 2042 bp, Cannabis indica
tgcaggatttaccagcagagagagcttttgcagattttgttctctgcaacttggtgcttcatttagttataatgaacttccttggataatttagcatctttaactacgataatgtcttttttaggaccatcaaaatgagacaactataaagttatatgcctttggtgcagaattcactgatggttactctttgtgaagtttgtgatgtatgcaacatgagaatgaagataatgtgggtcagaaattttggcttgattttaattattgtcaattttagagctacatagtttttttttttttattcttttttcttgagtaggtttaaagtttttttttttttttttttgttgttgtgaaatccttggtcagagagagggccaggagaaaaatatcagtgatgctaaacacatgtctggccctgaatagaagaaatacaattagggtctatttggtaagcatgattggacttgattattagtgtttaggcatgtttaaagtctagagaactaatccagcttatctcatttgttagggattgtttatcccattcagtagggttaggggtgttcatccattccaatctgcactattttgcttatagtacatccgatttgcactaagtgcgaatttcattttttggatccaatccacacaatagctcaaatccaatccgtaaaagtgtggattggatcggttattttagattggtgactttttaatatttttgaaaaaaatatttttttttcacataactaacaacaaataaaataaattattgttattttatgtcttcaataacaaactaaaataaataaaataaaaattcaaaggaagaaaaaagattgtatgtataaaaaaatgtttaattttgttttaaattgtatgtagaaaaaaaagtatgtataagaatatctattaagttttgaaatataattgtattatatgtattagacttttaaattattattatttttttttactattaaaatgttatttgtatgcatatatatatatatatattttaatttttgtataaatatgtgtggattggattggatcagttatttttatacgtcaatcaacattcaatccgtacaagtgcagattttgaatttttcaatccaatccgcacaagtgcagatatccacactttgcggattggattggattggatcgtgcgaattggattggattgactattttatgaacaccgtattgtgggataaataattccatacatgtgtatatattttttattcgttttttttttaattttgattttgttaatatattttaaaattaataaaaatgtaaatgaaagaattattacaaatttatttatagattttttattaaaaatttattcatttaaactagtataaatttataattttaaattatcatgcattaattaacaatagttatttaaattgatttaaagggaaacactataataataaaattataatattctttttcaattactagaaaattaatatcaatattttttaaaattaatatttgtataaaattagtgattaaatttttatttagtataaatcaagtatttttatttcattattttaattatttattgagtaaaaatatgataaattatttattaaataaatatataataaaatatttatgttatatatttgattatacgtgatatggattaaatcatagttctcttggcttaacttcttagtttcttattctgacaatccattatttgtttaaactcacaatggattttgatcactggtgtcttccaagtcataacatggtgagttccttgaaactctcccactacgataaggtaccgtgatttttgtctaagaatctaaatggtatttttctcttccggctgtgttaaaaaacaacagaggcagtgggatcatcttgtatagaataagatgataaaatacttttggaatcaagaaaaaatatctcctttatttgctactttattttcagacttaatcattttcttagaaaagtagtatttgttttaacaaacactttcttatctaatgact

SEQ ID NO: 318302 - DNA, 1692 bp, Cannabis indica
tgtttgtaagttgctcaagtccctgtatggactcaaacaagctccaagagcatggttcgataagctgaaaggtactctgctgtcatggaatttcagcaactcaaaagctgatacttccttgttcttttacatcaacagtgacaccattatccttgttttgatctatgtggatgacattatagttacaggcaacaataaggcacatctagacagattcatagaaagactcaacaagctgtttactctcaaagaccttggagaacttcatttctttcttggaattgaagttgatagaaatgaaattggtatctatctcactcaaactaaatacattgaagacctgttggaaaagaacaacctgcaacatctgaagccttgccccactccaatatcaactgggaaatcattgtctctgactgatggcaaatcaatggaagatccaacaacctacagaaagtctgattggagctttgcaatacttgaatcataccagaccagatatcagctatgctgttaactctctcagtcagttccttaaagctccaactatcactcattggaatgcagctaaaagaatactaaggtatctcaaaggtacaagaacacagggtcttcacataagctgcagtgatagactcaatctcactggatactctgatgcagactgggccagtaatgttgatgatagaagatcggttggaggctactgtgtctactttggagaatcactcgtgtcttggtcatcaaagaaacaagcagtggtatcaagatctagcactgaatcagaatacagagctcttgctcatgtcagtgctgaactgacctggattgagtctctgctcaaggaaataaaatttcctctgcctagctgttcaattacctggtgtgacaatatgagtgcgagtgctttagcctcaaatccagtttaccatgctcgaacaaagcacatagaaattgacatccattttgtaagagacaaggtactgaacaaagccttggaagtcagatacattccttcagcagatcaagttgcagattgtatgacaaagcctctgtctcattcaagattcagttatctggtgtccaaactcggtgtgagacattcaccctctcgtttgaggggtggtgttaagaaagttaattaatctctaattagtgttagtactctgttttgtgtaattgtcagagtcggttagcatagttttctgcactttattctttttgcttttcttgtcccctttgctgcagcattagggccacttgtcaccttgctattagtgcttgtaatacctgtgagagtataaatggaaaatgatcttctcagcctccttttgagctgagttttatgcaaaccaattctgtgtattctttaactagaaaaaaaaaatcaacatcaaagataagtatatcaaaagctcataaaaaagagtgactcataaaaaggagtgacttcatataaaagaggaaaaataaattttaaatatatatggaaagcttcttattcagtgtgggcacttctctatcactagggtattacgaaattggaagaggaaaagagagagagagaggggtcggctatagagagaaagtaagtggctcaattttctgaaggacagtttcctgaattactgaaaaactctcttttggtgtgagccatcactttctatttataggcaactactaggtttaggt

SEQ ID NO: 318303 - DNA, 1284 bp, Cannabis indica
atagtaagtttttccatgcttctgcgtcttcgagaagaaaaaataattttattcacaagcttcaaagtgattatggtctttggattaattgggataatgggttggataaagttatggtggattattttaaaatacttttttcccttctaatgtggaatggtaaaaaattgttgattatgcatttaatttagtttctgatggtcaaaatgaggagcttttgaagctagattcttttgaggaagttaagagtgttttgtttgatatgcatccagattctcttggtctgatgggatgacccctgcattttataaaaaaaaaaaattggtctattgtgggttctgatgtggtggctacagttagagcttttttcgaatgttctcttgttcctccgagtttgaatgatactaaccttgtccctgttccaaaaaagaaaaatcccttagggatgggagatcttagaccgattgagctatgtaatgtcctttataaaaggctaattaggatttttttcccccgaattttgacatgtaccaaatcatgccccctgaactattgagattaatagatttaaggacttttgtctaatttcattcaattttactgtttcagtgattgtttatgtacaaaatcatacttcccagactttgatatctaccagatcatgcccctcaaactttaatatgtactaaatcatgcattctaaactttcatccatgttagaattttttgactaattagacaaaagttctaaatctaacaatctcaataattcaggagatttaacggtcaaaaaagttcaggggcatgatttggtacatgtcaaagttcgatggaaaaaatcctaattagcctttataaaattatttacaaggttctggagaataggcttgaaggctttttttagtagtgttattttttatgctcaatatgcttttattcctgggcgtttaattttagataatattctcatctcctttgaaattttatattatctgtagaggaagaatcaagggaatggtgattatatggttctaaaactcgatatgagtaaggatatgatttgagtgagattttcttaaatctatcttattgaaaatggactttcacaagaagtgggtggatttagtacttatttattcaaaatactatatatcatacatcaattcaatataatattatacgatacaataccactttaaaaaatttaaaaaaaagtttttagtcaagaaaaataagaaaagaaaaagttgaagtttgagttaaatatttttgtatgaacatatt

SEQ ID NO: 318304 - DNA, 541 bp, Cannabis indica
aggaatattataagcattaagattcacaaatctcaactactatacatacccttttgcatttacctgcgtgcagtggcaatcttcctgaccttgtcctgcaaatccgcgtttaagtgaagctacttcaaaccatcttccagaatatctgatgggatcgaaattctcagccgtcatgcctctcatcatcattagcttcgcgcctcctttatcagaatcctcatcaagtggaagagttggcaaattacttgctgcatttgcaagctggcatatacttcgttgatggggtacattagcagccacagcctgccattacatataaaacaaactaattaggcataatttttccagtcaaattagaaactcaaatacgattgtggcttccaacatacagaagagaaaacaatatctttcaacaaatcaataaacagcttgatttggaaagtaaaatctataactaaatgttcaattttagtagaccttgtcatgctacaacacccatctcaataattttgttctcacaaatcaaatgcaatcattccca

SEQ ID NO: 318305 - DNA, 4037 bp, Cannabis indica
gtcatgtcctttgacatgttatttttctctctactgtagagtgttgttttgattagtacaagtcttgttattttggtttttgtttcctgagatggcctcaagcagtcgagtaatggaagagttagagaatagatgggatacaatctgtttagaagaagaggaagagagcgaagagatactggaagatgaggaagatggcaaccctgtgtttgatggaagatggagccttgtagggaaattgttaacaggcagaatatccgattataaggtatttcaaaatatgatcgcagacctatggaagccaggcaaaggtatgactgtaaagattttagagcagaaccgattcttgtttcagttctatcatgagattgacattcaacgtgttatcaatggtagtccatggacatttgatcgaaagcatttgatcttgaagagactgacggcaggggacaacccaaaaatggtggaattggatacgattgacatgtgggttcagatccatgacttacaatctggattcaaaacagagcaagcagttcaaaaagccgggaattacattggcacatttctcagttcggatcctaataattttcatggtatttggcgtgattaccttcgggtacgggtctctatttcgttacataaacctctgaagaggaggatgaagttccggaaacgtgatggtgaaactttttgggccaattttaaatatgagaaagtccccacattctgctttatatgtggtatcatgggacaccctgagacattttgtcccaagctatacgatacccctgtagctaatctcacaaagccatacggcctctttatgaaagctccaccacgaagaaacaactttctcactgcttctccatggctccggcaacatgaagcacccccgatggacaccggcgtcaagagtcctgatgaagataccgaatttaatgctccccatgatactcggcctgatgatagggaggataatcttccaaggaataattatggaaacttgcatggatatggaaaggaaattgcctatgatttgggagctgctcatgtacagccgaatatggctttaaatgagccaattgtcttggtcaaagagaatcaagctttattctcttctgatatggatttgacgatatctgagcttaaaaggagacgtgttgggcttaccaaaactaatgtctcaactgggcccgtattagatgatatggaacatgataaaaatgacaatgaggaggcaacagtggtactttcaaaaaacggagtcaaggtgggttctggtgtccaggcccaccaaacattatgagcaccttgagttggaactgccgtgggcttgggaacccacgggccattcagttcctggaggatatttgtttccaaaagaagcccaaatttcttttcttatgtgagaccctttgtaacaaagaattggtgaatcgggtgcgagttagactcggttttgaaggagccttttcagtcgatgctgttggaagaaagggaggccttgctctgttctggaaatcgaatgatgaagccaagttcttgggtttttctcaacatcatatcgatttggaggttagtgttcaaggtatgggagtttggaggttaactggactatatggcgaaccgaacagacaattacgacatcaaacttggcaactacttcgaagtctctctctcgagtcaacacttccatggtgtgtaattggcgattttaataacatagccagcaatgaagagaagaaaggaggacgtccgtatcccactgctttaatctctggctttcaatcggcccttgatgattgtcatcttatcgacttggagcttcgtggctatccttttacttggcaacgtggacaaggaacggaccattgcattgaaattcgtctagacaaagccgctgttactcatgattggttagtcatttttaatcattctacactcaccaatattgactacacttgctctgatcatacacctatatttttacaacctgaaatactgtctactgctgccacattccactgctttcggtatgaaaatgcatggtctcgtgaaccattgtgttctcagctggttgaagattgttggtctaatttgcaagggttatctctatctggtaaaatagcacaatgctcaattcggttggaggaatggggaaaggaaaactcagggaatttcaagaaccgtattgcccaaagcaagaggcgtatgaccaggttgaagagccagccgagttcgtttctgcatactgaattcgaaagtgaacaaaatagttattttgaactattggctcaacaagagatttattggaagcaaagatcgaaacagttttggctccataacggtgacaagaataccaagtacttccatgcttctgctagtgccaggaagagaaacaatcagatccgtcaactgcaaaacaatgctggggagtggacagattggacaaccggccttgatcaggtaattgttcaatattttaatgatctgtataccgctggttattcgtcaaatgctggagttatcagagaggttaactgcactgttagttctatccaaaatgaagaactcttgaaacctgtttctagcgaggaagtgagacttgccttgttccagatgcaccctgataaggctccagggccagatggaatgggtccgggattctttcaacatcattggaatactgttgggatagatgtggtaaatcttgttcaggatttctttcattcaggctccttcccaaaagagttgaatgaaactaatcttgttttaattcccaaaaagaagaatgttgctacaatgggagatttaaggcctattgctctttgtaatgttgcctataaagtgatctctaaagttcttgcaaatcggatgagagatatcattgatcttataatctcagacactcaaagtgcgttcatccctggacgccttatctcagataatatcatggtggcttttgaagtcatgcactatctcaaacgtaaaacaaaaggcaagaaaggctatatggctcttaaactggacatgagtaaggcctatgaccgggttgaatggagttatcttcaggctgtgatgcttcaaatgggttttgctgaaagatgggtcaacttgattatgttttgtgtatcatctgtcagctattctgttttgcataatggtcatcgaatgggccctatccttccttctcgtggcattcgtcagggagatccattatctacttacctctttattatttgtgctgaaggcttctctgctctcatcaagaaattcgaatcccagcagcttcttcaaggttgtcgtgtggctcatggggcaccatccattacacatatgctcttcgctgatgacagttatctgttttgtcaagcaacaactggtgcagctgtggggatttctaatctcctccaagtctttgagaatgcgtcaggtcagaaaataaatttccacaagtcaaccatctttttcagtccaaacactagtgctgaaactcgaactcaaatttgtaatagacttgtcatgcccgaagcatctgaaggaagcttgtatctgggcctcccgaatattgttggtcgaaacaaaaatgcagtcctgggttttctgaagaataaagtaattgcaagggtcaatagttgggatggtaaactcctttctcgagctggtaaagaaatacttctcaaaacggtggttcaatcactcccaacttacgccatgagtgtcttcctcctcaccaaaagtacatgtcttgaaatcgagaaggaaatggctcgattctggtggaagacatcctcaagtaaaggacgaggcataacctggatgtcctgggatcgtatgtgtgcttcaaagtctgaaggtggcttgggttttcgtaacttgcatgacttcaatcttgcaatgcttgctaagcaaggttggcggcttttgtgcaaacccgattccctcgcggggaaagtttacaaagctagatattaccctcattcggacttccttactgccgaattgggtaataatcctagcttcgtttggcgaag

SEQ ID NO: 318306 - DNA, 544 bp, Cannabis indica
agaaaaaataaataaaaattattaaaggtagaaagcagcattaacaatctcctatttacattactcatatttaaaaatttcaaacatgtttttagatacggtgaattattcgaaattttttaaaattttataggagtttgatgttgtaactatcttattttagaaaaaatattttgacatctattttcaaatacaaagattaagaaagattttgcaataaaaagttgtaactagcgcttcttttaaaatatattatttatttatattatcagttttaattatgcatttgatttatattttaatacttagatcctatcactctgatttgattattcctaattaatctaacttagaatctaaatataaattaatattatatataatagtaatgatgtatatatatgtgtaatattttttttatatatagatacattaaaatattacttagaattattgttacaaatatttctaatatagtgaagtatacagtacttatgaaatgatttatatatacagtagaacctctatttaagaatactctatt

SEQ ID NO: 318307 - DNA, 537 bp, Cannabis indica
agattaatttggtagatactgttgggtgtgtaagtggtgacgttggtgcaattgtggtagagataagttgggacaatagctcctacgctaagcccaatcgatatgattagtaacgacgaaagcagcaaaagggtatttgggaattttgtggaaactagcatgattactttcatttagctttttctcttaggatttgatgagtaatatcattgcaagtaatgagtccggtgacgatgaggtggttatcaagttgcaacaacagtacaagggagtggaggaaaagcacaatgtttgcccaggcagggagaactagtgggtactatgaaccagtacgacaattaatgaatcaatttaagcagggtcaaagtcaatcgttggtggtgttttcgtcttctggtgagcccccacaaaaactaatcagagtagctgattcgtatcctgtcctgagtcttttggaaaaaaacaactagtaattataatttgtaactgtttatagttatccaagtaataagattggttgaaaataaaaataaatgt

SEQ ID NO: 318308 - DNA, 664 bp, Cannabis indica
gaactaggaaacccaagaaatatgagaaaaatagagaaatggtctttgacaagtttgattaaattttaatgctttaattaagtaccactgacttaccatgcatgcagaagtcattaaaagtcaagactaatcccagcaaaaagaataagcctgctatgttgcttgaacataataaagtgtatatatatatataggtgattatgttcccataatccacatccattgactattaattctactcttaactataaatattttttctttctagcaatccaaatagatgactatatccaaataagaaaaacgctatacccaaataagaaaaataagaaaattaaatgtggtagtagccaacaaccacatcaaaatattggaactcaacttttcttagaaaactgagactaggctaatccttaggctcaattatcacgtgttgcatccactaaacattagactgatggagtattttcacaaatggataaaaaccattttttatcatataatacctacaaatcaacatggttggtaggtgggtcatgtttacagaaaacacaaaactatatatttgtaaagattaattacatatcctaatatgtaattcccatttcataaaaaaaattatttttctaattgcaagctgcaacaattcatgaacttgttacaa

SEQ ID NO: 318309 - DNA, 2892 bp, Cannabis indica
tttttaataaatgatattataacttagagttccaatagcctcaatccaaatgtatttttaaaaatggtttaattaatactttttttttctatttactttaataaatatttatagttgtcaatttttttatagggaaatttgcagcataaattctcatttaatttgtaatgttgctaataagtacccatattcaaaaaattgcggcattaatacataaatctctaaaactaacacacttatagatacccgatttaatagagttaactccgaaaaaaaaaatgtcatgtgttgtgtaaccatttgtccatatcataattgtttaaaataataaaatataattaaattaaaattaaaaaagtacatttaaaatttattaaacatcaaaccaaaataaatgttaataattttaaacaatttaattacaatttaaacaaatatgagtaatatgtctctttgtttttgcccagtataccatcagagatgcaatctccccccgattttatgaatttgttgcaactcacctccaccgggaaccaccgagtctgcaactagatctgaacttaagcaaaagcacaacaaaaaaaactttaaactcaacaatattgacttatgaacttgactagaattgcagaagtgtgacccatgaaaggtttagtggtggtaacaaccatcttatcatcgacagagaaatcaaaagatctggccggagactcaaagtcaaaggtaaatgatagttgaccagtctgaacatttcgtagtttagccgaaactaattcgcacttcagcaatcaacaacattgaatcccctaaaccatagaacctccaaactcacgaagaatccaaaaagggaaacggtttaaagaaagaaggcatcgctagaccaaacgacaccattatgaccacgatagaatctaaggtgcttgccattatcggcgaactaaacggtgggagtatggtccttggtgtaggggtgttcattggatcacatccaatgtttttaggcctatccagatccgatccaattatatattggatgttaaattttaccatccgatctgatccaattgattgcagtcatccaatcgatccaacatctattggctgttggattggatcagttctatctgttggatgtattatatatatatatatatatatatatattttggtttaatttggatttattcaatattttagactagtattttcttggattggatcggatcggatccattcaatattttatgtccaatatgtattgtattagactagatccatccaatctaagaaaaaaagagtaaaattttaatgttaatttttatgtatacatatatatattttacgtataacattataaaatctaattacacatccaaactaaatgaaaatattaattagtttaattgaatgttggatgtattggatttttagacactccatccaacatctgatctgatccaattggatattcaaaaataacatccaatccgatccgatcacaattgaatatccaatgtttggcggtcggttgtaattggatcggtcgattgtcattggattggatcgatttatgcacacccctactttggtgcatgagaaaggtgaggggcctctgtttgatttttgggggttcgggattcgatttctagggaatgtggttccattcttgaggttgtatcagttgggatttaatttttggggttggatgatagacgttgtggtttggggaagatgatactattttagatttatggtttaaaaaggtgtgtttaattttcacattataaaagttttgtttatttaattttaatagatgatatttacttaaattagaatattagaattttaaaatttaaaaatatatttaatttgtatgtagtccattaaattaattgaaacaggatgagtatcaacggaatgatagaaaattgagatttgagtattaatgctgcaattttttgaatatgagtacttattagcaacaaaataaacaaaataaggatttatgtcacaaatttctcttttttatgtatatatataattaaggcataattacataaaacatcaacttttatgctcaaagtttttttattttttacatttttacagtattctataaaaataaaaaaaacaaaaaaaatacatgaaagtaataagaaaacaacataaaaaataatatacaaataacaaaaaattaacaacaaaataacaagagtacaacataaaaagaatcgtattttatgtaaatatactctaaaaaactgtaaaagtgttaaaaattctgtacagaccgtatttttataattttttttattgtcttttgtgtttttcttttttaaatactccctataattaattatatgaagtattttttttaggcccaatttaaaaattttgccctaggcccccttgaaatttgagacggccttgcacttaacactcaggtatttattgaaggtccaaaaatataatttaagtataattaccgtaaaaaattaaacttctatatttatctataaccaaaaattaaacttatatattctatcatttgatgagctcgccctcctccaacgtcccaaaatgacataaatttggattatactcttcaagatcttacaacatagggtaagagtgagtgtcgacaacaaaaaaatatagccaattgtatatgtctattggtgcattttcacttggaacaaacttagatagcataaaaagatataaaaaagaaagagataacacatataactgttataaatattaataattatgtggatgtccaaatcttttatttattaccatgaattgtaatcaacattcctcttttccttagtttccctttttttagtttcttaatatctcactcttgtatttgtataaaatcgggggttt

SEQ ID NO: 318310 - DNA, 565 bp, Cannabis indica
tttttttttttttttaggtttaagattttctatctttctctttgattatgcactctcatattgacttattttctgaagcttaagaaatcaaagagaaacacaaaaatttataaaaaattagataacataacaacatggagacattaaattcttttgttttttctttggttatatctcgcttttgaagatcttgtgtagcttaaaaagcctagatcaaagtggcccataaaaaaaaaataagaaaatttatgagagtagagaaaaagataaatgagaactctaatacttaccccttaagaattttgaagattaaaatatatcgtactatttttctgtaaattttagtagagttctcttctctctcttttctttctcagtctgaatttttttcttcctttataaactcatagttacgatacatgatagtggagatgtaagtggtgggtagttatgaattagtaaagagaaaagtgaggatatattattaattaataatacatttttttctttttttttttttttcttcatgaatgattctctctttttttttttcttttcttattat

SEQ ID NO: 318311 - DNA, 1196 bp, Cannabis indica
taggatttagcttagttttggggttgtggatattgttggagtttagtcgacatgtgtttaagtttaaattgatggtggtttaagattgaattgaatggaatttaaggttgttaagtttgagttgggaaaatagaatttaagactgttaggtttcactcaactatggtattttggttattttgatgaatttttgagttttgattgattgtatatattgtattcatgttatagaattattttgtaaagtttgggaacaattggttaggtttggagtaagttttggggctttgaagatctaaattttttcgagtttctagtgtagtgaaccgaaattccggatggtcagttttcgagaatcgctgatttttgtattttggccataagttttcacttgggtgttcgttttagacattctatataccatttcgaagcttatgaagagctctacagtatgagacatagattagagccaaaaatgcattttattttagggtattttcaccataagatttggtagaaaactgtaggttattttatgcagattttagacagtgttttggaatagacccttattgatttaacattgtcatgacataagacccaagatcatcgagcatcattccactcaggtcggcccgcacacctaactttagacttgaggaaagaaaagctttatacactgctttacatgttggcctgtaagaatcagttattatcgtttgtgactcaattatgatcgaggaaatgatgtgtaacgattataatcatttgtgactcgattatgatcgaggtaatgattattaacttttgtgactcgattatgatcgagaaaaagacacgaccattaccgttagtgagaatgaataaagatactgtcattaccgttaataaattgagtaattactcccttgaaactgctgacaggtttcttacttatcaggtgctttatcgggcaacgatagtgacatacgtagctcgtgaataatgagtggtaaggatactttatgaagcattaaagtaggattgtcttataagataattaattggttatgtgatcgattatgtattgagtgtatccgtttattataatgatgaagttgttaactatgagttgatatgattttcttataatgcgtaatatatgtgtttgtatagacgttaaattatatatgcgcatactgaatatgtaatgaatc

SEQ ID NO: 318312 - DNA, 2195 bp, Cannabis indica
aaatttatatgcatttgatataaataatttaaaatattattaaattattcttttatcacttttttttgaaaaaaaaaatatagcttataaaatcattctaggttgatgtggttttttaataataaaaaaataaatataaaatatttcttaaaacaaagtaaaaataagaaattttaatattattgttatactcgaaattcgactgcactttagaagtcgacacgtgtcctgcagtggaatatgaaccacctcatataataaagttatatcattaaaggcaagataaaataactcatcaagaaaggtttaatagaaaatatttacaactcgctgattatatagtcttaagcgagataaggataaaaggctattaaaacttatattgacgagacacgcgcacctacctcggagtacgtagtcgaagaagatcttcatttattcgaagtagaataaatacaatcatggcaacctcagattacatatagtgagacggtcacctcgcgatcttaactcaaataaagagacttaacgaggtgaatcatctgctaacacttagtatttttttttccacatcaagatggacaaggagaataactcgggttaagcgagatatgattgtctaaatcagcattaaccatcgaaaaggataagaacaaacgacagttgatcagttatcaaatattatcctacatgcaattaaataaaatgtgagaattgtctatgtttcatgaacaattacattataaactggtcctaagtaaataactgccaacctatattcacataaataggggtagattccataaaaaaagggacggggaattttgagagaataatattattaccctgatattgtattttgtattcaaaataccattaataagaaagactcgtggagtatgcagattttaactgcaaaaccacgtaaaaatatttggagttattaatttctaagttattaattattatttctataaaataattattaggtcaaggctcattaattttggttaacgaaaatcagtattaacagtttggtgctttcattgaaagccttagtgataaaactcagaaaatccctccttacaatcaaaaatttatccatggcttataacaattaaaacgatggaaatcgccctaaggaaactacacatcgccctaggaaagaacctatgggttctcaaagaccccatactactggaacatcacgttcaaggagaaactatggtggtgataatcaaaacttagaagggaggaacgaagatatcaataattctacaggatatgtacctagaagtaaggatgcatatgatccaaataggtatgtaccattagtggaattagaaaatagataactccggcaacgctttgccgaatctaaccgacgaaacactgagttggaaaaagaggttgcagcggctaaggcgactcaaggaactaatactcagaatcaacctaatcctggagtgagaaggccacgagacagatctcaaggttcaagaaccaagagacatgttgcaaatcaaagaaatctccaaaacactgaggaagaacaacctggggatactaggaatgttccagtggatgaacaacaaaataatcaagagcaacgtcgagacgttcctcaaagatcccaaggatttatgaaccaagggaatgaaccaaatgatgtaccagaggcttctcgcatgaatgaggacatgagacacccccgacctagggagtaggaaatccatcgtgataacgagagaaacctggggactcaaacttaggatattttggtttgaatagaaattttagggttttggtaaccataaattttttcaaacttaggatattttgctttatttaattattaaataaagttgatgataaaatcctaaccatcaaatatcttattttttaaaattatttattttaggtatatttaattcattaaattataaaatagaatattagaaatatctaaatttaaaattaagatattatattatattatattattagatatttagttaatttaaattatttaaataaactaaaaatttgaaaattggctagatatttaggagatttgttagatttttaaatatttttttttcagatattctctaacaacctaaattttaaattctagttaagatatattttaaatattttttaaaaccaaattatcttaacctactttctagata

SEQ ID NO: 318313 - DNA, 1242 bp, Cannabis indica
gatcaatacaaggagtgtagtctgattaagggaatgttataacactgcattaaagatcgcagaaaagaaaaagtcaataaatgtaatttacttgctcaagaccctccacctcgacatgagtcatttaaaatcgaagaagtacgacatgtagagaaatccaatttggacccaagaatcttcgactataccaacaccgcacaaaccgcagaaaaaacaattgaggtatcaataaattcatttaataactctaaagtattatcgcttaaggaagaagtagaccgcctactggcatgcgacttcataaaggactcattttacccaaactagttagccaatcttattttagtaccaaagccaaatggctcgtggcgcacatgcatcgactttacagatttaagtaaagcctgtcccaaaaacaagtttcctctaccaagcattgaccaacttgttgatgccatcgcaggtcatgagctccttaacttcacggacgtgtagtcagggtataatcaaatcttgatgtacaaaccgactagaaccacacctcctttatcacagatcgaggtttgtactgatataaagtaatgtcatttggaataataaatgcaggtacgacataccaaaagttggttaacatgatgtttttagatttgtaaagaaagacaatggaagtgtatgttgatgatatgctcgcccacttaaactcaatatttaaaatccatggttccaatcgaggtaggagctaggtccttgcgacaagacatttttaacattcaagataatgaaaagaatcaactaatttaattagatttgctggaagaaaaacacgatcaggctcagataaaaaatacagcctatcaacagcgtaaaacacactattttaactctaatgtaaaagaaagaagtctgcgagtaagagacttggtattgcaaaaagttatgcccaatacctgcaattctgcgcatggggtttttggtgacaactaggaggtcccctatctaattgctgaaaagatagggagtgtaacatacaaactctcagatctcaacgaatcagtcttcgatagagcttggaatggcgagcatttaaagttttattatcagtagtaccagaacatatataaacttagccaatttttatgaaaagtatctaagtataggggggatacatgtatatatataccactactttatttaataaacattgtactactgattattcaatgaattcgttttttttttttt

SEQ ID NO: 318314 - DNA, 628 bp, Cannabis indica
atagacactttaatatataaagatttatatatttaagattaaaactatttggagattaaaatacaaaggagtgcatcaatgcacctatttttgagataaaagcactatatattgacgcataaatatcttaggatacttgattggtatggaatttgaaaataatttatatttttaaaacttaaaaatgtgaggtccacataaaatacttgataggtgaaggaattttaaaagggatattggcggcaaaactacctgtattttacgttttgtaacactcaagcacataaactcaatttttgacggcaaaagctattgaacccccactttgttttgctctttacacttccgtccaaaaactctagttaaatgcatacacgtgacaaatttttagtagtccatgtagtattaattattaaaatatataaaaattaataattaaaaaaatatataaaacaatttagaaaataagaaaattaaaaaccttttttcccttttttttctttctctttcttctcgaaagacttgaacccccaaccccctgtaacttcttcttcttcctccaccttcaacccaaaccaccaccacactagaactaatctacaattacacaaaaaaaaaaaaaaaacaa

SEQ ID NO: 318315 - DNA, 2602 bp, Cannabis indica
tattttatacaatatttttatgtaaaattataagtggtattaacttttatgggcacctaaatatataatattttagtataaattaaaatttaacatagtattatataaaactatgtatataatccaatttaatataatacaatacaatacgatctaatacaagtttccaaacaagccctaaaatattttgcctgttaatatcatttttttatgtatgttggcaaattatataagtagctcaatcaatttgaaatcatgtaaagatatgacaagtacaaaaattgtaaaattcaacttagtaaaaatgaggcttgcattttatagactaattagaacattttagaatattacaaaaaatacagagaaaataattgtacacaaaatcatagagaatggaatatcctaacaaacttctgacatcatcaatttgttaggatttcgaaccacaacctaacggtacaaagtgacaacaaggcaattgtataggaaattgtattagtgcaaataatcagtaattagaacattatcacatttcctaatactcctcaaactaagaggagttttgtaacaccttaacaattaggcacgctaaactatctgatattgaaaccctaaacctgctaatccaggattactagaaagattagtgcgggaaatttaaaaaccttatttacatcagaatgaaaatacaacttgtaataattttttactttacaaataaaccaaaagttacatattttgagatcccataaatatttttacaaaatattacaagtttaagtcacgtgccgacctaagcggcaaaatcagagattacaaaatacatcactggtagaccctaacccgattattcttgtgatgcctgaacatgtataagcaccgccaagctctcgcactcatggctaatcacagactgatttaccatttcctacgcagtagagcacccatgagccaaacccagcaagacaatacagatatcaataatcacaaataacatatcacatatataataaagccattccacttattgtctatttgatatagacctgcgtgttacgctcacacgcctatttatatctatgtggcattgacccacatgttacgcccacatatctaaaagtaataaggccttagaacagttcatctcgattctaattaccgagtctaactaaattatgcctcgaacacataattatttaagtcgatatataaagcatgacctaacatttaaacatcaataattactagggtaataaccctaaaccatgtagccgctcactttaggataataaccctagtcccggttcttgataattcacaactataatattcaatatgagcgtcaccacgctttactctacgtgcaactactgtcttacctgttggcccaagtacatgaagattccaaatcctcgggtgctcccgaccaagtcccgataatcctagtcacaattttcgggattcacaaatagggttaatccctaaatctattttcacaaaattataaaattggcattcaaatctagataaacatatagagcttggaatgagctttccaactatactcggaacacccaaatcggagtctggatcacaaagttatgaataataaaataacgcattcaaaattgccaagaaacgaggggcaggctacggcattcccaatataaggccgcgacacctaggttgaaaacctaggatttaacagaggcggggcgcagttcctagtgagtggggtcacgacgcctgagttccaaaccccgaaaaccccaaaaacagccacacgaattcatgccaattcatagcaaaaacaccctaaacatgcatacacatcaaaaccaacttccataaattaaagctacaacatcagagaataaaaacactaattaaagctttaattctcaaccaaaattgcatctcaagatcataacaccaataatcaatataagctccaaacattgagctaaaaatcaacataatctcacactcaaaagcttgcacaacaaagtcatttttacaacccaatattcagcacttaaagaccataattttcaacctagtaaacactcaaaataaacaatatgcaacacccataacttccaagcttaatcatcaaaggtatcatctaaacatctcaattcatacaaacatgcaacaactcaaataacaatatcaaaaatgcacaaattccatatctaattcagcaacaaaactcttaaaaaaatggtaggaaaactacctcaagttcttcaaaataagcaacacaatcctttaaactccaagctatcaccaaaaatccaatttgaagagaaaatgcaaagtaaagaaaaattgagaaagagagagggaaagaggttcggatagggctgagcaaagaaatcagaaaattctattttttaattttgccaaaaatctcttttgttgataattatctaatgggtcaaagaccaaaatacccctagggtctatatatataacatatgcatgacacaagggtaaaattatcatattataacattatacacttaaacaaaattttaggttattcaatcaataataaaatgctaaaataaaatcccaaaaatgtatttaggccccgaac

SEQ ID NO: 318316 - DNA, 507 bp, Cannabis indica
aactagaaaccctaagcaatgcatcagacatatatataaattttatcatcgaatacacactcagccacctaaaagaaagccctacccgttaccatcttcttcgttgttcttctctaaagaacacgaagaacagcagccaacacccaagaaaaccagccccttcccaaatcaattctatacccacaaaacagaaataaaaccccgtaaaaataccccttatcagcccaaatataaacccttagaaacaaagcataaatcagataaaatataggaaaagaaaaatggagagaatacaccaaattttatagaggttttccaaaattgtgctgggtacgtcctcttcgagctcgcctcattcactatggatcttcaatgatcaaatgattagaataggtggcattccaaaatacataggtattgttttggtaatccgaaataattacagtgtttttctcctctcttttctctctgttttctctctaaattagtactgatgttgtgttcttt

SEQ ID NO: 318317 - DNA, 1874 bp, Cannabis indica
atatttttgtcaattaaatatgccaaaaatagaattaacaacttcccactaccattggaaaccccaaatgcttatcatgcaaaataattgaaattaacattaagactaaacatgatagctgacttaaaaaaattaattttttgcctcgaagcctcttcatacatttgtaaaattgtcctaatagtctctccatcatgaccaatagcttgcccaaaaattaagctatcattagcaaggaacaaatgtgatacccatgggcccgaccttgaacaccaaaacccaactaaatttgaattagcttttgcttgtgtgatcaacgatgacaaagcctttgcacaaaacaagaataagtctggatataaaggacacccctgatgcagacctctagtaggaatgcacgtccccttaccttcctatgaacttgaaaaacattctcaggggtcatcacacaatccataataagcttaatcaaccctttcgcaagcccaaatctcaaaaactcccatttaacctgatcatacactttactcatatcatgtttaagcgccataaatccatttgtcccattgttttttttttaaacgaatatagaaactcaaaacccacaataacattatcatgaatgaaacacccaggaaaaaaagtactttgaaaagaagaaataagagggttctgtgtacttttcattctcaaccccaacgctttagcaacaatcctacacataaccatacgctaacttatggatcgatactctttaacaattttacattctggaatcttaggaatcaacactatatttgacttattaaattgttgaacatacatcttgtcattaagaatatcaagacacaccttagtaactctttcacccaacacatcctagaatttattgaagaagatcgcatgaaacccatctagacctggtgatttagtggccccaattgctttcaccacttgaaacacatcctcagttgtagaagaagccatcaataaagaattatcactaggactcacaaggggattatctccatcaatatcatggagaacttgctccatagatagattagtgttggaaagcatatttaatccatggaaccttaaaataattaaaattaaacacataaaaatttaagaaaaccttactttgattgtagcaaaattaaatgtctccttccgttcagttctataaccctttttatcttttttccgtagagtatcaccaagaattggacctagatttctcctccttcgaatatgttcatcataatctgtcactaatgtctgagtatcaacttgaatagtgtgggctgatactcaaacacctttggaaaaaatttgaaagagttatttcttgtgaattttgataaataaggagaagaacaaggagtgacattaactttttcaattctcttctctttctttatataggcattcacatagagctaagtttagatgtgatggactaaaataaacacttgggctgatatctaactcatagggccgcatatattatgagctttagagttagatttttccactttatttcacctaataaaactaaagtttcctttcctattttacaacttatcacatctaattatttaaatactaatttaattttaataattataaataaaaatacaatataaatatatttattcattacacctagaaagggtaccaatcaataaataaacctatatttctctttacttctcaaaattacccaagcttggtgaaaattctcaaatgaaaccttgtttatttttgaattctaattgacttattaaatcaattagttgagcctacaacatgatattatcccaaaacatatggggaccatgggcctaagctcctaataagtagatccaaaa

SEQ ID NO: 318318 - DNA, 529 bp, Cannabis indica
ttatttatattatatatggattgtgcatattatatactttttctgaatatttcatgagagaatagctaattaagctcttagagggttttggtttaaatttatatatttaaaaaaggttaaaatgataattaattcaacccaattccatatcgttaatcattatttaccttactttttttacaatcaaattaattaaagtagtttcacatgcatgaattgtggagccctatgcattcatatataattaatatatataataataatatgatctaattaataattaattggagatttcattcttaaataacgccttgtaaataattatttgtgaaattcatttaatattttaattataacgtaacaatgtaacattataagtagtgttagatatttgggctattttcaaaaatatgagaaaaattattaaagttatgataaatatggcataaaaagtaaatgtcactatatatgacattatctaaacaatcaaactaaaaatatagttttttttaaaaaaaaaacatataaa

SEQ ID NO: 318319 - DNA, 813 bp, Cannabis indica
ttgtgtggttctcattcctacaataatgaacttaaataagtttctacccactgttttcttatatcgaatgttgtttggcaccattcattatctgttagttgttggcttttgatgacgtctaaccttcttgcttcacattcttcctccgcgtagtagttttacattagatctttaaatgttctaagaagattgaatctttaacctgtttggaagcatttgtattgagatgccaagcgcatggacggtgtgtaacatctggaatgtgttccatgagggcctgtttcatggccagatcttggtcagcaactacaacatttggcttcttatctccatggcattcgagaaatttttgaagtagccaacaataggattgaagcttctcgtgggggaggagagcaaccccaaagatgcatgtattgaaatggtggttgactctaatgagaacagtgtgaggcttattgtactcatttgtcatgtaggttgtgtcaaaccctagtacatcccccaaagccacatcgtccacacgtgagtttccatctgtccaaaataagttagccaatcgattctcctcatcaacctgtagacaataaagaaatttggatccttctctgcgagacaatcaagaaattccaatgccccttctgagtccatctctatcttttcttctcgcttggcaccagcaaccctgttgtatacatctcaaagttgacatggcattctctcgtaacctccactatgcaaagcaacatgagaccttatgttggcagttttaattcctacggagttgatcgacctaacttgggcaagcaagcc

SEQ ID NO: 318320 - DNA, 173 bp, Cannabis indica
agagtagaatatacatagagttattataatgcatattaggcatcatatgatgcattgatgatcatattaggttgttggttgatgacgagtaaaagaatgtgtatttttttgatctaattgttgtcaaatttcatttatagtcgaaaaaagagaacgagttctctgaatgtgtt

SEQ ID NO: 318321 - DNA, 1485 bp, Cannabis indica
cgcataaacagaaagatcgtgtgatcaatgctgaatgcaaggatcgtgggattgaggctgaatacaccgatagttggatcgtgtgtatgccacatccacgtaagttgatccctgagttatagggattgagctagtgactcacaatgcgtttagttaaattcgctaactgttgctcattctacacggctcgttgagtattccattctggatatgctagtgaggcatcctgctcagcatgttgatccgaacagatgttctaagtagagtccacgtgtcaccattctcgtgatgccacgtcagagtgccaaatttgggataacaaaaaccacacactaaatgaaaatgaatccttaggccccacacataaaatcgcaaccgacagagctttttgcgttggtacacaaccaacactaatttactttaaaaaaatcgcaaaattgggctttaacccattttacaaaaccctactaatatataaaaccctacaatacataacctaataccctcagctgccccccattttgctctcactttctcactcaattctatctatctatatatatatatgttggattgctgatgatggagcccaaacgacggaggccgtcgctcgcaccacaagctcggatagaccccgcgcagccacctgatcatgataatctctctttctttccctcttctgatctctctctccttccctctttcgatctctctttttttaatttgatgttggctttttcttagggttttggtggtgcgatggccatgggtagtagtgcggtggtttaaatttgtgtattttgggtttaaatagttgtttaaatctatgtatatgtggtggtggtgcgagatgtatagtagtgtggtggtggtagtggtgcggtagttctgtatttttttttaaaattcttttgcttcggttcataatcgaagtaaaaaaccaattagcgttggtacagtactattttcttcagttattaaccgaagttaaaaacctttttttttgcttcggttatgatttggcgtcggttctaaactaaagcaaaaactatgactatttgtgcctacaattattgctttggttactctaaccgacacaaattatttatgtgtcactttaaaaccgaagcaaaagaccctttttgtagaagtgtttcttccctaagagagattggaaaatcacaccatataatccatttttcttaaatcagtagaatagtagcattttaaccatttccatttgaatttttttaaggacttccatagtttatcatcggaactgatatttctaaataggttttttggccttaacttgaaattatagtcgtcaatactttttaatattgaattatttaagaattatcttttaaaaaaaatcacataagtaacagtaaaataaaagaaagtattgttgttttatatctccaacaacaaattaaaataaacaaaacaaaaaaaaaatcataagaagaagaaaaaattgca

SEQ ID NO: 318322 - DNA, 1940 bp, Cannabis indica
ctactactttaactctcattcctaagattaaatgtccaaatagtgttagtaatttcaggccaattgtgtattgcaatgtggtctacaaaattatactagagttctttgtaataggatgagacaagtcctacctaacttaaaacggttaattttgtccatgggagatacattggtcataacatccttatttgtcaagatttggttaggcgttatgggagaagaagcaatagcccctattgtatgaataaaatggacttgcagaaagcttatgacactatggattgagattttattagagaaatgtggatggctcttaagtttcctatgacttttatcaacttggtgatgtcttgtgttacaacactgaaattctctttgatggtaaatggttcattgcatggttattttccctccaaagaggcattagacagagaaatcaaatgtctccattgctgtttgttttggaaatggagtacctctcttggttgttggccaaaatttctaagaggaaagagtttaaacatcatcctagatgctcaaatttaaagcttaatcatatctattttgtaggtgatcttctgctcttttctagtggtgatgtttaatcaatcatgcttctctcgagaacttttcaaaccttttctgaaaatgtcggtttgaaagtaaatagaagcaagacttcaattttttgctatggaatgtcaagatagtatgaacagttagttctgaatagctttggtttttctaagagtttgctgccttttagatatcttggcattcctattctctaaaaaagatttccaaagtggagtgtgataacattttggaacaaattaatggtctctcagattttaatttggagctctcagaatgtatcctatgccggtacgtgtgttcttattaactcagttttgattgttatccacttttattgggctcatttaatgattttactgaaatatatccttgagaaaattaataaaatttgtagagactttttatggaaagggagtcatgacattaatgcttcaggcttgggctaaagtgtgtacccccaagaattttggaggcttgggcttccaaaacattgatcaatagaacttttatgccttggaaaaatatatgtgggatatttcttgggataaagattgtctttggataaaatggattcattcagtgtaccttaaagggcaggattggtggagctgtgatgcgccacaaaataatagttggtactggaagaaaattataggaagttaaaaactttattagagagaagatgcattgggctgttttcacatgtatgaaactgaatatctcttctctatgtgaaaagctttggcctatagcaaatacaataatttggaacaggttttgctatctgaaataccaatttattgcatggttagtttatttgaataggcttcaaattagagatcgattagcaaagtttggagtcattatagataacattaattatcttttatgtgaagagggggctgaactcatcaataccttttctttcaatgcacatatagtcagaagattattgagaaaattctcaaatggattggaatggcaataagtaaaaggactttggagacttgcttgaagagcataaaaaggaggaagatctctaaattcaagatgaattttcttgtggccgccttgaatgctatggtctatgccatttgagacactagaaatacttatctttgggagtaaattttttttactgcatatactatagttcaaaagataaagagagaaatttgtttcaagttttctcattttaaaagaaaaaaaaagctagtttggtggattaaaattggtttgaagctttgatgtcttgtaattgattgttatcttgtatctggtgccctataacaaatagtatttgagcaataaaatttctacttcatttatcaacaaaaaaaaaa

SEQ ID NO: 318323 - DNA, 563 bp, Cannabis indica
tgaagatttgaaaaatatcaacataaaagataaaagatcgcataaaaatatcaatgtgaaaaaaaaaattagaatcctgcccagaaatgatatttcgcgtggaaaacgggggtattggagcacacgggccgcgtcccagaaaagtgagtgtcgcgactcgcccatttaaagacatccacacgggtcgcgacctgcccatttaaagaccaccaccaccatccacacgggccgcgacccagccattgtggcgccgcggcccgcccccttctgtagcacaaaaatttcatgtttctcacgtggactcgattgtggtttcccaattcaatgctgaataggattttcagcatgtgcatttctatctttttagtccctcaaagcctatacaaggagcgaattttagttgatttggagaagcaattcggagggagatgaacagtgaaatatagagcacgaatttcagagacggaagtcaatactggaagcattcatcagagggtttttagcattattttcttctcttttttaaagttatatgtgtgattttgcttccatgaacatgagta

SEQ ID NO: 318324 - DNA, 1687 bp, Cannabis indica
ataataataatatagtctttctcacctcatgcatgagttgtatctagatttctttttttgtaatgagaataaatgacatgaagacgtaaccaaattttgaccaagtcaactataacatgaattgacactattgtttagattctaatttgtggtcaactaaattattgtttcatctttaacaaaatcaactacaatattattatgacatcagaattttttttagtagagattagcattgttaattcagattaaatttttaaaccatactcgttcactagattagcggaaataaaaaaaataataaaataattaatgagagacacataaatttatagtagttcactccttatatcgtgagagtattagagctacatctatttcgaatttttatttttcacaaaatagtaattacatcaattgcttaagtatcagaaacttcaaattctaaagagagaaactctaatcttgtgggtagttttctaaatatgaaaaatgaaccaaggaagttttccttttataagtgaaggagacccacaaaaataaaacaaaaaatacaagtaaagtattttccatcgttgatgatgatttaacggtaaaaaattaacttctggtggtgatagcttatttttagtgcatgacaggtcccgctgcgaattactcagggcttatttttgtaactcccttaggggtaaattttgatgacgataacttcagaatttcgactagggtgtgaaacatgacttgatggagcgtttaaatagcttcaaaatgcaagttaaatcccgtcaatcatataaaatgagtgagttatggtcgttttactaaagacagttcaggtcctggcgcccaagttgacatctagcacccacgttgatatcccagcacccaggttgatgacatcaacctggacgatgtataagtgtaaaaacgtccaaggaaagtactttgagatgcctaagtgatggtttgacaccccttagtccttttataggctttgatgaaactagtcacacgttcttatagatgttgctattttgtagaaacggaagactcaaaacttttgatttctgtgtgagtcaatttgccaaaaattgaagttgtgcatttgattaatctgacttcatggatcattgcacttgtgaaaaaaattgacggacggtcaaaacggaatcagatttggacaagcaaaacccagtgaatcatgccatttgttgacctgggcgttggggcctttcaactgagcattcaaaattcaatttttgatacttctaatgcttctgaacttgaggatgggtcctcccccattattgatcatgtcggattcaatggtcgcatcagatttgacatttaagcaattgaagagaacgtcctaggttgattgtcaacttaggcgctgggcataacactaggtcaacctaggtgctgggccctggttccagggacttaggtttatggttttctcctcgagtttacttgaatcttcgttatttttgatggcggtgaagatgcccggagcactttttgctgaactgaattagacatagcccaggttgacaaaatattaacctaggggcatggcctagtcttaggtgtcaacctgggcgctaggtccctcttctgcccctttgaaagttctgtttggtccttggaaatagatgaatctcaatattttttgaagacaaagatg

SEQ ID NO: 318325 - DNA, 1768 bp, Cannabis indica
gggcatttcaatttcttgcattcgaaaagtatataatgtgattttttaatataacggtcaacaatgtagttatagtcataaattttttctaaaaaattttttaactatattttcaatgttgtaaatttttcaaaacttttaagaggagaaaatagagacgctcctaatgataagataaaaatagtgattttactataatttatatatatggttggtgactcaacatgatcacattcaaataaaacatttgtttttttcaatagattacaaaggcaaaaatacaaaaatattcaacaataatatgaattatagttagaattttgttttcaaaacccactcatcttgattttttcgatccagcctgttgattcattctcaactcatcgatctcatgatgtaataataatatgcctaaggtttttctctgtcgaattattgataaatatattattgtcacttttagttttcgtttgtttattcgatagatagatcaacaaacagttataaatttgcaaacctgtttaatcgacaaatattcaaaatctagcaaaactctgtcctaaatcctaatatatatataattatatatatatttgattgatcagagattaagaaaaaaaatgatatatatttaatattttgctgatattattgcaacattgtactgcagcagaaatattcaaactttggagaatatttcgagtacatgtgcattgtagttaagttacattaattaatatatatataaatatttaagagtgattaattaaaatactttacgtgcccgagtgagagaacctttccaaagagctgtttagaatatagctaaatgttaaagtgataaaaaactcttcatgtagtggttagattaaaaagtgatgctcaacgtcaatgtgtcatatgattaagtagggaaatttgatttttcatggttagttactattggttaaaattaataatttagggttcgtttcgtacgctgtataagggttgtattatattaaataataaataacactatgtttggataaaacaatgtatattgtattatttaatacataacaaatagtccgtattagcttgtattataatatttataaaggattcggcgtcaacaccaatctccgacccgaaccccaactcgggacactgacccgaacccgaacctgggactcggacccgaacccagactcaggcgcagacccagacccagacccggcacccgggacccgagacctggaacgcgagacctgggacccgggacccagacctgaactcagactcgggactcgaacccgatcccagatccggatccagacttggacccaaacccgcgacctggaccctagacccgagaccaaggacgtaggacccgcacccgtagttggagttggggtcgagtgcattgaaaatatattaactttacacaatctattaatacaagtcaataccaaacataatattgtattaaataatactaatacaatattgttgacctcgcttttagccaacgacaacaagtctatttttataagcgataagtgatttatagcaataaatatatgataaagcaatgtaaagacacaagaattttatagaggttcagtcccgagctgttcggtaatagcctaatcctcgttatttgtattaacttaagatcaaggagaaagattccttttcttatagctcttacaacaatatctctaaatgtataattcttagataatataggatcaaggaaaaatgaccaaacgttctttctctgcga

SEQ ID NO: 318326 - DNA, 1950 bp, Cannabis indica
tcacttacctgagtattacttgttaagacgatacgtatacttgcgtgttggatttatcacaacacatacataaaagtcagagtactgtcttaaaagtttacaacattacttcaaatgcattttataaaagtatcgctttgcgagtacaaaatgaaggtccaagtcgttctgagaccgaacactccaagtctaacaatcctaataagtataatcatcctcaagctctgggctcactggtgctcaaccttcacctttcatttacctacacaagcaaacaatatttatcaatcgacagagtcagaaagaaaagtataaaacatataatataatatcaacttgtatctaggcatccatacacctatttacaaggcttcagatgaatcaagaccattcttaacagaagtacgacccctgtaccacattcattaagtacgcgtcttgtactagtgttggtaggactgaaccgtacctcgagtaccactgagctagtactagtgttggtagcactgttatacccttttaacatcatacattgtaccaatacactatgtattgcaaccgtactagtgttggtagtatataaatcacataacacaatatgcacataacatacatacacatatacacatacatggtttatactaattttacctcatttctatatttaagtgtgttagccaacctgaatggaaattcacgcactgaacagaggccctatgtcactatcacgcaaaacaggtaaacaacttgcttaaatcttttcggggactcaaactcaaaattaatagtttctctattgataaatggcatgtcaacaccctaaatattgagcaacaagttccaaatcatgagttaggtaacattgttcatactccttcaactgacgagaagcataagcaatgatcatgtcagcttgcatctgaacacatcctaaaccctgtccggatgcgtcacaatataccacaaatttctcctgatctgatggcaaagctaatactagtaccgtaatcagtcgttactttagttcttggaaacttgtttcacacttgtcagaccataaaaactgctggttcttcttggttaattctgtcaatggcaaagagatattggaaaatctttccacaaatcatcgataatacccaactaattcaagaaatcttttaacttttaaaactgtccttggtctcaaccttttcttaaatgattcaactttgcccaaatcaaccataatcccatcctttctgtcaatatgacttaggaaagctacttgtgataaccagaattcacacttcttaaactttgcatacagcatgtgatctctaagtcattacaaaaccattcaaagatgttgttcgtatttctcttttgattgagagtgtacaaggatatcatcgataaacaccatgacacagttatcgagaaaatccttgaacaccctattgattgttggaattattttaccaggatcttagatctactcacaagtatgttgattaacatcctaaatatgaacttctaaaacgattataagtaaacacatataaagtatgagaaaccttacattgggtgcagcggaataatatgtttccttccactcagatctctaacccttgtatcctttttgttgcagagtattatcaagatctgagcccgaatgtccttctttgttgaatctggattcttcaggatcttccacactatgattgaggtaccacttgctgtgtgtgggcactactctatcagttagggatttcgaaacaatcaaagaagaagaagaaagagaggtggcagctaggttaagaaagatggctcaagtttttctctgaaaggaatgagatgtattgtgttactttcctgaagccattactttctatttatagaataccacatagggttagggttgaattatatggcattaaaataaggaaaatattaaatgataaaccctat

SEQ ID NO: 318327 - DNA, 515 bp, Cannabis indica
tctccgctccttttttctcaatttgcttcattgtgtagccactagccaccgtatactctccatcaattgtaaagttccaaatgagctcatcttcaccacaacctctcatagtttggatccccaatatccaacgaatatcttccacattcatcctctcctcaagaacctctatcttccaatctcctgtttcgttaatgagactttccacataagtattaggaggcaccttagcgggggttcggaggagaaatggggctcctctaggaatccaacgatcctcatttattcttactttacacccatcagtcacacgccaccttgtccccttcattagtagttctcggccccaaaggatacccctccaaacattagaacaccaagcacctttgcccgcctcatgaaactctacatttggaaaatagagagccttcatcacctgagcaaacaagctgttggggtttgtgaccagtttccaaccttgctttgctaaaagagcttagttgaaatcttccaaa

SEQ ID NO: 318328 - DNA, 1802 bp, Cannabis indica
tgtagattgtcgaatctcacttgtgtttttattatctaattagaagatttgttcgtggagtattcaataatactccaaagttgttgcaggtaatttttatagaatgaatttaatagcgatgcaatattagtttttatgaagaatgaatcaataacgaagttcatatttataagtgaaatttattttgttaactggttagtgtaaaaatttaagttcacattacacaaaaggcaaaactctcttatatttttaaaataatatttgataataatataataaaaaaaaaaagagtaattaacagagttcatctaattttagtcaataaacaattggatgaaaaaactttattgttattatatatttttttatttaaaatttatgttaaatatttaattttctaatataataatattatttgtttaaataaattacatataactttatttaatatagcagttaaaaattaaaatcattacataattaaaaaactaattacttttaaaatactcctttaattatataaatcattgacttttcaaaaaaattaatatataaatcattgacattaatttttaaaatttaatttttgacgtttaaaatattttaatcaatatttaaactaccaagggccgcaccaaaatattcttgcccaaaaatagtagatatctatagagggaagggattactaacaagtattattgcatgtaatagcattatagtactaattaatcaaaataaaaaaccttatccaaaccccagcacctccttaagagagcactcccaactaaaattgtaaataagcataagaaattttaacagggcacgaaatgagatcaaatacactacaatgttgaattaaatttttaatatggttcacgtgtattgctattctaagtttgatctaaataaaatcagtaattacgagtcattaaatatttttaccgagctataaaatgtgtaaccaaattccaattaaaatgaaatcttcaaataacttgtgatagtacttctaatttattgaaaggcaaaactaaaaatactaaaacttattagaaaattaaaaaaaaaatgtattattggaaaatgattatcctaagatcatcacggcaaatatcatacctaccaatagattaaagtatatttctactatttgagttattctttttaaatttgaatcgacaaaggcaattttttataatctttactaaagtaaaataagtaatacccgatattaaattgcgctaataacaatattacaccttacaagagtgctaggtaaatgtgaaagatgacagttttctaagaaaaaaaattatataaacatggatatggacacgactcctattatcctctacaaactcatgccttgtgaattcactaaatagacaaaagtatgaacaatacctcatcaaaaatggtaaatttcaaaagcaaacgatcaaaaaaacaaggtcaggctaaacaaaacaaaaagcctgaacccaaaggtgcaactacttagataaggaaatgtactaaaaaaaaaagagaagaaaattgaatgtacacattgagatgggttgggtattcttctggggctgaagctgcaactgcaactgagagagacactaaatcaatccactcgactggtcaagggaaccaatttcatatgtgagaagagaacattgtgattgtgaccaggttccatcaacttccaattccaagcacccctctggattttgaaaatgaataaaatcttccgattcagttctctatcattctcttcaatcttttccataagaaaagacgaaatctttaattct

SEQ ID NO: 318329 - DNA, 1086 bp, Cannabis indica
cccctaagtgtttcatattttactcatggcttcgacaaacgacttttcaaatttcacaaatattaagtgtttcaagtcataatattatattatagattgtttttaccatctttattgatattaccttttttttattattaaattgtgtggtaatagaaacttaatttttgtcatgtcatgttgtagttttgtggaagactattgttacagagactttgccgataaattttattttacatgtaatttgtttgaaagttgttatcttctaaccattgagaatttttttattagttcttaaaataattgataggagttggtttgtttttttttatcttattttgttttgtagatgttttatggtccatttttgatatgctaatgagtttacatgtagttttttagttttacaagctgaagctttagctcttttggtgtgctacttgaggatattatagttttattatctaaatttttgggagtatttttgtcccatgttgctcgcttactgtagtagttcatggtttgacaaagcatgcccttcgaataggcgatgagctatcctgttcgaagaggttcatgcgctatttgcagatgtatgcatcgtaaattcttaagtgattctaagtactacgtcaaaaaaaatatcatgtgaccatggtccatattgaacaacactttatgtaaaatgggtttttcatttttacatttcaatgcagttttttttttttttttttgattttaagaaatccacatagcaactaacgaagcaacttaaatcgcaacccaaatccacataacaacccacataataactactagagcaacccaaactgtaaaaataaaaaaatgctatataaggtgattcccctacataaaattggtattgataattggactacattgtatatgtaccaagactactccaatgggcaactcccattggagatgttctgagcattttcaatgagggttgcccatggaatggtcattgccacatgtgcattttagtcaacatttcaaattaactttaagaataacattatccaaaatgagcaatgatatgtgacattatttatttatttattt

SEQ ID NO: 318330 - DNA, 1114 bp, Cannabis indica
gagagagagagagaaagagtaagactaaggcagagaaaaacatggagagtaagaaagaaaatcaagatcggaagtggctgcatatcatgctgtcatgataggttgagtggctctaataagtttgagtgttggagagccatttctgtcattgattgttcttggtgtttgtgtattgtaattggtgtttgtaacttgttgattcttagtggagaaacaccttggggagagctggagtaggactcaaattgagatccgaactaggataattttcttgtgttttctctcttacttttctggttttttatcagttttgatttctggtttgatggctgatatgtttgctgcttgtttgatcattattcttgtttgaatttgtgttatttaatcacaacagtggtatcagagctcaggaagaattccaaggtttcaagaactcaaactctgtgatcaaaggccaagaaagctactacaatggcatcatcttctaccaagttcgatttggaaaggtttgatggtactggagacttcagtctatggaaggagaagatgttagccatactaatctatcagaaattggattcagtactagaggatcccttcgagaagacagagcatgcttctgatgaaatcaagaagaaggagattgatgaatcaaagaagaacgattctaaaactgtcatgaagcaagcaagatcagccgttgtcatgaatcttccagacaatgtattgagacaggttattggggagaagacagctcttagaatttggagcaaacccaaccaattgtacatggctcaatctactgcaactaagatcttcttgaaaaggaagtactatgggtttaaaatgaatgctactaatactttagatcaaaatcttgatgagcttaataaaattgtgttggctcttactaatatgggtgaaaccataaaagaagaggatcgagctattatattacttaatgctttgcctgaccagtttaaagaaatgaggactgtctttatcttgaagcggggacgttttcccgagacgtcacactagctagtccgtttaaaaccatttaagataaagacaataaaagacttctttaatgaaaaataactaagcatgagat

SEQ ID NO: 318331 - DNA, 684 bp, Cannabis indica
tgtaaattgaattgattatttgacatgtgataatctggaatttaatgactaacctgtagtgattcagaaataagagaacgacaaaaagcgaggacgtaataagtaggtgagattgtgcgtggatatatgtgtgagtgtgttgggggctcacgtgcgagcccatgagggggctcgcatgcgagccatgcatgtatgcgggtgtgtgtgcgcgttgagtgtatgtgtgtgttgtgtgtgctggttgggggctcgcatgaagccatgaatgcatgtgtgtgtacattgtgtgcataggtgtgtgtttcacgagttgtaagtgtgaggtgggagttgaatgtatattgacgagaatgttgttagatggggaaacaaagaaaaggcgtgcaaaagaatggcatacaaccacgcctcgtgcaagatctgaaagcaatgaggtatgagtagtggagatgtatttaatagtaagtgtatctcaagccaatagaacctacaaataccacattctcatatgacgtgggttagaaaatgagtagttctgtaactcaggcattaaatacaatagagagaaaacgctcatccattaatacttgtatttctttttatctttgtcatcatcttgtcatccattcaaatgtcaggccaaatagtaagtttattaaaaaaaaataatatatattatacata

SEQ ID NO: 318332 - DNA, 878 bp, Cannabis indica
tttggggttttgaaaaattgtttagtctgacaaatcaaaagaattacttcaatgcattttgactcctgatcacgatgaggcaaaaggacaacaacaaccacaactcaggtggtggctcagacagctcctcatctgttgttgtttaagtcggctcacctaacaaacttgataacatgatgactactgctgagtgtgtcatcatgagcaactacttagatctaattttcctcatcagcaaatatatcagctgcagattctcggctcatggttgctgctacagccaataataactcatttacttagtcacccaagtcaatgaattttcttctccaacaacaaaataaaactcaaaggtacaatcttagaaattaaagttttgattttgatttttgttaatgtctttatgtcagtacttaattttgttttgtgatataattattataggtctgcagtaacatcttggattatgggtgtagatttacacaaattttgaatgcattctcaatgaatggtggtgtgaaccagcatctagacaaatctacttgacttttccagctggtagaatttgtagagaataggatgtttctaggtattttaggttttttctttgtttattaacaaaaaaaaaatgcttttctaaaaagaaaattgttctttttctaattaagtttttgttattttttcagtatgtatagtaagtttaaaatgatagaataccaaccaaatagaatgtttgactttgtgacctaacatgaatggttttgaattgacttagtcaaaacactaatttgatttttgctgttaagttggtattagacaagtaaattaatgaagtacgtacgtgcctcgcacgtaactttaatctagtatatatatat

SEQ ID NO: 318333 - DNA, 652 bp, Cannabis indica
attggatgaacacccctaatataaattataaatggtgcatttacttttagagaaaataactaaaaaaaaatgtcaattaattaataatatctatatactattgacgaagaaaataaaatcataaactcgaaatatttacatataaatatattaagaaaaaaaaatttttttagatatatatttatattggtaaaattatatttttttataacatcaattttatatatatatgacttatatattcaatttttttattatacaataatgtttatataactatagtaaatatatatttatcatgttttacaaaataataataatttaggagtgccaagaacttcaaaatattatttgcgcatgtaaaagaataaaatatagaataaaagaagtttgttgtgattataatatatagcaacaaattaaataataacatattatcacacgagtaaaagaaaatataattcaataaaaaaaataaaccattattgtccacactatttatatatatgttatataaatatatggaaatgattttgtctcgtgatgtacttttacggaatatattccgtgatatacgacatttggagaagttatttgatctgagggctggggttgatctaggaataattagggttaaaaaatggtaacatac

SEQ ID NO: 318334 - DNA, 1340 bp, Cannabis indica
tataataataatataattctcccaaactacaaacttaaatagaaacctaacaagtaaagagtacataatgtcataattaatacaattggttttataagtaaataaaatgttttcaggaattagtccacaatatattgttttaattgtcttaattaattatggtcaacctttttaagcatatataaaaatgatgtcatccttacataatataagtgtagagagagagagagagagagagaagcaatggatatcgttggcaatgggccatgcatgcaataaagctagttaataactctcaagaaaacttgtgaaacaaataaaatctatacatacatgtagtaatttaaaggaacataaatggaaaacaactcaactaattgttattgttattattattattatataaacagttcttttttttttttatttaactttgttagagataataattgaattaaaaaaaggtaaccaccttttatttttctttgggtgagggagttaggtgcgccttataaatattgctgtagggcactgtaatggaatagtactatttctctccactccattattcttgtgttatgggattatatctataataataattataataatgtatacgtgtgtgtgtatatattatatattgggtttgttgttgtttgaagaatattaatatatatatatatatatatgaaaattgattattattattattattattattattattattattattatatattaataatgatgcacttgatctctttccccacttcaattgggaaccatgtatttgtcaaacacctttggtgggcggttgaggagatcatatataacattttggggagttttttctgctaccaaattaatttcattattattaatatatatctatatgtatatggaccactactactacttcaaccttccttaatttcaatgttttacacttttgtatataagtatagaacatgatcacatggtgattagtttttttctccactaagctttgtttcttttccccttatatataaatatatatatacatcaatataaaggataaaatctggcctcatcatgtattcggatctaggagttattattattattagaaaattctataacacccccttaaaaatacatcgatgaacctctatttattttggtatctgaaataattttttagtcataaatttttttctcatggtcatgtacattatagttaaaaaatttaaaaaatttaacacgctaaaaacaggattcaaacattgtgttgcatgtgtgattattttattttatatgcgtttgaaatagactgtttaaacattactttttatatt

SEQ ID NO: 318335 - DNA, 1170 bp, Cannabis indica
aaatataagtctaatttagtagtattcagtttaatttcctgtgagattgacctcactcatatgaatactacttgattaaatggacttgcatagttgtttataattttggtaacaagacttagactgtaacttagagagcatgccattattttttatatatattttaatataacacaactaaataatttttttaattatgacccaattgacatattaaagtaatagtaaatttattattcagtatattttgttcatatggtgtgtaattatgattcgtactgtgccatttcaatatagtaagagagtgtgtcacgttataaaattatatttatttattattataaatattaaatttttaactcatatttcaccttttgtttttgtgtttatgaagttactaattttttttatcacacacaactattattattgaactttttaaattttgtaaatttttaccagataatgttttgtttgataatatcataaatacattcttccattatcttaaaacatcatacttcagtcttcactatagatacatatgaccaaaaaaccatatttacattaataccctcataaaataaaagtttattttgtaaataaaagtgcatatttaaaaaatatttttctgacacaataatttgtactactgggtaactaaaccggttgtaagaggtatggtcttcaaaagtcccattaatttaaaaataaaataaaagtggatattgtggttttcggcttttcgcctggcttcattcctctccacggataagattcacagaggccaaactctgtcagattcgaagaaagattaaatcttcaatggcgctagagttttagcaaaattacacttcttttcattttcgaactactgaatcattacttaccaactacaatgaattctccagcattttcaagcgggacttacatatcaacatcggcttgtagcttttgctctgatattcgtttccagccttctttggctccctctatttgttttcagcttaaacggtatcgtttaaccagtttgaagttcaatcacattcctaggtgaccattttaactttgaactctatatataatttcatattatgattgttttcgtgaatgtagcagtatattgtgattttgcaggaagcgagtgattcttcgtcgagtgactgggac

SEQ ID NO: 318336 - DNA, 854 bp, Cannabis indica
ttttccggattcccaaacagaaactcaatcgtttcaccgattatgggccaccccatgctacctggtggtagattgttattggacgatttgaaaatgagtatgtaaagaactaagaaaagtactggagctgaacaaaggatgaggtaaagagtctccatggttttactttggatgataaaggaagtgtgctttggttttatatatatagaaagtggggtctaatatgtgtatatatatatatatttattgagagagagggggagagagggagaggaagaaagtgtaaacaattattctatttcaattagagagagagcagccggcaagtagctgcgtacagtgacattggggatatatatataagagcatattccaaaagaaattttatatatagatactccaataaaacgatagaaagtataggggagtggtttcttcattttcctatgtccattcaaatcctatgacctctccattcctattattccaattaaaaaaaaaaaggtttatgacattttggattatgtgttttgcaaaagttattgattggactctgtgttttattaaataacaaaataaaccctgtattttctaaaatagttaaaataagccttaatttttgacaatttattttaatataataaacttgaaaacaattcctaatacgaacagatacagaaaatgtaaacaattttgtcgtaacacttttagatcggattataattaagttttattttgacaaaaaattaatttatggtcctatttgtaccattttagaaaatacagggcccatttgtcatttaacaaaacagaaagtccaattgataacttttgcaaaacacagggtccacaat

SEQ ID NO: 318337 - DNA, 728 bp, Cannabis indica
gtgatcaaactagccatccatcgcattttccgttgccgccgagcaaaaattacaaaaattgcatatttcacatattaatcaaacaatacccctagcgtttaataaaatctccgaaattgagaaattacaactctaatatttatttctaaatattggggtccaaaataattaaatccataaataataataaaataatagaaattagtgcaaattgccttttctaatccaatttactaaggcggtcgttacaaatagcatgatcagacactgccaagtacaaatacaaatcttctccttccacgggcttcgataaaatgggagcttgagttagattctccttcaatttctagaagcaacttcccactcttcaattcactcaaacttcttgttgcctctcaatacgttgaagaacggtatgcacttatttgtatactttgatataaacctgctaatgtggcaactcgaccagtaacactttaaacatccttgtgcttctttggagaaggcatgtcgatgaaggctttaatcttttcaagatttggctcgattccacgagagctgacaatgaaccctagaaacttcctaaaggaaactctaaaggtacacttcttgggatttagcttcatcccgtacttactgattaccacgaaggcttccttgagatcttggtttaactaacatgtcgtctacatacacctccatgtttctccctagtggtttttgaacat

SEQ ID NO: 318338 - DNA, 1346 bp, Cannabis indica
tatatatatataaatgttatatacttacacatgatccaaaactcgaaagatccacaaacagcaacaaaagtgctgaacaaaaccatcccaatggagccactttcatcgaccgtactattatcttcatcttcatcttcataggcaacaatcttcttcactttcttattatttatgattaatggttgctccaaatcttcaagaatattattgttattattattcttaattataatctcaccattctcaacatctatgcattccccaattgccatctttttctaattaaacccaaaactcttgcaccacttcacaagttttgatatgaaatcctttttctcaagatatatgtatatatatacacacgaggagagtacgtacttgacagtgcaatatgtgcaactagatatttttgacttgtccgattctaactattcataaactaattaaaaaagaaatcactaattttttattttttttaaaaaaaaacatagaaaatgaaattttaatgtgataatgcatgtgggataaagctgtcactgacgtggtcatgaaaagtaacgcagtaaaaaagctttaatttgtactaaaaatataacgttaggaatagaaaaatctctaaaattaagtccaaaatgggattattatttggagcaagtagttgaatgttgtttttctgagagtggaatatatataattaatgatgatgataatgaactttcttttcttacgtacacataatgcttacgtggaagtgacaatgaagaacggctagcattggactcatttggacaaaaattattattgaagatttttagtgatgcgtgataataaaaataataattagatgagaagctataccaggcaattctggtccattccagccaatcatttgtatatgttatatacattggcaaactcttttgtcattatatattatggggttaatttcgataatttttttatattattatttgtactatagtttaactcttagagaaagtaggttttggaactaaactaaatatatatcaaagatttattatatatttatatcattatttattattttgttggtttgtatatttatatgcagtaattaaagttgaagacagctcagtagtcatcatcacacctgtaatgtaccagtgtgcacgttaatttgttaagagctttagaaagccctattaaatcgtattgaattatatcttatataatatttttttatgtaaaactatacgtattattaacttgtatgaacaactaaatatataatattttagtataaattaaagtttaacataataatatataaaaatatgatatctaatctaattcaatataataca

SEQ ID NO: 318339 - DNA, 1900 bp, Cannabis indica
aatttttcctgacggttttaaatagttacttaatttttttagtgatgtccccgaaaaaaaaatatttttagtaccgtcgtgaattctgatatttgtagtcgtgcatcgaacagatcttccaaatgaaagattaatgggcatctgaatatctatctctgtatcatagtaattaattaaggttttatttttaggatcatgtctaggattcgtatctggtgaataaggaagtaacttatcgaagaccctttaaatgatcatctaggatacattcggaagagtattcgaagaggcgtcccagaaaccttatccaggatgacatggcggccctttaacactaaatctcaccgaattaagggattgtcccctgtgtcaaaccctaagagtgcgcacacccccaaaaagaaaacctcccttttgtctaacggccaccattctgacattatagtacacaaagagagcgcacgcatgccatttaaatgtcgtgtgatccccacgcgtgcagatcaccttcgccccacgggctaggctttagtctatggacccaaaccattgtattaagtgtatttactccattagtgggtcaagtttaatgcaaactctagcaggtcacgagtatactcatacccgtatatgattcttaagccatttcaagaatacttgtgtaatgcattcaactattcaaggctatttaatccaatacattcaaacactatagcaaaatatctattatcatttttctaatcttaaatttaaataaataaaatgataaaacaaattaaaaaaaaaatatcatggttatctttattttaaaatatctaagtttaaatttaaatcttatcatttttattaaaatatctaataagataattttgaatgtcatatttaaaatttgaaaagtaatttcaaactttaatatttctcatatttaaaatatttgatcttattatttattataaaagagaatattcaaattaaccatatttaaaatatactatttgaattaaaagtcaaaacgatcttaaaacctcaatttatcttttatcaattaaaatatcaataaaaaaatagatttattctgattttactattcttaactttaaaaatggaaagtattcgaaaaaaatataaaatttagcttttgaatcattcaaaaaagatatttgaaactcgagatatgccaaaaaaaagttttggcatgcttgagcatgcatcagacgtgcaccaagtgccgatttttttggactgtgtctgagaaatcagggcaggcgcatggtgtgtggccaaggaacctcgacatcacgtagttccacgcacgctagtccttttatgatcgagttttctcggcatcattccctgttgccgtgcgtacatcacttggtgtcacccaagtgatgctcgcagtcatgatgccaaattttcaaagtcccatagctttgtcaatttttatcgaaatcaagtttcgtagaaagaaaacttgcaaaatttttcctaaactttcaatctaaaataattccaaaacaaaattcttattattttatttagaaatatttgtaatatcacaatcaaacatcaagacacatatcactaacatgtaatatttaaatctcacataaaaatacatatatataattgttttaaatctaatttacatgaacaataaatggttaccatggctctgataccaattgttaaaaactcctgttactgagatcttatttactattcaagtatgttagattaaatctaatctaataacctaacatagatttctaaaacaattaaaataaatatgtaaagagtttaagaaaaccttacaataatgcaacagacactactacaaaattaggctttagagtcggtttttaagggctttcagcgtcggtattggcgaaattcgcta

SEQ ID NO: 318340 - DNA, 619 bp, Cannabis indica
caatctaattgaaatttattactaaaaaagccattgcttggttcatgaagaccttagggttccatttcaagatctctacataattttacattgtatgattattcatatatttaattattagtgtgatgtgtaggcttgtatatgattattgcatgtgatagtgataaatttgatccatattaactttttagttgattttttttgggtaactttctagttaatttaatcattcaaaacttaatgaattaatcttaatgtggggttttactagcacacttaaccccttctcaaatctaattatatcaaaacaaaatattgtgattaaaataattatttctcaaattatttaaacaaataaatcaatatatatattccataattttagaatccatagagacattaattcctttccatatatgaaaatttagctctttatttatttattttatttatttttgagatctaaacaagcactagctttcataacttccattattattattaaataatgtttttaattaatcaatttatttttactatttaaaaattgtgagtgaaatatcaagacgtctaggaaggaaggccattgcttaaattatatattatattattttttaca

SEQ ID NO: 318341 - DNA, 2433 bp, Cannabis indica
atttgaagagtgccttggattactttgggggatttggaatgcatttatttttgggaaaagaaggcttgtaattgtaaaggataaaatatatggctagctaggttagggatttcttaccggattaaaagtaactaataacctgttaggaagtcatactaaaaggcagcaggttgtctccaacgcttttaaattgaacactcatgccactctcaatcaatcttattataaaagcgaacaaagaacagtggtgactaatagtttaggagatgtggttgctgggtttggttgttccctagtgttaaaatttgtcatgtgaataggaatgataatacattagctcataatttggctaagttaacgctagggatagacaataaagttttgtgaaatggtaatattccagagtttcttaaatcttgtaattctgtaatcttagctcttttaatgacagttaaaattaagaaaaaaaaaaaaaaaaacatatatgatagagcaatttttacattttttattttccagcatgatataattcttaccatttcctttagttaaccttttaaacattcgtaagtttgataataattcttagctaattcacgaatttaattacatgtatatataggactttgttattattgtataatagaataatgaaggtatatatgattatgtaaatagatattgatatctaagaagagacgtaattaatattgactttaagtgcaaataaattaatgtatgaaaaagccaaaaaacctactttactagtcaggctctgaaagcaatggaagtataaaaccttcggtatatatatatatttacagttacagatatatttgtttttgtaaattaactaactataccactgtgattttggctctcatgatctcatgtgataacttttctttattattatattcttatctcatgtacattgtaatatttctcatctcatctaacaaattaaaaatgttgtaacttgatctcatttcactttgagtggtcacgttccaatattattttctttatttcttttatgtacttatcctcttctacaaattaaataaataaaccttactcaccaaaatatatagggtaattttatagtgcacctcttgaaagaatgttttaatatatattttttttttattgtagtggtattcatgaattaacgattcatatatctataattgttggtcgaacttttttgaactaggatagttcattagttaggcgtgtttttatggttgtagaatttttatcccgagtcacatgagacaaaattattttcaaaaatttagacaataatattacaacattccaaaataactccccaactcattaaaaaatactcttcccttattaatagctattaccacagaaaacaaatttaaaatatgacaaaaacaatacgaactagtattaaaaaaattaatcttttaactaaaaattaataaactaaaaatagatttaaacacacaaattaattaaactcaaactcaacaaaactaaacaaaataaaattccaattaaaatttaagaaatctagccaaaggtgataccctttgactagaagcaacattccaaaaactcaaaaacaatacacaaatctcaagaagataaaacatcacccaaagcaccaattcaaaatcgaatgccttaattatcaaaactactatcaatatatcgtaaacacatatgaaataggtataataattcctaaaatggaaccataatcacttgagcattggagaaaacattttagtgtaattatatatataataatttatattataattatttagatcacttgtaaatttgtaaatttttttaacagcattatacaataaaaaataaagtttaaatattttgtgataaatatgcttattatttttatatgtgtgacatataataaattatttagtaaattttttataataagtggtcttgaataattataaaatgtacatttatttaaataaataatatataaatgacatataaagatatatcaaaatgaggcttttgagattgtacaataagttttttaaaaaaaatatacatacataaaagtttaaaagtaaaaagattatcgattatttggaattgtaagatactagaagaacagtgttacagtggttactgtttaagggtgtaaacttaaattgtttttctcgatttaaaaattcaacaattttactgaatccgaaacttttatataagaaacgagaaatgcaatgtgttcgaaacgtttcgccgagaaatgcggctacttgccgcctctttactttcccatcacttgtttttcaaaaatgactttcataaagttttttttaatctctaaaactcttcactaaaagaaacatacagcaattataatatgctattattattattattattaaataaaaaagtagaattcacatcaaaaaa

SEQ ID NO: 318342 - DNA, 1257 bp, Cannabis indica
actcatagcttcatccaccatggcagtagaattttttgcgtgttatgaggcatccaaccatggtatatggctgaggaactttatcactgggctgcgcattgtgggtggaattgaaagaccacttaagttatattgtgacaataagttagctgtattgtattccaacaacaataggagctcgacgaagtcaaaacacattgacatcaagtttcttgttgtaaaaaaaagggtacggagtggacaaatttgcatagatcgatttgttaagaaacgacccactaacaaccacctatcatcaatcttcgataaaccgtccgatacattatcaaataataatccctcatcatcatcatcatttatcgaaaaaccaaaaatattctttccatggtttcagtctgattctgtctgtgagccatactgggaagaagaaacaatcgtgaccaaaacaacaaaacgcaaaacgcaaaacgcaccaccagattacttttcaacaaactaccatgtcaaaacgacaagacttaaacacactgtaatataagtaaaatggtctttatatattgattatatattgtaacaaacttattttagtttaagaatattcatataaaattatattcattctccttttatgtttagaaattttttttgatatagtaatgacttaaatgtttagagttcttgttttaaatatatatatataaatataattaaataaagaatagaaatataagtaaaaattatttgaaattagctaatagatttatatataaagaaaattatttttttctgttatcttaattaaaattaatacattttagaaataatttttagtagcgttttagaaaaatgtcactagtaatattttttacattttcaaaatgttactaaattattttttaaaaattaaataaataaataataaatattatagtgacatttgaaattgctacaatttatattttaggtgacattttaaaataaaatgtcacttgaaaggttgtattttttaggccatgctgagcttctatagcaaatattgtgatgctaatatagttttcatgagaaagtttaataaatacttgaatgagtttgaatagcatttttagggttttgatgaaatggtggagcattgtacttgatgtttttaatttttgtctttaatgatggataatatctgaatgtatagggactaagtaatctataattgttgtaatacttgagatctattggtaaaatgagttgatagaatatatatat

SEQ ID NO: 318343 - DNA, 742 bp, Cannabis indica
tttttataatttttatgtatttttatatttattttgttataatatgttatatgttatttatttttaagtttattttaattttctaattatttttatgtaattttaagtgtctttggtgataaaaatgtgggactaaaagaaaaacattgagaattttatttttaaaagaagttttagaactggaccaaaataaggccacttgcggtcagctctttaactctatctggaccgttcggtcactgatccaagggccctactaggggcgtgactctcacacccgaccagaagcatgtgaagccttcagtgcacctgccaactgccagtccgcgagggacccgctggaactcttcacccaccacgtcagcttctctagccaactgcaacctgccacgcggaattccgtcagcctccctctccaacaacatgccaccacgtgtacctactgagagaaagaaagaaagaagagaaaagtttgtgtttaatttgaattccacacacacaagtccaaaaattgcaatttctcccacattttatacttaagaatataattttactttttccaatttttctcacctaaataaacattcttcttttatatttttaccttactttttcactactctttcatccaaactaacatttcattttccaatattcttacacatactctatttatcctttctctttccaatactaattaaatcaatcaatttaatttttttttattttgattaatttaggt

SEQ ID NO: 318344 - DNA, 675 bp, Cannabis indica
aacataaaatgttatttctgatctttattagtaagtaaatctgattatattgaaatgggttttatttggggcacaaaacccaacacactaatcttctcacatgatcccacttgccaacgagagccataacgaaccatatcttgagcccctaacagactcctccacacaaagtttggtttttgcctaactcagctgaaagaaaattctctcttggaaagtaacgagcctcaaagatttttgaaaccaaagaattgaaatgagtgaggagcctctaaccttgctttactaatattgcaagattaagatcacctaaacttcgaaaactcatgccaccaagatctttatgtttgcaaagtcgatcttaatccaatggatcccaaaaatggtaatggaaattgattacaatgttgtaataaatattgtaataagtaataaattgacaaaattatctccactttattcttaaaaatttatataaataagaggtattaaagtcattttagttttactttatttagttcttgtgatgtaattctcactacataagtgttaggttatttttagtattaattttaaattaagtttaatatattcttaattgagttttaatcgtgtttggagcattttcacgcttgttatcttttatttttgcagatttaaaatagaagaagatta

SEQ ID NO: 318345 - DNA, 1998 bp, Cannabis indica
tactaacttagttttcaaatttactaacaacaacaactatatctcccaggctataagaatttgcttctctctattgagatatctctctccatctcccttcctagtctataggtaataacactgaatttaattgggaaaattacatagaatattgacattttccctttttttacttttatactgccatgcagtataaattacgtttatattgtatatttttaaaacttttatatgacagtatactaccttttattaaaatctttttttgtcattttttacacttctacgtgtcttttcacttctcagggttaaaccatatcaatttttaaaatctattttatataaaaggtttgatgttgacgtgggatgtcacttttagtgacagttttatttcttttttttttaaaaaaaatgtttttgtaatattatttattctttttacagttttaaacatcgtcacataaatctcactaccccatttcgtactgttcatcttcttcttcttaattttttcagacagtttttatgtgtagtgggtggtttgactacttaacacaaccctaaactagcttattgctagtccctacaaggggaacctctgaaggattctattcagagattcatggtcgagattaccaaaatcaaatgcctaattaaagaatgtcgatgtacggccatactaggcggcatactcccactaagcgacttctggaaggatatcaagaggatatccatcaacgacatgaaggagttcctcgatagagtagaagacattatcaaacttgaagaagccatacgaaaagcctaggcgaggcatgttaatagctgacagtcacgaggcactgagcagcctcatgacccaccaaacacacaataggcaacaacaaatgccacctagacctctagtggtaaaaacactagaaaaaagcgcatcaccaacaactctgggaggaacaatggcaaaaagaggaagtttaacacttctcccacgccacagaagaacaaggaggagaagtacacttgtttcaccctctaaacggagaagcctgagaccatcttcatggccactcagggaacaatcccgtaccaaaagccctttctaatcggaagggacatgtcaaaattctatagatttcacaatgacttcgaccatgacacaaatgagtgtcaaaatttgaagagggagactgagtacctgataaggtgtaaaaatcccctcctgcgttgttatgtgaaagacgaccagacccaggcgcaaggaggccaaaatggagatctaatgccaccacccgtggtaggacatctgggagtcataataggcggcccccacattgttggtaaaaccagaaaagccagggagcgctatgctcgaacactctgtcacgagcctaaaggtaaaatcttagatgtttaagaccagatctctaaggtatagtagcccatagaaaccaagatctcctttggcaaagaagacgcagcaccagtgagtttcccgcataatgattgttgaaaatattttacaaggatctagatttactaccaagtatgtttcattaacataataatatgaattctaaaacaatgaaataaacacatataaagtttagtaaaccttacattgggtgcagcggaatataatgactccttccgttcagatctctagcccttgattcctttctgtagcagaacataatcaagatctgaacctggatctgtttctctccttcctttgatgctgattctccttcttgttgtttggattctcctacagtcttacacactatgattgagataccacttgatgtgtgtgggtactactctatccctcaaggaatttcgaaattgtagagagaaaaagagagagagggtggcgcatggcttttctgaaaggaacaatatgcaaagtcatgagtttcctgaagccaatactttcaaataatagaaaaataaattgctaaaccctttgcatagtgggcggccatataaagaaatttggcc

SEQ ID NO: 318346 - DNA, 2062 bp, Cannabis indica
gagagagagagagagttgaaaaaaaaaaagatgaaaaaggggggaaaaaaaaagtcacccaatgctaccactacaaaaatctcacttttagccacaacaaaacttgtgactacaagtgaaaaagttattacaaataatatataataatcttatgttgtgactaaaatgtccatagctaaagttattagttacgaaagtcataatttattgtgaccaaatgtgtttttagttacaatacttgttgtgactaaaattaaattagtgacaatttgtatatagacattatatatatttttgtcacaagtaactttttgttgtgactataaggttgtcactaaagataaactttttttgtagtgtacataagaaaaagaaaaaaaaaaaagttagcctagaaataaaagtcattaaaaaaagacaaacatatataagcactactattagaaaaatgatagttcggttcaggttttaactcaaattatctttgattttttaaaatactcgctattgaagttatttgaggcgaagacgtaggttttgaaaatactaaagacgtaaggagagcctatgtcttcagttcttatttaataaacgaagatatatgtggagtataattttaaatttccgtggcggaagaccctacgtcttcgattttatataataatcgaagagaaaaaggatctgtctctttcagttattacataataaccgaagaggtaggacccttttctcttcggttattatgtaatcaccgaagacgtaaattttttttatttgtttaaatctaaatatatattaattttgttagtttaaattatatattaattcttttaaaacaattataaattaattataataataaacatttactttgaaataaagatcaatttaattatataacaaaattaaaagtacaaaatacattttaattatattataacaaagttaaagtatattttacaaaatatgttaagtccttaatattaagaaacgtacacaaaataagttttgcctaaaatttatagtctaaaactagttagtacaaatatcatattaaattcgataaccactaatattgctatggtagcaacatcgtctccacattgtattatttcttcttatcacgttgtaaaattaaatttaaattagttatatattacttaattataagttagtatattagttacatgtatatataaataaattaattataacttaattaccttttcatttataaatttataagaacgaataaatgtagagctttcacaatgtcattgatgtaccttaatacataaaaatgacattcatatcccaatgtttattttgaacaggctgcaggagttactcctggaaacgttcctagtaactcgttggagcctcaaagcaattcatatgccttaattaaactcaataatatatataagattcaattagctatagttggtataaatttaataaaaattataagtttaaaataaaaattgagaagtaccttttggagtatgtagtgaatagtcttcttaaggcgtttatgtcccgacgaagggtccaagtgaatggtcttcttggcacagacgatctcaagcatccaatgtcgtctaataaaaaatcaataataaaatattaagtgttaatttaaaaataagaatgaaactatattttaaataatccttatatagtatttgtacttacttgtagttccaaagtataaagaacacatgtaatttattattcattgtgttcaacaattccgccaatctgacaataacttcatggtcaacaacactttctttgtccatggcgttgaaaagctctagtcaaataacttgaaatactcctgcatatatattcgttaatgttaggaatattttaccagaatctagatttactaacaaatatattgaattaacatcctaaatatgaatatctctaaaacaatgaaattaaacacataatagtttagaaaaccttacattggttgctgcagaatataatgactcattccgctcaaatctctaactgtaacaccctaactattttaggcgtattacgtgatttt

SEQ ID NO: 318347 - DNA, 1994 bp, Cannabis indica
cacctatacttgtacaaagcattatttggtaaagttaaaataaacacagttgcactaggattttaaacaaaggatgaaattcattaaagataacaaaagcacgtaaaaccgggattaaaggctgcccagtcagcctgttttttgaaaaatgaaaaataattccaagattaaaagtcgctttgtcgttcaccttgtcttaaaaaaggccttatggccggacagataaaaaagaaaaagataacaagagaagtattcagacggatacagtcccaggctctttatacgggtcttctgggccggtaggagctagaggatttgttgtctgggcggggggcatgtcaacgtccttaccagaattacaagtggtcaccttggattctctataagccacctgagaagcacaatactcgagaaatattacttttgaatcgttcaagtaatcaaagtttcccttgggattagccttccagaagtcctaaagaatctcgagcccgctgtctctaaggcatttaccttgccttcgagcctcgccacctcagctttgctgctcggcctctaccttgtgcctctcaacctcagctctcggctgctcgggctcagccttttacttctcaacctcagcggaaaactcctcctccttagacttcttctccgcttccaacctgcgcaagagagtttgaagaacctccctttcttcttagaggttgttcacttctttggacaaggaggtgatggcagcttcaagcttatcaaaagtcgctaaatctttggtcagctcggccacattattctcggccgcaagaagttttttgttgacttcacccagttccattcgaacagatccaagttgaaccctcgcttcatcaacatccttcctggccaagtccacttccgccctcatggtgtttgacatggtagcattcttagaggcaggcgacttagctcgggaataagcataagccatctttagagcggtctgcacagagaaaaaacattagaatctaagctaagtaaagaaggataaaaggaaactatcaagaaagactcaccctcataaactccttcaggactcctcccatcaccagctcaagggaaagctctttatcaactccggccagctgcttattcacctcatggactgaccgagtcatgcagtggatgagcatatctttccctccattaatttctagatgcagtgctagaggtggggcaggagccttgatctgctctgatccactcttgactagctaggatccaccctttgactgctcgagcctgtccaagcttcctcctcgagtctttggacttagttgtttttgaagcagaaggatccacaacacttggctcatcagagagatcaataactgcctcagttggtgccttctctctggacggtgttgtctcagcgcccctggacttcttggacgaaggagataagcttgggcttcctcgcacaatcttctttacagcttcgagcattttctgagacatgtctgcacgaaataaaagcaacatggttagagaaaagcacaagaaatatgaaagcataataatcaagaaagttaaaggcaagacggaggatcttccacttcggaaaaagcgtttgcctgagcaagacctgatggctcatcatcatttgacaagtctctttgctcctccatgacggctttcccctttcctactacacgagtggatggccgagcaggtagattgggctccctgatctcaattgcatgttcaataggcttgtcctcgattggaagtttcttcttacttttgaacggagtcatctgctcctcctcaaccttgtcttcctgatcaagatgctcctcagcatactgcttggctcccgcacctcccttcaacttagtgttgggttttatgccctaaataaaactccatttcaatgtaatgtattttattcaaaatcaataaagaaacagatgtatttttcattcatttatgtatgttttggttcactttatcaattgctt

SEQ ID NO: 318348 - DNA, 765 bp, Cannabis indica
tggaaagatgatgtggtgaaagtgggtttgctggccaaaggtatattcatcattcgatttcagaattcagagcagtgagataaagtcatggaacagggatatgtattctttgatcgcaagccaatggttatgaagccatggaatccaatcgatgattttactaaggaagatgtatctaaagttcctacgtgggtacaactcaaaggcctagacatcaagtattggggagagtcttccctattcaagattgtaggccagctgggggaacctctgcaagttgaaaatgtgacgaggaatcgagacaggctgcagtaccccagagttctcattcaggtaagtcttgatcaggattttcctgaaagaatttcctttattgatgaattcgatcatgaagtgtctttggatgttaaatatgaatggttgccactagtgtgctataattgttctggcattgggcataaaacttcagaatgcaggaagaaagaagggataaaagaacatgttaaacaggtttggctgccaaagaaaccatcaaaagaaaaagagattgttaaagatgctgaagggtttcagaaggtcatcaaaggcaagaaatttaatgcagggcaggaggttgaacagacaactgtcagaaatatgtttgattctcttgctgtagaacctagaaacatagatgatgttgagatggaaatggaggaaacagaggtcagaagtgggaagaacacaggaggggagggagatccctcttcctcaaatggataggtt

SEQ ID NO: 318349 - DNA, 901 bp, Cannabis indica
aaaaaaagtaaaattaaaaaatatatggacatcagtgttgaacaagagcaataatactcatattacccaaagttaataattttaagtgaaatgacttacatttctgacagtcacaagtatagcaactcccattagagttatattactttttattaaaacaatcatattttttttttaacaaaatttatgacacttttgaatgattgaatctaaaatagtaaatttgcatttgtataaaaccgagagaatgaaatgtgtagatatcttaattaattaattttgagtaattcattttgaaaccatgtgatcagaattttgatagatttttcttcaacaagaattttgaaagattagatgcacatgtttttattaataataattcaataacaaattgataatatatagtttttaactgaaaaaagatttgatatcccttatagggtcaataatatatattaatatttattcaaaaaaaaaataatatatattaatatattcctataataatacaacttgttgtgacaaaataaataaataaataaattatagataatttcatattacacatgatctccactcaccttgggtgagttgccattacacagatctatatctatactattatatgtattcatttattggggggttcttatatatgctaaccatgaataatatgacctcaaaattcatggtttcctatggcagaaagttaagtgcttaaggtttgcataataattaatcttagagttgttcatacgatttatatatatagtttaaccatgaataatgtatagtttttaattacttttatatattttctcgttacacgcaatcatataaaaaataattataattattaaaatttaaatttaaatattactatcattttaattgaaaaata

SEQ ID NO: 318350 - DNA, 533 bp, Cannabis indica
attaaaataaaataaatatctaatttagattcaaatataataaataaatcacttgcaatttgaactagttcaatcaacaggctggaatagctagtttctgataactcgtttattaattattccacatgcagtgtgtgttccctcattaattaaactactactttaataatattttgactttaattaagatttttcatgtaactttaattgaagtaatatctaaatcaaataataacagctcctatcctagggggcctcctcgggatccacacacacgagactaatgtctaatgtcaagtgaaagactcttgctgcaataacacaaaattctaataaatcaactaaaattcacatatcatcaacaattcattcgactattcttaaatattgtttttttttctataaatatttatatttaatattattagtaaaggtgtttattggatcacatccaatatttttggacctatcgagctacgattcaatcatatattggatattagattttaccatccgatccgatccaattaatt

SEQ ID NO: 318351 - DNA, 1507 bp, Cannabis indica
tgaaaagaaggaaagtttatgtagtttaactttgaaataaagaggggaagttcctatcattttctacttatcaacaaacatgatttttgtaattttaagattgtgatttttgtgctacaataataaattaagatttttgtggctaatactattttttttagtgtaaaatagacttagtcattacaaaaaatgtcacttttgccagcatatttttgtgctggcaaaagttggtattgcgctggtaaaatagaatttacctgtgatgtgttagcaaaagtggttagcaaatcaatgttggtattagaatttttgccagcatgaaatggaaagcactggcaaaaaagacttttcccagtgcgtaaatgtgctggtaaaagttaaattttagccattgcaaatgtacgctggtaaaactttgatctctttgccagcgcagtttgcgaaatgtgctggtaaaagttacttttaccagcgcagtagcgaacttaaaagtgatatttcttgtagtgagtaatattatttatttagttacaaagtaagacttatatattgtgtttgtcaaacaaacaagaagctatccaagaagattatttcctttggaattatttataaataataataatggttggttcaatctaaattatcaaaccacgttattaatataggaaattcagaaaatagcatagaatcggagacaaacacaacaaactattcttcttttatctatagtactgctgaaaactattcaaagaaaatatacactgctgaaaattaattgttctttattatgaaaattcagaaaacaacataaaataatataataatattttttgattgatccgcacgtggcggaggttgggccttactacaaggtcttcttctatgtaggcagttgggctattcttgcattagtctgattgtttggatttggtgcatctaatttttagtaaaatataagtttgcaataaataagaatgatattgttattggtgacatttttcatgtgtgaaagtctatctctagtattttatgggtattgttattagtgacattttttatgtgtgaaagtttagtatttttatattttattgtaagccagttaataatactttaattagcacattttttttagttaaattagctctctttttagataattctcatgtctatgattagttttctgtttaatttactttaatttatcatactaatagtaatcgttggattttgccttttaactaatagaattatttcatttttagaaaaaaaataattgtctatttaaataataattataattacttttagtaagtttattaatattttttggcatttaattattataaataatatttgtgtgatttcttttaataattcaaaggcatatttatccaattattaaaagaggaatattttaatttcatttctaaagcttttcttctttagattcatagagtgtaacatggataattctattctcctatttttatatgtattatacttaaaa

SEQ ID NO: 318352 - DNA, 1773 bp, Cannabis indica
tctctctctctctctcttccaatcttgatcaccttttatctgtcttgatctcctctctctccgatctagggtctagaattttcttacaattcttttttgtttatatttctgtgtataaatatctttatttggatagttttgtgctctttggatttagtggaaaaataaatttaggatttttagatttgagttttggagctgagatttttgtgaaaatacatgtgtttgtttgttagatttggatttgtttaaatttagtttgaattttgtttattttattttcttttttttgtgtatgtgatttggatttgaaaaataagttgtggtggtggttagtggtgggtacattattagctatggatgttggttgtggtgacggtagatgatgaataatgctaaaaatatgtatgaaaaatatgatatattaggagaaaaaaattacgatttttttattttaattctattttaaatagtaataataattattatttatgtggaccaataaaattataccacgtgtacattgtgtacatggacaatccaacatgacacagttaacagtcaaatttagatgaaaattgtaaattgctaacagtattgtgatttcaggggttttgtcgccaaaaattagctttcgcggttaattgctagtagactgaaattattaggggttttattgcaatttactcataaaataaaaaagttacaagtgcaatagactatttgaaccttatctttgacgtgttaaattttttttttaatttctcaaaattttgcagaatgtcttaaataactacaatgtatgcaaccatgaaatttttttgattaaaaactaaaaagttatctcggatgtcgaaacaataggggtgcatcagtgtacctcttttatacgagtacattgtagattaattttcctataaactttatttttatataattaaaaccagttttataataaaaaaactatcttgatgagaaaaataagtttcttaatgaaaaaatagttaaaaataattttgttaagataatgaattaagaaaccatttactttcatgtaatcaaaattaatttgttaatgaaaaaaccatttacgaatactaaaactcatataatacttgtttattatgaaatcagtttttcagtttaagaaactggtatctagatgtccaactgcagcagaatctattcgatcatttggagttttggtggtggagatcctggatgtgtgggtcccaggatcaccggatgtgtcactactcgctggtgaacagagttggtaggagactgctgaggggtaagacaggtagggtagttgaatggagaagaagaaactttgagatttttttttgaaataatttatctaaatatcaattatgggcttcaaaaattaagttaaaaaatatcataaaataatttaaaaactaaatatgcatcaataatacagttaaacgcccctacatatattgactacaaagtacaaactgaaaactgcgcacgtactctatcactcagtatgcagcaatagccaataatacagtttattttattccttctattcccatatgaaataggagtgttaaaattagacctcactgtaacctttattattacagttttacagatgaagtgaaaattacaaataaaagcaaacagaatacaacagaaatcagatcctaggtggcttcgcctctagtggatcaagaactagttgttagttacaaccgaagttgtaactaactcctagttctgtgatcaaccctagaactacaacta

SEQ ID NO: 318353 - DNA, 1351 bp, Cannabis indica
aagtattttgattgaaatatgtgttatcctcatcatcaacagtgagtgacgataaatagcatgaattagatttagatgatgtatggtcattcatggaggcaaagcacatggactggaagtggaaataattagtttgcctagaaggtacttatatggcattttctggcagagaactataattgcaaaagcatctaatttttattgactaaaatctagaaataaacattgatgggacatagtagtgtcatgaatattcgtctgtgccttggtcgttggatagttatatacaactaggattttgctttttctattaaccggccccatgatagtaatagaagtcaaagaaacagtagtgagaattttttaaaatttttatttttttctttaatatccttcactttaacaagaaaagttgctaaacaaatacgtactcatattgtgaggtccatgttttcggccaaaaagttcaccaaagatgtcaaaatagagcactttctagctcaacaaacagagtaaaatgaaatgaaaatgggataataatttaatttgcacgttcaatgttagtggtatgttggatttccttaccaaaattcgtgcctctgttttcaaaccgaagtatgatagatttgaagtgaagctggtaacacttgaatatttatatatgacatggaaaagtaaacagaaaagaagaaaaatgtttgttgtgttttgtaaagctggtggagaaaatatgtaagcaggaaacagtattatcaaagcatgcgtaccatgagtttgcatgccttaaaaaatatagaatgcaaaaagtgcaataatattttattatatatgtaccttgtagggtaaactgttgattttttttttttttgtttgaaagaaagtaaactattgagtatatttaacactgatacaagtagtgggatactttagtgtttaaacttatataatatatttatatatatcaagtattaaatttaaaatattatctaatttgatgtctagtattagtaagtacgaaattcgagtagataaatatgccttgttggcgaacataattaaaataattttgttgtggaccctaaaataagagaatataatatttaggatataaggtcgatataacacaaatatcaccatctattacctaaactaggagtgttcacaaagtatccgttccaatccaattcgtacaatccaatccaatccaattcgcaaaatgcggatattcgcacttgtgcagattagattggattgaaaaatttaaaatccgcacttgtgcggattggatgtgtttgcctcaaaaagtaccgatccaatctaatccgcatttaattatatataattttaaaaa

SEQ ID NO: 318354 - DNA, 1895 bp, Cannabis indica
cagttgttggtgtggctcttgtaatgctatttctcataatattgttgcccacgcactagctacttatggtactagttctttaggagagtttatttagacagatgcttgtccctgatttttgaattctacctctaacatgtgattctatttgaataaaaatccttccttaaaaaaaaatagaaaagagtgtatatatgtttatattttttatacacgtttgataaagaggctatttaaattctatttttggcacactgaattttttgtttttttgaattttttaaaaatttgtatggttatataattgtaatatacattgtcataacaaaaaaaattgagattactgtcatctcaaatttcgcacaaaagtgatgtggcatccaacatggtaatatgtggagaacattgagaagtttaaacgggtaattttctctcaatggcccggccagagaatttctacttaaaattatcaaggttacatcttcagcagggatcaaccaggaaaaacctgtgcatgattgcccgtacagattcatatcatccaaagatgccgagtattttgagtagagtaattcgtcataagaagatcttcagagatacttcccttaaatataagtaaaaggggagtaggctattactattatcacgggatcgaacttctatgaatctatgtgttcttatttgcataattacatacacttattatttattattctaattgctttaattgactcagtatcgttggctaaaaccgaggtcaacaattactaagtaccgaaaacaaaaaaaagtgatgcaccaattcccccataatgtgtatatatgagtgcacttttaatgagtattatccatgagtagtattagaaaaatttaagtttttatgcttaattttctatctaattagaaaaatctcttatttttacattatagggcctgatgttggtccatcgactagaaaaaaaattacgaaaaaaagtttttctacaaaaaaaaagataaaaaaagttgagtttaactcaagtattttgtatagtaaaaaaatatattttttgatatttttttaattaagtaattaaattaaacataaaaatttaaaattttcttttattattcgttattggatcaaaatttaatagcttaatatttttaaaattaatatttatagttaaatttatttaataaccatatataagtaatacctattgagaagtgttcttatacatactaattctcatcaagaaagcactttccactggagcgagaatgacactcaaagtagcgatattttgattccttcgtgattctcgcattttcttttaaagggggccaaataagtgtctccacttgttgccaacaatctttcttcagaattgtacttcataggtcgatcctcccctcccgtttgttttagcaacttatccttccatcatttaattataacaaattaggttttgttttggtcaagatgatcagaaaaaaaaaagttattaatgatcatataggtataggttcaccacataaccattggaaaaaataattgtgacaactaatactaaagtgaaaatccttatccaatatatagtttatttctatgcatattaattacatgattagtagataaattagctaactatttctattttgaaatgttgaaagaacatctattctaattaagtttataagtaattcacaaattaaaaaagtaaaatcatgcacatgcatatatagataaaagaaaatgaagaagttattgagcttaattcattaattagttaggcatttttagttatatattaacatattgatatatttatctatttttattattattagttattattacacgtactcatgtttacaacttgtacacctaactatttttaaacattaacctt

SEQ ID NO: 318355 - DNA, 2152 bp, Cannabis indica
gatctaagatcctggaaaaataatttccaacaataatattaccttgtccactcatatcaagttaatactccatcatactgtggaagattgtgaagaattctaatacgaaggagatttagactcaaatcttgttaatactctacgacagaaagaaaaaagagttagatatctaagcgaaaggagccatattattctgttgccaccaatgtaagattttttataactttatatgtgtttaattcattgttttaagaaatatatgtttaggatgttagattatagaatataatcaacatatttattagtaaacctagatcctagtaaaataacatccaacacttggtatcagagccatggtgtaatgaccgcatgattagattatggatagtaaaggcaattagcattaattatatattgatattattattatacatgatattctgttattgtcggcccaatttttaaaaatgggcattagagttataatttctaaattctaacatttttattaaactctacgagtattatttatgctaaatatgacatatgtaattttaatgatttttgcgtagagacgatagaaaatgagatggatggctgttagagtcacatgggtaagtttagaacttaattcttagtgggataaatatttgagatctttcgattgtcgagattaggcgggattatagttttgaacaattttacctgtaggtctataggttgcttaagttggaagcaaggacaaaattgtaattttgtcttttagtgggttgtgtagaatggtttctcagccaactttttgtaatcaattaagtttaattattaattatttaaaaatataaagaaaaaggacaaaacacatttagataacctaaactctatcctccctttctctctctttcttagtgggattaatatttgaggtattttgattgtggggtttagtcggacttatagttttggaccattttacacttaggtttataggtttcttaagttggaagcaaggacaaaattgcaattttgtcttttagtgggttgtgcagaattgtttctcagtaaactttttgtaatcaattacgtttgattattagttatttaaaaatataaagaaaaaggacaaaagacatttagataacctaaactctatcctctctttctctctctctccaaccaaggaagacccaaggagattgccattgatttttgtaaaattcaataagatatttggttaaattcaagtaggaatttttgaggtagtttgaggtaaccccaagtaatttctattccttgaattctttaagctttggttggttatagcatgcaatatgtggttttaggtactgtcagatttatgtttgattttggttcgatttttgagtttgttttaagttgactttagtttattattgatggttttgttggtttgagaagaggttgagcaagtttgagcttgaaaactcaagcttagatcaataatgtcacttttagtttttgtgcacttttcttgctattagtgcttggaaattattctctgctattagtacaagtattttggaaagtttgatagagattggggaaaaattggttgagtttcaaaatgtttggggaattctgctctgaactggttaactggttcttctggtactgtagaaccagttaaccgtgtcactaggaagtatcccaaaaattcagtttaccagtttgggcaattttcagagccttagtttcggtgtttcctcaatatttagggtatttcaatgttatttgtcgataggaaaatatttagttttgagtttagatccttgaaaagggttttagaacgttttttacccatttgcgtaattgtgacatagggcatccattcaacgcatgattttccattcaggccgatcgatacacttgaatttagaagcgagataagaatagcatagaatttattaatatatgaatatgtgtatgtgtattatatgcatgctatttatgattcgtatgctaccaacactagtacagtagcagtactaagtgcattggtacaatgtatgatgttccatgggtacaatacggtgttacaaacactagtacaattaagtacgtagtgtatgtggtgcaacacttagtagtacttgaggtacggtgcaaaccctaccaa

SEQ ID NO: 318356 - DNA, 914 bp, Cannabis indica
tatttgttatagagtatatatataaacaaaaattctaaaggcatcacatacactattaaaaataatattctaactgtttttttttataggcgtggaacttattattttaagttttatttctgatattgttgggataaagatatcataattatttgtaactattttaaaatcatgaggctattcaaatctaatccaattatctatcaaattttttttttaatctaattatacattggaggttggattttgccaactgtaaatggctatatatagagtcatccttttcattgtaaggacacacaatagaaaaaatttctagtattcttctctcgtaatgtttttcattggatgagatctatttaatattttaaattcaatccattccttataaaaaaaatcaaacattattttcattatatgtatatttcaattataaaaatattaattactgtccaaaatgaaaataccaattatttcaaaatatttcaatataacacaaaatccaaactagacacaatagagatgtagaaagagataagtcgttgtcacaaaaaaagtcaaataattagtatcttatttgatttaggaattcttaatatttccatgtgtatggttgtccaaaatattaatgatagtaaaataaaaaatatatatttgaaatcatataaatagaagaaataattacataagacaccattatttaaaaaaaaaattatatttttacgtttacggaattttttttacatttttacggttttccatagacacaacacgaaaataacaaaaaaaactacataaaagtatcatgaaaataacatctaaataacatcaaaacaacaataaaaaataacatacagataacatgaaatcaacaataaattaacaaatgtacaacgaaaaaagaccgtattttc

SEQ ID NO: 318357 - DNA, 1643 bp, Cannabis indica
ataatttaataactttacctcctaaactttaataactattcatcttaccccatccgaataaaaaagagaaagattcacatttttttcttagtaaatcttgaaaggttaatttagatttaaaagaaattattttgaatgattaacaaaattaaaaaaaaaataattttcttaaaaaaaaataaagcgatttaaaaattaattatttttattaaaaattatttaataaaattaaatattctataaattcaatttttgaaaattaaattttacaataacagttttgtgtctatttttttctccaaatttagatttgtttaagtaaatatactaattttttggaatttaatttctatttttttttaaatgaatttctaattatatttctttatttttttaggatatgagtttgtaaacacaaataagcttgatatatttcttcatagaattttaatttaatttaattatttattgaattttgttaatcctagaaattgacacttgtaatgcccgagattaactaaccaatgcatgagagacaatatgatggaaatcaccaggcccaagagtgactaaatgtcactcttcctaagaagagtgactaatgtcactcgaccttgaaacatgcaaatgtcactcgaccatgttgcatataaatatcactcggccatgtaacgtgcaaatgtcactcgaccaagtaaaaggcaaatgtcactcggccatgttgtatgcaaatgtcactcggccatgtaacatgcaaatgtcactcgaccatgttgcatggtaatgtcactcatccatgttacatgcaaatgtccctcagccatgtaacatgcaaatctcacttagccatgtaacatgaaaatgtcactcggccatattgcatgcaactgtacttggccatgtaacatgcaaatgtcactcaaacaaaaaaaaaagcataattatgtaactgttttattttaggaaaaatttttaataattcatatattttaaagtgcaagatcagataatgtcaaaagtttaaggggcaaaaataataattttcataaaaataaggtgaaatttccatgcataaattgtcaaaaaagttaactgttgttatcaagctatttagagttagaggttagttggagtgttagttagtttagttgagtgagctagtttgttagtgtaacaccctaactaatttaggcatgttagcgtgatttttaacgtaccgtggagctcgttgctaatcaatgaggttatcgaaaaatcgtgattaattaaaattttacttatttagttaaaaacataaagtaacctacataaaaaattctcagatctcgtttacaaaagcatttacaaaagtttcactgtacatatacaaaagtttgtcgcctagcgactatacaaaataagccctgatgatccaaagatcgtacgctccaagcctaatcgccccgacacgtacaatcttcacctgctctctcccatggctgctcagccttagccttaccctaacctacacatgggaatagcagtgtgagtggacaaactcagtaagaaaagcataacataaaacataataatatcccgagttataatcaagcgcccatacacccaaccataaccctatccccgtatcccacacggtactgagt

SEQ ID NO: 318358 - DNA, 1436 bp, Cannabis indica
agtagatagaggtttttagtttaaaacctaagtccccggttgtgatttatgtgtcacttatccatgttgtgatcgatgtgatttaggagcctgtaattcgccgagcagttgttctactcaggttggccgttacacctgaattcagaatcaaggtaagattagtataatgttacacatatattattacatgtttagcatacatgttgtttatgccacttagagtacattgataacagtaataatatacgtagagttgtattgattactgataaatgtatgttggttgaaatactgattgatgttgtcacatcaatatggcgagagtatgactgacatattgagtataggctgacattatggtcgatggtattgtcgtataggatgacagggatagggttatggtcgggtgtatgggcgcctgattattacccgggatattattatgtttttatgttatgcttttcttactgagtccgtcgactcacagttgctattttcatgtgtaggtaagggcaaggctaaggctgaggagccgtgagagcgagtagatgaagattgtacatgtcacggcagttaggtctggagcgtacgatctttgggacatcaaggcttttgttgtatagtcgctaggcgacaaacttttatatatgtacagttaaacttttgtaaatgtttttgtaaacaggaccctaaaattttataagtatgttgatttatgtttttaattaaataagtaaaattttaattaatcacaattttcgataacctcgttgattagcaacgagctacacaatacgttaaaaatcacgctaacatgcctagttagggtgttacatttgaggtgtgggtaccctagtgacctaaagggaaacttttggaaatgaattaaggacctagaacgggttacgtcaagtagtttttttttttttgataggaggttacgtcaagtagttaatcgttcatttattattacaacatatggcctgggaacgttgatcgttcttcgtacaagtcggcctacacacctaatttgggaacttgaggtaagaaaagtataactgtaccatatggcatgctaagatacaattattatcgcgatgattcgattgtgatcgagataatggaatgatgattagtgttaaagttaattaatattattacatcaaccgaaactgttattaggtttcttaattattggttgtcttattagacaatggtaggcaatgcgatatatggatgaccataagagcctcaaatatttctttactccgaaatacttgaatatgagacaaaggcattgattagagttagttaaggattacgactgtgagatcctttaccattctgggaaagccaatgtattggtcgatgccctgagcaggaaaggtctcgggtaggtaactagtatgattcagatttcacctcagttagcagag

SEQ ID NO: 318359 - DNA, 1113 bp, Cannabis indica
caaataacttttttgaaaaactaaaccatgtttttttttaggaattgtataaaagcttataaaatgtgtaaattctacaaataattaagtaactgtagtttgctaaaatatgcaaagtgccttttttagaaaatatgatgggatgaggtggtatggtaaatgttattattaatggtattaagttttcacatattatcaatgaaagattttctaatgatgattattattggtcatagctcgataacaagtaattatttttcgcctactatttcaaaataaatggatttttttcggctagttactgaatttggatcggatactcattagatagttttagtgtagtttagaaaggaagatgagttgaggtgtattggtaaaaagtagacatatttcaaataaaaatttaagtcttatactaacctctcaaccacattagtgaagagctccaattcatcaagtgtaccataaacatcatatatgtcatctattattgttattaaagcatttacttttgtagccattcttcttaaacttttgtagtgtggctcaaatgaaactcctattgtccataaaaaattcaccatcattctatctcttgcaaatttcaacttttctcccaaaccagtgtttttccaccacctacatgtacatgtaaaaaaaattaatacacataaaataggggaaattagaaattttgtaggttttatacttttttgtgcaaaaatatgatttttttttttaaagttattttataagaaaactgaaaaaaaaaattgaaaaatatgaaaataatcaagattaattgggtacttttatggtaactagagaaagaataattaacttttttagtccctgtacttatgacactatactatgatgccccttaatttataagtgtagttaaaaatacccccaaaatatatcagttggaatagtataatccttctatctaattctgttaaaattgactaaagttgactgttaaattaataatgtggcattatacatagatagtagttgaaaaattatataccattaggaaaataaattacaagtcataaaaataacaatcacaggaaaaaaaaaaaaaaaataacaatccaaaaaatagaa

SEQ ID NO: 318360 - DNA, 1262 bp, Cannabis indica
atcggaaaaagataaaaaaaaaaaccaaaagaaaattggatggatgaaattttaaatatttttacaaattaaatttttttttgtttttttattttttaataaaagtacatactattgttttcacaaaaatattatttatgttgattttacattatttttatgttacttctacatttatattatggttaagtttggcacagttatgctgcgggaaaaaatacctgtagttgtactgtaagaaaaaatacatgtagtagaactgtgggaaaaaaatgagttgagtatttaaaaattataaattttaaaatgctacgagtggttaatattgtattataataatgataagttataatctagttcattataatcacaaatatataaaaatttatgctaaataaaatttttattttctatatatttttaattatttttctctatatagaaaaataatttataatatttttaaactatatttttatcacatgtggtttgttaataatataaatataaatataaaatattatttaaaacaaaataaaaaaatatttgaatattatttattttaaatattttttctttaaaaaatatttttatttttgtaatatataataattaattaaatatatttttagtgcaaaataatttattatagaatcttttaatcaatcaaagagctttttccaaatattaagttgtaccttttttagtttttagctagtttctccctaaatttttcaataaattatttttaagcccttatcaaaacctttttataacaacttttttaaaaagcacattttagcttttcaaaaattatgtcaaacgagccgataatcatgaatatttatatatatgaaacgtttttcaaattttttttatgttataagctcaatcaatactctttataaataaatttaatcacatttaaatattaatatatcgtattttcattatttgttatgcttatatatttatgataaaaaaaaatattaattttagtaacttaaataaaatattaaatagacttaaataatattttgattggaaaataaaatcttcattagttagttttaatagatattgatgtttgtgtttttttacttgcattgacgtgtgcccttacttaaacgaacagataataaatttctctaaagtccaaaaaaacccaactgtaacaaaatcactttaggcaggaacaaacccaaactcaaggttcgagaagtgcacacattagggacggacctagtagtgttgatatgggg

SEQ ID NO: 318361 - DNA, 488 bp, Cannabis indica
tggaagacactggtgtgagtccaattacaatttcctcatcatctggattaagggatacagcttacgagaagtttcgaggataccctgacaggcttcaagaggtatactctaaactgttagaacttattttatcagatctcgaaatcttaggatgtcaagtcacttttacacctgataacatagtatctcaggtagtctgatgtatctgacatcctaagttacactatgttctctcttttacttgtaactcaaatgaaatgaaccttatcttatataccaatattcattgaatagtcgctatcttgtatgcgttgcctagagtaaacatatctaccctcgatatattctcttggcttccatttgtatgagtagacacaatacgtaggaatcgaaggctgcaggtgtgtgagttgaggaacctgcttgctactgtgtggaacagcttgtgagtgaagcctccctctatgtggagtagctcccaatgtgga

SEQ ID NO: 318362 - DNA, 2476 bp, Cannabis indica
ttttttttcgtcttaataattttttctctaatatctatctttttttttttctgattttttttgagatttttcttctaatatctatctttttttctactaatgtaacttttctaatttttctcactcttttttttctctctttttttcctaaaaaaaattaaaaactaaatctaacttgtttttgaaatcaaactaaaactaataacttacaattttttttcatggttcgatttggtcacaacattcttccacatacactaggtcaacaagatggattattgcatcttgttcttcaactgttgactcctaatatggttttaacttctgaccattcactttgaaaattattcccgtagttggaatattattagatttaagtacactgaaatatattttatcaccatcaaattccaaggttaatgttgctgacgtgacatccaatttcatactcgatgtattcataaatagtctacccaacaacataggtgtcgtgcatggaatagagtaatcttccatgtctagaacataaaaatcagcctagaaaacaaatttttttctttaacgagaatatcctctactactccacgaggatagacattagatcgattagccaattgaatgacaactcaagttcttttagtggctcgagattcagcgaagcataaatagaatatggcattacatttatcgaagctcccaaatctaacatacatcgatcaaccaacttatcccccatagtacaagggatcataaagcttcctggatcctcacttctagtaggaagtttcttttggataatcgtagacacattctccctaggggtgtacgtcggtcggttttgtcggtttacgttacatttaacccaatataaagatccggttacaaaaatataagtgcaacattcccaattaagaaaaagaaaagtttcaatctgcccaacgaattgatcaatttagccaggttaacccgtccaaaccgagcactaatttttatttttctcacatttaattgttgtattttagttattgtcttaatgagataaatataaatattaaatttaaagttcaaatcatccactataaaaaaatattttatttttttataaatatgtacataaattatataacatatagattatatataataaaaatatatatacatgaaagaaaactctcttaattgggttaattcaggctgattgggcgggttatatttcgtcgggtttttcggtttgcatttttcgtcgggttatctcggttggtttgggctagttgttcgggttgggtggtttacaaaaatttatgtatagccctaattctcccccgcgcttactttttcgtcctctttcagcgtcctcctactcgtacgtaattccattaaaaaatttcataacgaggtacttgtctaataacatcaagtaatggtagattaacctcaactttgcaaaatgtctcatggatatctttgtcaatttcatctttctttgtcttcctcaatctacttgggaatggaggaacaggaacataaataggtagaggcggtttaggcattggtgcttccttagaaggtttaatctcatccacttgtggtaatggtgtaggaggagattggatggatgagttaggtggagttggcggtgcataagttgctccaattctcaacattattagcatgagctcttggattttcaataggttgaggaggcattctttcataaagttttgcttctatatatttttcccatagatgtagccatttagcccatagaatttgccaaactctttaatgtggctttagttgtctgttgaaactgtattgaactcgtggccaaggaattaataaaatcttcaatggatggcttggaatgtgatggtggtgcttgttgtgcttggaatttgatgtgtgtcgtataccgtatcaaatttaatatttatttcaaattctatcaattatttcattataaaagtaagtacgggttgaatccatgaggactatgtttattcaattattcaaaaattagtgataagagttagaaaagagggttttaggtttaagattaaaatagcaacaataaaaataaaagaaacaaattaatattgagattatgatatgagaaactaattaaaagttattcaccaccatcaataatcattcctaattcttatcaatgaatgtatttcagtttccaaacaaactatttatcttgctgataacgctgaagcagtcaattatctcaatctccctattttatataatcaaggcgaaactcttaataattaactcttttacctaagtaataaatccacgaagtatgcaatttatttaacttagataaagctttaattttgatagagatagactaatcaaggcaacaaatcaatgaagcatataattcatttaacctaggttctattcttcatcaaaaataaaagttgcaatttgtcacaaagacttaaaatcctagactattaggtga

SEQ ID NO: 318363 - DNA, 824 bp, Cannabis indica
ttcattccttccaactaaatgccaccttaatatttccaaagtaagtaattgtgctcatcgagctttacggataaagaataagtaaacgaaatagggtaagaacgagggagaagagcagggttcgatcttgatgctccaccatatccatttgcagtaaactccattgaaaccaacgatcaaggctctaatactatgttatgttagagagagaagaaaagaaaagagagaaagaaagactaataaacaagtgattgtcttactgattggagtttgaaagagtgatacaatatatacaaccgaaactaactgacaagaacagaaattacagctaatttcaaatgaattatacaattttcaggaagctgccccaccaagatattcaatagtttgacagagtctagcaggcaatctaaaacaaaacatggcacaagtggaaataaattgaacagcagctttcaacattactttcccaaatatttgaactaatgtatatacagtagaatcagaagtaaattttcatctttaacatttgaacatgatgtcaatgtcttatgcagttgtatttcttaatcgtaatttttaactattagattattatgacatcggaaaaactggcgctgaaaatcatcatacgattcaagttttattgtgttatatgcattatagatatcatactaaaaaaatttgaagcattgatgaatgaagaatacaatatggtcagcaacaacattcttttctgtcccctccagtatatataccatttctttctgctattcgtaggctgaaaaatgaatattgtttatttttcttttataaaaaaaaaa

SEQ ID NO: 318364 - DNA, 741 bp, Cannabis indica
taaaataatttccaacaaaaaggacccattcgcacgaagatccttctccatgcttagctgatctttttccttgtacaaaggactcgtccacccacgcgaaagacccatctaagcccgttcctttactgtcagagctcatctcccatctgattcgcctcccgtcttgttggatctgcctcattctttaaaaagaaaggtatgattcaaaaaagaaagtttattgtcagttatttaattttttgtggttgatttagagcgattatatattgtttgtgttgaaatacacataattttgataaattttgcttaatttttgataggttttatatggtggttatggtatttttcaatgtggtgtggtgttagttgagaaaaaacagaaccagtgctgttggttcataaaaatgaaaatggtgtcaatagatttatgtgcttgttgtttgtatttgtttggttttgatatatttttcgctaaaatcgtgagatctagttttctagtgtattctatatgttcgtatctttctcgacactttttcgatatgttcttgacgggttctcgacgtaaatgtcccaagatcagagaagacttttatcaataatttttcgataggttttggataagttatcgatatgagtgagaattctttttactgttgttatgttagttattctcgcttgattattgatagattatcgactttgacaagttttcgatagttcaagttttacaaaaaaaaaaaa

SEQ ID NO: 318365 - DNA, 1341 bp, Cannabis indica
caattactaatatatattttgaattatgatgaatattaattttgaaattttcttaccctatatttcaggcaataattcaatgataaagaatcgttacatgcatttaaccgaagatatcttgaaaaaaaaacccaaacctttgtgactatgctgcccaatcactcaacacacgtcaagatattaagataaaagagataccaaagcttgctgaaagagctgcaatggtggccattaaagaatggggaaaaccaatatccaacataactcacataattttccattcatcaacaggtgcagctgatatgccaggagctgactacaagctcgtcaagtctctcagcctcaacagatccatcaagcgaatcatgctctacaatctaggttgctttgctggtggcactgtcctccgcatagccaaggacctcgtggaaaataatcacggggcttctgttctcgctgtttgcgctgaaataacatctatggacgcgacctttggccgcttatctaaggacgacaaggggcgccttgtgggccatgcgatattcggggacggtgcagctgctcttgttattggtaatgctgatgatcatgaaaacaaagggttgtttcaaatcgtttcgacatctcaaactattcttgctgactcagaaggttgtattgaaggacatataagagaagatggtgttacttttactttatctccacgagttccaaaattgattggtgacaatattgagatgtgtttggtggaggcttttactccatttaagattagtgattggaactcgttattctgggtggcgcatcctggtggcgcggccattcttagagaggtcgagtcgagagtggggctggaacaggagaagctgagggcttcatggcatgtgttgagggagtatgggaacatgtcaagtgcatcagtgttttttatattggatgagatgaggaacaagtctttggaggagggaaggaaaaccactggtgaggggaagaattggggtgttttgtttgggtttggtccaggtctaactgttgagactgtggtgcttcatagtattcccatataggttttttaatatatttttaaatatcaaaatgaaaacatactacatcatgtttattcatattatacatttgtatttgtagatatgtgtatttattatattatatatatttaaaatgaataaaatatattaaaatttgaaaaataatatactaaaacattagatatatatccaattggatcggatcggatcggatggtggatagggtgtctaaaaatccaatacatccaacatccaatcgaactaattagtattttcatttagtttggatgagtaa

SEQ ID NO: 318366 - DNA, 1835 bp, Cannabis indica
ctaggcagccccagatatttagcgtgatgagaaacaaggcgaaccccaagtctagttgcaagaacttggccttgagcatggggcactctctttcccatacacacctctgatttttcgaggttgatttgttgtccagatagcttggcatatctttgaagaattgatttcatagtatcacattcagtttccttagcttcaaggaatacgaagctatcatcggcaaagaataagtgtgaaacctttactctattcctcccaaactgaactccattaattctacccgccctttcggcttcatgaataaggcatgacagcccctcggaacaaagcaaaaacagatatggagataaagagtcaccttgtcgaagaccccttgtaggtttgaatcgtcccactttttctccatttattagaaccgaaaaggaaacacttgtgacacatttcattatcttctccacccatttctcctcataacccaatcctctcatcattgtgactaagaaactccattcaactctatcatacgctttcgacatatcaagctttaaagccattttcttaccatttccaaacctctttgtcttcaagcaatgtagactttcaaatcctattatcgcgttgtcttgaatgagtctacctcccacaaaagcactttgttcttccgagatggcttggttaaggctatgtttcattcttcccgctaggcatttagctacaattttataaacaacattacataggcttattggtcgaaagtcagccatatacttcggtttagtgatcttaggaatcaaacaaatcagagtatcattaatctcttctaccttcatctcatcattaaggatacccaagcaaacttttgttacctcagttcctataatcggccagaatttcctgtagaataatccaggcaatccgtcacttccaggggctttttgtggatggattgcacgcattgcattgtacacttcctccaccgtgaagggtgttaacaagtattcatttgtggcagtagagattcggtttgggactagttgctgaaaatcttgaaggtcatccgggttggctgagttcgaagagaacagttttataaaataatcacacgccacctgccccatttgtctatttccagttacccaattcaggttgttgtcgatcagccctttaatggtgttcttagctcttctattacttgcttttcgatgaaaaaatttggtgtttttatccccctcttttagccaaagcgctctacttctttgcttccagaatttctcctctttatccatgagaatattttgtttttgttccaaaacctgtagctgctgccagtccatctcattagtgctacgggtgagtgtagaaatcttctcagcacaatcttttaaattttgtgtcatttccttctttttaactctattccacctttgaaaagctgttccacaattagcaagcttattcttcagatctcttgttgtcaaggttgggtcactaaaattccaagccgagttgataatctttgtagaatcttcatcatccgcccaagcactttcaaaatggaaccgtgttcgccatttgaccgtatgttcattcctaggtgaagatgcacaagccgtgagtagcaggggacaatggtccgaattaagtctttctaaatgcctcacctgagcaaaggggaaaatgtcaaaccattctgtgtttccacacgctcgatcaagtctttcaaagattagattatttttccttccattgcaccaagtgaagtcacttccttcaaacccaacttcccgaagtttacacttgtcaagggcctttctgaaatttttaataaggtagtt

SEQ ID NO: 318367 - DNA, 868 bp, Cannabis indica
ccattatttccgtgggtgtaaggatctaatggaggcttgaagcggggacgttacatttttgtttttggtaattttttttatattattctttataatttatttaacaatatatattattaaaaaattctacaatccaccctttaaaaaagatccatcgatgcacttttatttattttagtatccgaaataattttttagtcattttttttttcataatcatgtgcattatcgttatttaagatatcttataaaaaaatttaaaatgccgaaaacagagttgaaacagtaatgtgtcgttcgcgtgactattttattttatacacgtataaaatagactgtttgaacactattttttatattgtaaattatttcaaatttatcaaaattttgtaaaatatcttaaatatctataacatataagaatataaaaaattttgaataaaaaattattctgaatctcaaaaataaataaaaattatattaatatatctcttttaaagactacattaaaaaagtaccttatattatatattgtcatccttggctacaatatatatatatatttatatatattaatataatattgttaattaattccaaattagccaacttgtcacaattagagcttctaccatgttaatatatacctataaaaatataggaaaaagacattaaatattgtgactatgatagtaatttaatcaatagggagaatttgacttgttgattatataatgtgtctcatattatgtgatgacatataaataaataatatatcaattagaaaattatacagtcaaccctaataatgaaatttagtcatcatcaatttatcccacttacacaaaaagttaatatatgtatatgt

SEQ ID NO: 318368 - DNA, 1320 bp, Cannabis indica
attattatttatttgtttcaaaataaataaatatataaatttcactatatatttagaagatcatagtcactgcataaagatagcccatacatctgaaaatgataaccataaatacaacactaatgctaaatgttatggtggaaatacctcaaaggggtttcagttcaatatctcaattaatgttatacctgcaaagactagaaaaagaacacctccaacgtaggcgattgcctgtacaaaaacagaatgacaatcattaaaagggtaagtggaatttaagctaaaatacatattcattcaatttcaaaatgttatgaaatcaaaagggtaagagtaactcattacaaattctaacctataaagtgtactacgcaaaaaatacaacctgctaaaagttgcattggatagaaacttttctggattatagaacatgacaacacatttgtatttgatatgttttgaagttaatcggttttggtatggctagccaatagtgtttgaagagtgacattagaagataaaaaagtaaataagttaaatatgtttagaaagaaaaaaatgtcttcaatagttgaaggccaaatgcttgaattgactcataccttctctgataagaatgaacctaataacgaacctcccaaaacagcaatctgcacccaaaaagaaatttggcaaaatgttattaattataataaagagaatcaatgtaaaataaccattaagttcataatggaaatgttaattagggttttcttttcttaaagtttgacatgtactaaattgtctattcaattttactagtgaacatctaacatgacgattgtccatgtactaaaatatttctcgaacatctgtccacgtctggcgcccaatagtaaaattgaaaggaactggatgaaagttcttaaatccaacaatctcaatagttcgaaaaaaaaattttaacggcttaaaaatttcacgagcggaatttgatatttgtcaaaatttgaatgggaaaaatcttaattagcctaacctatgtcataaaactaaaaatttctacttcccaatgtggcatagacagttgaagatatcaaaatgttcatacatatattcatgcttcttgtgtattagaatgaattagttttatgttattgggcttatttttttaggctggtctatctttgtttggatagatattttttactcaccaatcttgaatcaccttatcataattattgtcatttgctcacttatttttgtttgtggctaccagttccatttgctcgcttattcttgttatgttgagaatcatgggtttccatctcaaaaccaatt

SEQ ID NO: 318369 - DNA, 516 bp, Cannabis indica
atattaggaattcatatgtaattaccacctcatatccaaacacaccttgcattcaataagtagatagatactttcttgaaaactttgcttaggagaaaaaaaaaacccaataatgaataaataattggcattagaaaattgtaaatgcatgcttatctagtctccacctagctactactactaatatacttccattcaaagaaaagtaggctagttaatataatgccattacaatattctatgcatttaaatgttgtatactttgaactaaatttgtataaaaaaaaaaagagttaattttatatttaactaaaattttacaatagtatttcaatgcattaaagttaaaaataatattttttttatagaaaagtgaaaaaaaaacaataaataaaaacattaaatttttattaaaaatataaaaacctagtaattaaatatataaataaaagaggaatttttataaatacctatttttatgttttgttaaccgaggttttcggcaactattaaaat

SEQ ID NO: 318370 - DNA, 1113 bp, Cannabis indica
taaattcaatatttaaatattaattgaaattgtcattatgtacacatgtatacatgtggcgctaaaatctcaaagttaatgaaaatatatttcgcataaaaaagtgtccactatgaaaattcaattaactttcaatagtggaattttaacagatgtcttaaatttacaattaaaaataaaattaaaagagtattgtcacaaaaaaaattaaaatgttaagtaaatacaaagtaaaacataaaaaaaatttgacaaaatacatattagaacaaaaatatgtattaattatgtactattgagataatttttttaaaaagaaaaaaaaatagatagataatttgttcaattctatctattaaactatgtaacttttattttagtttacagaatgtgtttaaaaatttagttcaaaaccatagtaaatttaaataaataatagcaaaaataataattagataatatattaagtaaaaaaaaattaatatttttaaagcatgtaaaaataacctctctcacataataattttaaggataaaaattataaatatataataaaattatctacaaattttattatacatggttgtttatgggtttactatatattattgtatgtatatttttatatttgtcacacttattattggttagataaataatatagtgtagtgtttaaaaaaattgacttaagcttataaaatatcaaaagtacttgcttaattaaagagagagagagagagagttttgagtattgagtgaatattaatattttgtatttttcaaatggcaaaattgtcttcttatcacactatatttaattttacttagggtaaagttgtcattatgattatcacactattatgacacttttataatagtaagatatatatatatatatatatatattctattaaaatttgtgtcttaacgatgttttcttttagtattctttatattatagtttttaggtggtctttggttagaggtaatgaaatagaatagaccgattatttcattttaaaatgaaagaattcatcatttcaatggaaggaatcactatttatattcttatatgtttactaggcaactaagccgcgcttcgcgcggtcttat

SEQ ID NO: 318371 - DNA, 1635 bp, Cannabis indica
ttgatgcacatgacaattaacttaattttgacaaatcattttttcaatagaataaaaagatgattgaacaaattttaccaaggccttttggatgaaaggttggaatgtatcaacctagttaactctattattctgcctcttgtttccactctcaccctattattttccattggtgttgtgattagttatgtcaggagtaacttctaacttgttattactgcatgcctcaagctatgtctgagagagagatagttaagatagcaaatatactctgttaaaaaattatattcaaacaacaactgagttaagatagcaaatatactcttaaaaaatattaacaaacaattaacttctgaaatataactttcctctccttctctctaatctctctcctactctacatcctctctaatctccctccactctaccaaacactgtgttagcgtaagaatttagaaaaggcttgcattatgagtttcacttttttaaacaactattatgatacattttcttaaatatccgttttttttaacaagttggaacaaaatatgggggatttagatttgtatagagactcaaactcaattacatagttctaatacacagtacaaatcccacttgtttacaaatgtgaatagcattagccattagcaatgtggggaaatcaattagcctcaaaaattgaaccgaaccatacatcatacaacacaatacaatattaattaaggcttcaattcaagagggatctttgctactacggagtctgtaaataattcgacctctagtagaatcataacgactaacctcaacattgactctatctccgggcaatattcggataaaactcttacgaattttcccagatatgtacccgattatcatgtcctcattatccaatttaattcgaaacataccgttggggagtgactccgtcaccagaccttcttgggtccatttttgctgctctgagctgcccttagaccctggagcctttgccatcaccacccctaccaaaggagtacgcttcacacaaccaacccagcacaacgggctctgttgccattccgggaagttggctgaagctgctgagattgggatcaatgtcgtagagcttctcggccctagaggaagatggagaaacgcctgctggggcgtgccggagctccacatgttttttttttaaatggttttggagtttgattttgttatccctggttttgtgtctctctggtttagaaagaggggagaaacggatagaaggagataagcgttcgaatagttagggcttatttatttattcatttattttcttctaaaatgtaaatcaaagggtattattgtaaatgtaattactaaagggaaattttatttacaccccaaaattttaagtacaccccattttaataatttttttttatataaaatttatatctttaattgtactaagtatttttaacttttttctttcaatttatattcttaaaaaatatacctatcaaacaaaattaaattatattttaaaaattatgacaaaaaattaaaataaaaaattatatgaaattttcttagaaaaaaaataaaaaaatatttacatgagttagaaaaaattatgaaaatgaaatcaaaataagtatt

SEQ ID NO: 318372 - DNA, 1099 bp, Cannabis indica
aattggatattagaaagagacttgtacttaaatggtgttttcttcacatgatcgggaaaggaatttctccaaactataccaaagcttcaatcatgtctgctggaccatttctcttgtaaactcatatgagtaaatttattcaattttcctttgtatcattgaatttgcaactcaaacatttaagagagtaatgacaagtttgcttttgtcaaactaaaaattcaagaattgacttaatataaaaattagaagcttatacaccacagcacatagcactctgaaatcaataaagaggctcctgtaacaagaagctataacatgactcttgcaactaagtgttaaatttacatttaagtaaagactaatgaaacaaagagaaacccaaatttctcttgttgctgctaataatttatagaataaaatcaaacgaatggagggagggaagatcatcatcatcatcaataacttaaaacattttagtctcctcttttgttggatatgttctgcactctacaacttaaaacaaatatacgataattagcatcaaatgttattaatacattccattcgtcaattttagcaaaatctatacaagtaatttaattcaattttgcaacctaactttgcaacacaacacaaataaatttatagagatttgcagcttgattttgcaactcaatacaaataaatcaaataattttgcaactcacaaaaaaaagtaaattaatagagttttgcaacataatttttccattcaacacatgtaattcaattcaattttgcaatctaattttccaactcaacacaagtaaatagagatttgcaacctcatttaagtactagttagtaaaacaaagattataccttttttcctattaaactctataaatcccatttgactaactgaaattgcaattttttacaatttgtccagatttataaagactcgaacttcaaaagttaaaactacaaaaaagttacttttagtaaaaaagttacttttagtataattttttaatcataatataaattttttgtgactaaatgtaacttttagacgcaaacaaaaaattacttgtgactaaaacattgtatttag

SEQ ID NO: 318373 - DNA, 608 bp, Cannabis indica
tagaattcaagaaatatagaagattcttctttatatttagaatctactatgtgatcaagcatgtgaatttgtatttaatatacatattaaaaatgttagataaatatttaataaccatatcatgaaccttcggtatgcagtcaaatgcgttataagaaatttaaggagaacaaaagactacatgttcacttttcagaattcaaaaatttttggagatcattcaagattctaatactaattttataaagaaattagttgtacaatttttttgtcatgtggctgtaaaattaggaatggtaatagaaaccattaatgacgtatgttgtgacaataaatcaatgaggttatattttagtaacaatatgagttcaacaaggtcaaaggatcattgaccttgagctatttgttattaaaataaagttcaaagtgaaaaaggtgtctatagaatataataaggacaaactcaatttttgggatccgaatcattaaggatataccacttaagatttttcatgagcttgttgctcatatatagatgtggtattgtttaagattgtcctggtttagtggaagtttgtatttgggatgttctatcaagttgacacata

SEQ ID NO: 318374 - DNA, 2024 bp, Cannabis indica
taattattaattatttttttaaaaaaataatattatctatcggtttgaacctactgatttttgcacgtgtgggcctgacacaaagcaatagcccggcccaatgtccaataccgtaggcccattaagcccactttctcggtttcgtgttggttggtgattatttcgtataccaaatttcactatctatcaactttgcttgttgcactttgatcaaaccttcttacctatttggaactgtattgccttgtcatattattacgttttatgtatatatatttatatatttttaagttctttgtatatattattaaggattaatttaataaaaaacatgaaacatgtgttattgttgtttgaccattggtgtttgtgtccaacaatttttataagttgcatgttacgattggttagtgatattctctgagactcgaaattagtagtgctttttgtttttatcttttacaaattgttttgtttctggttaattacaatttggcccttatcataagcaaccaaatatttttttaaaaaaaagaataaattaatttttaatttattcttaatattctttttaatttttccaagtaatttatttttaaattcttacgttaacttaattttaataaagaagcatttttaaaacatgtgttattattatttatatcgttactcaataaatacatgcctaatatatggtttggtttggttagaaactctacgttgtaaaattacaatcttgcccctctttgtattataattactttctataataatttacgtagagaagaataataacactaataattgtttttcttaaattgcaacaggaatctcaaaggtacaaaaacatgatacgacaacacatggacctgagaacgattgaagctagacttgataaaggggtttacttgaatggtttccacaagttctttagagaccttcttcttatatttaccaacgccgtcgtcttctaccggaaaagttcgccggaatatgccgcggctcaggagctaaggagcttagtgttgaaagaaatgaaagccaaggttggtaaagctcgaccctttattgctaatgatcatagtaaaaaagttgtagttgtagagaaaacagattcatcagctcccaaatcaaacaagtcttctcaatctattatagtaacttgtggtaaaaggagtaataagtcttctgaagaaaaggttgttgttgttgatgatgatgagaagaagaagaagaagaagaataagagtaagagtgagagtaataataacagtactactagctcttttgtttcgattgatgaaaagggtattaagaaaaagaggagtgaagaaagagttattgggaggaaaagtacaaatgatcagcatgagtttggagttaatgagcttagttcacatgacactagtaatctgttgttagaggttagtaatagtaataatagtaataagaataaagagaatgctaagaagaaagctggggtggctaatttcttgaagagaatgaagcaaaactcatcagatcataataataataataatcatgatcataatgtttcagaagatgatgatattattagtagtgaagaagaagaagtggagaagttgaagaagaagaagatgattatggcgaagaagaagaagaatggtaacggtaatgttaaattggatgagagagtagtacaagagagggtaacccgaaattcgacacgtagtaatgatgggggtagtaggaagacaaggagaacggttgggagaccaccgaagaaaccggagaaggagaaggcgacggtggtggccgcggccaagacaacggtcactaccaataataaaagagggagagataatagtgaggctgatgttggggttggtgggaggcttaagaaacgttctaggagatgatgatgatgatgaatattgaatagtattattagtagtgagtagtagtgttagtgttgtattatgtatattatttagtagtgtgctattgtttttttgatctcttttattattttgacctttttt

SEQ ID NO: 318375 - DNA, 931 bp, Cannabis indica
ccacattttttttgcagtgtggtgcggtgcgggcggtttgagcggtttgggcggtttgatgaataccactactagaaatagtgaagacaaggggaggggacctaaaaagtgagagtaacactcatacttacgaacctgagagcactttgctgcaagatatctgtaaacactttgagagtcgtagctagaaatcaccttgtcttccttggtgatctgactgatattatctcaaaagttgtacaataaaaggggagtaggtcattacccacgtgcaagggggctgaacctctataaattctgcgtgtcatttaattatttattattctaaccccttaattagtgtttaatcaatattttttagactctaagtcagttggctgtttgcccagtcaacaatttctatgaaaaataattcttaagggcaaaataataatttataaaaattattattttaaataattataacattatggattttataatttatagtatttactaacgtagttttatttgataaaattatattaactagttaaatataatattattcttaaataatattaaagagataaaatatattagtttaatgaaaataatatttaattttaatcattgtaaattaagaaattactaaaaattaatcaattattatttattgacttaataaataataaatttaatttgtgataaaattaaaaaaaattaattttgaaccttaaaatatgacccacatgtgtaggcctacccacacgtgtagggtgacatataaagatcaatgataatttagtttgattattttactattgaaataaatcaaattaaattaattaattatcttttaattattgaattaaatatattattagataatctatttgattaaaagataatattaaaataaaatgatataattgatttttgttaatcaatt

SEQ ID NO: 318376 - DNA, 1636 bp, Cannabis indica
aacactggaacgcggtggaattacgcgtgtgaaaccctcagtttcctctcatggcgaagaagaaacggacggtttcgaagccgactaagagcacggcgatagtcaagacggaggctggtgacctcccttaaatccaacctgaaggggatgaaccacctgcgaatgaggttttcctacacacttgcgaaaacttagaaggagatgcaattgaagagggaccgactgagttacttgcttcccccaaaccagtgagttgggttgaaaaagtcgagaaagaggattttagtgcccaagctaaggacgtctggagcaagttcaagtccaatcaggtttgtactccatccacacgtcttgaattcactaaacctatgaaaataggggaccaatttgtttttaaattggacttagatgaggttgaatgtgaagcttcattctggaaaaactctattgtctttattgttctaggagtgtacccgctattcaaggtttttgaggggtttatccaaagagtttgggggaacctgggtattgaaaggattgcgagaatcaactctggatttaatttaatgagtttcagggatgaggagactaggaatctgattatggaaacatgggttattcattttgataagaaacctgttgtgcttagaccctggacaatggacatggattcagtaagaatggtgaaatctatcccaatttgggttcggctaaatggtcttgggtttcaatattgggggaagaacaatcttagtgcgcttgtgagtaccataggaaaacctataatggctgacaaggttacgcagagcagaactatgatcaaatatgctagggtcttggtggatatggagaattctaatcatccaccaaaaactatagcatatataaatgaaatgaaacaattggttaaacagagtgtggaatacgaatggcttccataaaagtttggagcttgtgacttacttggacatacaatagggaactgtaacgaagagaagggtgctgtttggaagaagaagggaaatgcagagcagagaagtaaggctacggttgctgaaaaactgatactgtgaaggtaggatctgaaataggaggtgagtgagtgggagaaggaggctgtcaagcagagaagactcacggcaagggagaaaataaacagcagattagtgatgacactagttccaaagaggtttggcttactcctcgtaagagaggatcaaaacaggttgctatgaatgatgagaaggctacaacaagcaatggatatgaggttctttctgaacaggttgttgaggacttggttacttccactactgtcaatccatggaagtctgcaacataatgggttggaatgtcagaggcttgaataaaagggataagcagagatcggtgttagaaatttgtagagaaaataaggttgggcttggagcccttcttgaaacaaaaataaatcatgataaggtgagagatatgatagctatgagttttcttaatgggtaatttttttcgagcattgctagtagtaaaagaataatttttatttggcaagcgaagtttgtgcatgttgaggtgttgttggataatgagcaatttattcactgcaaagtgaagatagttggtttgatagaggagttct

SEQ ID NO: 318377 - DNA, 1410 bp, Cannabis indica
taagtattttgggtagcgtgcctaattatttagggcgttacaggctccctgggggactgacacgtagacccagttcctgatggaaaggatgacgtattagtagatagctcccatagagctagcctcgcttaatgtgaatttgcgagaggatgcgattaagacagggtctactcgcatactatacctcgcataatcaaaagaataagcaagaccaggaggatttaatactggtcgcacatataccaagtatatgcgatgaccaagtaaacctctcctgtgactagtaaagatcgtttatttacatgggtttggtccaaatgactagcgtgttagacgactcgttagggactcgcatgttccacgttgtcaacacatggaatgtccggttatcaatcatgatgaatgcagacatccaaacgattggcctgaaggccatcctgcgagcataacatcgtagagattgtgagcttgtgtgtcgggatatgaacaggcaactcgctgcttaacaagtcgcacatgttgctgcacttaatacaaaaacagattaaaatattcttcatttattctttaagcatttattttgagtaaatactgtaagttattataaaaacagttctaaaccgattagtcatgtaatcttaaaatacacttgctttctatataaaggaatgatccgaatcaaatagaccaagctaaaatcattgtaacaatggactaagcaagctgagcactgactgaactactataattctcttgctttctctttatttctgctttcattttatctatttagtagccaataatttgagtactcgttaatctaaatgagtgctcgcacatttgtaattggatattctaattttcttcgaatacacatataaatttggtattgtctaaattaatctgacaacatattcctaatatatttttggagagagtgatgtaaagttatctagacctccctaaagccttatatttttttaagagtatctatatgtactttaaggtacctaacaacaccatattgatgtagcaggttgtaagtggttactaattatctattaaattaaaatatttaaagttagatattaaattatagggtaatttacggcataaatacttaagtttaattctcagttgtaaataaatacataagtgtaattttttgcggtaataatacttaagttaaaattctagaactccgtaggtactcgaccattaaatatcaagtcattatccacgtgtcatttttttattggtatatttaaactatttttaaaacaaaatatttaaaatttaatgacttgcaccaatcaagaattgtcacgtttaacaacaaagtagctacagaagttacagaattaaaacttaagtattattaccgtaaaaaaattaattaagtattattta

SEQ ID NO: 318378 - DNA, 2298 bp, Cannabis indica
ttcatatttagggtgtttaaataacatacttgtgagtagatctaagatcctggtaaaataatattccaacatgaagctagtacattcttgatctgtgacatgcatcttcatctagttgtacccggagtaggcatccatgaaggatagtagcttgaatcctgaggtggcatccaccatttgatcaattcgaggtaaagggaagcaatcttttgggaaggccgtgttaagatgagtgaaatctatgcaaacacgccacgtcccatttggtttgggtaccaacaccggattagccagccattttgggtagtacacgtccctgattaggccattggttaatagcttatccacctctttctctatggcgtctgcttttactagatcaagaggacgtctcttttgctgcaccggaggcatgtctgggttaacatttaggatatgggtgatcacatgggttcttatgccggtcatattcccttggcaccacgcaaaaacatctatgactgcctttaatgtttcaatgatcttgcttctttcctctagctccaagttctttcctaggcggataactttagtggagtcgaggtcacacacgctcactacctcggtgtcttccataggttctacagctatttcagatcccacgcggggatctaactcgtcttgttccatcaatcttggctcttcacccctgtgcaccaccaatactgacaggtgcattgcaacgttgtagcattacctcgcctctccttcgtttcccctcaccgttcccactccggcttctcgggtagggaatttgaggcataggtgccggatggagatgatcgctccaaaatcaaccaaggccggtcggccaaggatggcattgtacgctgttgggtaatctactaccacaaaggtgcagtacttgaaagtgctctgtggggtgtctgggcatagggtgataggaagccttacctttcccattgggatgagcgttgttccgttaaatcctgtgagctgggagccgctgggcgacagatccctgtgcgtgagccctatggccatgaaggcttctttgaacaatagattcacagagctcccgttatccaccagtattcttgccacgaccttgttggtaatgggagtttatataactagaggatcgtggtgagggaagcgcaccgattttgcatcgtcttctgtgaaagtgatgggttggtccatgagtcggggcctttatgctgggagttgagtgacttcccatacttcatcttgttttatggccccagcgtagcgctttaacacatttctggtggttcctccgatatgaggcccaccgaagatcatggtcactctcccatctgaccgtagtggtaattcaggcacctgttatgagagtgctcctccagggggtactccgagtacttgttcttcgggcataccgcctagtcctccctgaggtaaagggcctcctgccgaaggcaggtttagatggggtaatttgttcttgatccattcatacatatgatctaatcggattaggtactcgatttcatcttttaggtttttgcactgattggtgttgtgaccaatgtcgttgtgatactcacaccttttattgggatccttctgggagctatccctatacagtggaggaggcttccggtaatgcgtattctgtcgggtggaaaaatattcacgttcctgcatatccatgagctccttatattgagtgtattgaggggtatactcccttcgctgtcgcttatcctcaggccgggtactgccctttgaagaccttttgctccgggagctcttaggaggtcttgctaggttggtggcaggtgcggattgggacagggtttggacactcatccccgagggattgcccatgggtgccccaaagtgtgatgatgcaggagccagggcgaggctttgattatatcctagggtagcagagaattgttttctgctcatttgaggagtggccggagatggggctctcaggagctgtgctctaggtgcatatcttgatactccggtcgggtagtatcctccgtaagccactatttggacttcttccaagttgatgtacttttggaccaaatcttggagattagctgctccctcttattgtagttcattctagaaaggagtccccgtggagatcccagcttggaggagggccagctgttgtccgttgtctaccttcttggtctttgaagcctcttctttgaatctctttacaaagttctttagagtttctgaaggcaattgttttatattagtcatggcgctgacttcaaggttaatttttct

SEQ ID NO: 318379 - DNA, 873 bp, Cannabis indica
aataaaaacagttttatagaacatgtttttgaaaaatattttcactttttcaattttaaaaacagaaaactgattaaaaaaatgttaccaaacgacaccataacttaagtattattactaccaaaaattaaatataaatatttatttacaattgagagttaaacttgattatttataccgtaaattattcttagaattttgtaagttattgaagagtgtggaggtttcttaaaatttgccactgagtttcattataaaaaagaaatcttaaaaataatctactatgatacatctcaccatattaaatatgcacctgcagcaatattcacttgatcatgtgagtcccactctaaaataaatttccacaggactttttttaattccttacagtatataggaagagaattttttattctaaattatcacataataatatgttatatgatcattataattctcccatcaagtcagataaatatatgtcacatatatgattaaataatgtgtatataatattgtatatatatatatgtatgtgtatgtatatatatatatgattactccttttaggagttacgtgaagtgaagtaagacagtactgagtttcttttattttgtttgttatatttatttgagttagtggggattctcttagcttattccctcctttcttctttttgagtcttctggtttagagttggtgagtgtgtgttgactttggtctttgagttgagtttgtcctttcttggggtgcttttgaatttttggaattttgttgactgtctttatggctttagttaatgctaccaaacaggggatcaaagacagtgacggacccaaaatttttaatttgtgggggcttaattgttataa

SEQ ID NO: 318380 - DNA, 997 bp, Cannabis indica
atatatatatatatgtgtgtggttaaatctagcttgtttctattttttatgtcaatttatttctattttcacatacatatgtggttaaaatactagtttctattgtgatgttaaattgtttctattatctttttgatttgtttcttttttcagtgtgagttgtttttatttttatgatatttgtttcgacttctcatatatatgagattaaattctagttgttttcattttgagattatattgttttcattttcaatttgaactgtttttatttttttatgtaatatgaagttaaatgctttttttttttttttcatttcgaggttaacttatttttattttcaatactagttgtttttattttacacacgctcacatagtactaattatttccattttagacacacataatgctagttgtttctatttcagtgtgagttgtttctataattttttccattattatatatatatgaaattaaattctaattgtttctattttatggaatttgtttccattttatgtatatatggttaaataaacttatctcctatttctctactatctttctttcctctctctaaaacacacaaccactgaacaaaccattaaagtagtaataaattaataatctcattgaatgtcaaattctctcaatcttattctactgtctcaatttccccgttgttggcagggaaagaaaaaaaatattaataatattaaattgtagctgtcgtgaaaagagagagtcgaagtctaaccccatatttttagaaaacaaaatataattgtggttagttttttatattagcgtatatttaaaaataaattaaattataaatataaaagtgaaaattgcccaaagaaaattatattgtaaaatttagtcactttataatatatcgtgaagtttgaactgcaattattatcgcgcgcatgggtgtcttgtccgaagctcctggtgcatgcgtgcaccaagcttcgacacccatggca

SEQ ID NO: 318381 - DNA, 831 bp, Cannabis indica
gaacttttgtaatttgaccacatatatttcagaataacagccaatcatctgagaattctaaagcaacaaaggcagaggagctcaaatacagtttcctcatctgatggactttttggtttgttgtagtatttctttctttccttacaaaagatcacacatctctaactttacctattctgcgatattataaggatgtctatggtcaagtttggccccaccaattcagctgcattctaatcaagattcgtgaaatttcacattttctattttcttcttgtaatttgaattcggaactagtgatttcagataatgatctttatctatgtgttaatatacgcaaaagtaaaccatgatgattttcttcacacttgctggagcataacaagttaaagtgagataaacgatgcacgtgcaccttaacttaatagtttccattatcatatatatagacgattttcagcggaaatttttgccatcccaatgacaaaaagctaaactaataacaggagattattctttcaaaagaattaaaaaaaaatgaatgatatatgtaatattgttacattagaaagcacataaaaaataaattgtaacaattaaaaaaattatatcgctcatctcgctcccaccatagagaatatcggaatacagttttaactatcatatatataaataaaacgaaataaataaataaataatgggttcatatcttgacttggaccacaagtaacctctctgtaacaactcaccctggcttctgtgtacaaatggatgtgatcttcgatccatcaaatggaaaatccttctcgattgaagtgggtttctttgata

SEQ ID NO: 318382 - DNA, 1443 bp, Cannabis indica
ttggtcgttcacaatgattggccagttcactccaactacttggacgcttggtcgtcgtcaatgctgaattgtctcggttgattcaacaaatttaacatagtacgttatacttccttgtcttccagttaattcgtccaatcttctaccttctggatttgttgcatgcctactagcattccatttaacgccatgtgtcattttgtttcgtgccacgtcacttgggtaattttagggtaacatttgcactctaagtccatgtaggagcgtctggtcgtacgtggacttcctagtttcttctttgtacgattaaatggcacgtatattttctcatgtgatccgacctttaggatttcgcacctgcctgacgtggatcctgtcatgtccttttaaatctttagttgtcatcactacttacataggtaaatgtgcatgaaaaaacgtaactgacagttacacaatttccaaggaagtttctcaaatacagatgagaccattaatttttctttttttttttgtggggggggggggggggaaacaatcattacccccattaaattttttgcaaaaactctttctctctccttctagtataaataaccatccgatactccatttactttttgtagcaacttcaaatttttttagagaaaacctttttgttctttaagttcttctagagcaatcccagagttttcatgctaacatcctatgagtttttaaacttcgcattttagcttcctctcgactttaaacagtgagtaagtcttcttcccatcccttgcatgatttttttacaagttttaatctttatatattgcacttcactatctattggaatattttgtgtgagtgcactgccaccgtctatttgaaataaacctttttatgaggggtgattttaagttatttcattgtccgtttgagattaggatgaccttaggtgttttaacttcactcgaaactatgcttttagctttatttgcattggtggttgattctttcaacttttgggtttcttaagaaattcaagaactttcattttttaaagtcttatagaaaaatctccaaaaccttctttctgattctctatctgtgctaagtcaacccattagagagccaaactcttaacttataaattctaatgtactatgcaaattactttaacaagattaaagtaaacttataccatttgattgtgtgtagtcttgatgtagatgagtttcttagcttgatttgcgtattttgatccaaaattgactttacccgagagttaattttgactttgactattacttttgggttgacttttgactttgagcttttgtagccctcttttaaatatggtcttgaattcttgctctcttcattaaacttttgctcttatgaagtatgaagtagttgatatacttgttgaatccacttctttgattatgtttgacttta

SEQ ID NO: 318383 - DNA, 1034 bp, Cannabis indica
ttgtcacctaacttgccaaaaaaggattttacaattattattattattattatgttttgtgtcacaattactctttcttatcgtaaaataaaatgaaagtaaaaaagactatttatgccataatttttttattatacaatattaagtttttattattataccctacaataagagagttagtgtttgtagatgaaatattattacttaagacacacgttatctgattatatgaataataattagattcataacacaatatatacaaattaattaataaataacatgacatcgtggtacattagagaccaatccttttgatctattaaataaaataaataattaaattataattgccatggatagatagtctaaacacgacatgaaaagtttaatagaaaaagaaaaaaaaaatagaattatttagtgtagagatgggcaaccataatcatatccaaaattctttattattaactggccacacttactctgttctgttcttttattaatttttgtattttattattattattattattaactaattaatttttccaaactttattgtagtttttcgggtactcaattcacctttatttcagctataatgaaactaaagttacgttaatttgaattcaaagaaggttgagcggtagatctattaaatattaattaataattttttttaaatcattaataaaattaattatgcattatcaaatgagtccaaaagtataaaaagaatgataaatgcgatgaatgaataaaagtttcgcctcgagttaaattatctttaaaagatgtgataatttcgtgtgacactactgatacagtaattcacgaggataacaggaatgaggaaattacactctataccctttttatattgtcttcttttatttttaccttcttttttaaaatctatcatttttacctctttttttaaaacattgtaccaattttacccctatcacttcaagatactctccatgtgattctcttatgtaaggatattttgggtacaatacatataaaaa

SEQ ID NO: 318384 - DNA, 3713 bp, Cannabis indica
taggctccaaacttgagcaaaatcatcatatcttcatactcaagaatccaaatatcaaaccatatatttcagctcaaattcaacaataaaattcagagcataacaacaagttccacacatgaaaataccctaaaatcttatcttaaacaaccaagaacatacttctcaacttagcaacacaatcatgttataatcattaagattgtgtcaattcccacatacatgcaatcaagcaaaaacatgatcaaaattttattccttaactttattcagcaacaattttaaataaaaaaatcagtaaaaagagctacctcaaatcctttccaaactctagcacaaaagccaccaaatccaagcttattctcaaaggagttttccaagttttgagattgaaaagatgagacaaagaaaggggaagtcggtcaagagggatgagaaataaattgaaaaattcattttctttatttaaaatttcctttttgttcaagacaatgcaaagggtcaaaatgaccataatgcccctagggccatattcacacataagcatcaagttagggtaaaaatgtcattatcacataacacaccattcaatagatttagattaatcacatgttaataaaatgccaataaataatcctaaaattgtatttcgaccctgaactcggttcggtccgaaatacccggttgtgactatactgcgtcgacttgtcagaacacacatgaaaaaaggacaagacaagtataatatataataatacagtccataagcacgtaattaaattaaattcacaaatttacccttctcaggtaaaaattactaaaatgccttgctcaccaacggggtcttaacatatcatatatcaaattaattcacttataataaattatataataatataattcctcaatattacacaattaatagttagggtttgctaattcattttttttttatcttaggtattacattacatcacatacattcacaataaaatatcatccattcacaatatgttacatatatatatatatatataataaaaaaaaaaaatacacacatcatttataatagaactgctctggttccatggtactaaatttggtacgcaatggtaaaatatttttgattatcattgtatcatatgtcgaagatcaccatatatatatatatatatattaaattgaaagtaaatagataaaaagaatatttacctcttgatgtttattagagtatccttgattcttttcgcaagttgtatccttagaacgataatgacaaaattacaccttgatctttcagacttttcactacatacaaggagtaatgcgggctagtatgataatcgtatgaagttcttgattaaatctcaacacatgagcaaaaattattctttagtgatagagaaaaaaaaaagtttactggtaaaatctttttaggctttcataaaagttacgtgaaaagttctatttcaaaaactttttcaaaactttgttatacaatatatttaaataaactcaataaagattttatttaattaattatttaaattcaaatctattaattaaattatatttaattatttgaataaataatataaccaaattcgattatagatatttatatcttataaccgaatgagagaatctcctaaccacttgagagaatatctcaactactttttaaattcacatatttatcttattgaattaattaactcaaaaagacaaaactaataaagaccctactatgtggggcgcatgcactgtgtctgaacacagtgcatgtagcgcctccctctgtctaaattaacacaaggaatgtggcttttctcttgacaaattttgttttttttccctatttaattaatttgaaaaataaattatttattacaaaataaataattacaattttgataattcaaaatagattattctgaatttccatatacaacttttattgcacccgttgacagtatttcaaggtggcgatctggagaccatggatatccattggttttgacggtgatgaaaaatcagaagttaagtctaggggtggtgcttctgggttctctcacacacgaattcagagaagaagatgaagtcactgatccatatggtggttcattcaccagatgtcgatcgtcgtcctgttctctctaaaaaattgagctcaagatgaaatttgggcaaaagtggtaaatgagcaattttcaccttacttatatgtaaaagtggcgatatgcgtgagctcaaatcaatgaccatgattatgtctaagaaaacacaagatatatccaacagttcgagaaagttgtcggtcatgcatttaatgcgatgcttgaaaccaagatatctaaatgatgatatattttcctcaagactcatgctgacctaataaccaaccatcatttcgcaaagccatgttgcacacgctccatttgggaaagtaatctccacgagacaaagacataatgccatatgtttcttcatttcaaaaaataagaagttgtcaaccacaaatagttttgtttggaattcaaaaaggttcctcattttcgcctccaaatgtcctcacatcatctgggaggaagtatgcaagattgtataacccctagagttctgaaaacttggagataaatgttatccatgtttttgaaattggacattgtaatttgaaaagcggtacagctcaattacttcaagcccaaaagtaagcccaaacaagataatggactaggtccattagcgaagtcatgtcttctagatgttggacaaatgactcgttcaggcgagatagccctccagcacaacgtgtatccaaatgacctctgtcagagcgtttgaagaagtaatcagccagcatccagacatccagctcattatcatactcattaatcaccccatctcgcgatattataacttaattcgcatgatctcgttcgaggatcatatcttcccaatatgaaaaaataatgatggacgaccaagcattaaagcctcacgggttgggcctcgccaaatcggcccaaatgtcattataatatttatatttaccccattagggacaagaattctagcactataaatgtaggaaaacacattcatgcaaatagttagaagctcaatctttgagtgctcagataaattctagggttgtgtaaatcataaagtttttccagtcatatcgtaataatattaattcgtggattaagacttgttaacgccctaactacttaaaaaaattagtttcattctttgtttataattttttttcttttaagttttattatattttattagtttctaaaaattttagtaaataattaataattatattattagtttgtttttcaattttttaagcactcttagtctgttcgtagttcaaatggatgaatttttttatattatattttttaacgtattttgctataactatgtatcaattaaatttgtaattcaatgggaacatcttctaattagatatacaactttaattagaaataaaaaatcgaaataaataatcaatcgtctaatttttagattgtttgaccaaaaaaaattaaaataaaaggaaaatttgatattataggcttaaaattaatttatccactaaaaatatgctagcatattttgcatcatgcaaaatatacttacaccatttttctcattcaatttacccctaaacaaataaaaaccaaacatccatctct

SEQ ID NO: 318385 - DNA, 788 bp, Cannabis indica
acataatttaatttaatggtaaaaaataaactttttaaatggtagaaaacttatgttaagttcaatcataatattttactagtataattaagtatgaagttttacgttttaatgtaatatatttttaaaataattaatattaaaggataaatatatatattttgtcaattattaggaagaatcgtgaatgcctgatataattataattataaagtagttggaagttagaattattagtggatttaaatttaatagtgagggaattaatgcacataaaagtgaaataaaaaatgtttttaactcatccgtgtttattttgtaccataaatcataggtgtttttttttttttttttgaaagaacaaaagttcacatcataggtgtttgttgtatgtaatcatatgcatttttaattgatattatttatgaaggagtattattaaaaaatttaagacactgtttcacttcataatttaaaaattatttttagttaattaacagttacttaaaaattaatataagtcatttaacaaaaaattttaaaaataattttttaaaaattgagttttaaaaaactagaatttagaaaatatcaaaatattatttttaaatttaaaaaatattttgttttctaacatattatattttatacttttgctcatatacttagattttagatctggaaccaaacccgaaaccaaacccggatgggttcatattatggtatggtgttaaaatattaatttttttagtaagaaaaatctagaaataattttaaaaaatttgtgt

SEQ ID NO: 318386 - DNA, 1706 bp, Cannabis indica
attacttttatactgtcttggctaattttttttcttatttgatcgtgtctcttatttgatccaagccagctaagccttttatcgtgtctcttatttgatccaactgtgcttgcacagaaggatctaatgttgtaggagcctaattgagtgtcctttcttaattgggttgcagccctagattggccaggacttggtcggccataccttgggaaaatgtatgttcaaggttggccagccccaagcttggcatttagctctggcagccagccctaggtcaggaaattggccatgccggccagccctaccctgggtagttgtacatgggcagctagttctatgctgggaaatgtctgactgcccgttctcctctgattgtctggtgaggcatgtgtattaacagggggtagatcacaccaattgcttgggttttgtggatccaatattcgaaactgattgttcaatggcggaacaaaatcactacaagtctcagtccttaagttaatgttgtcttgggtgcttgcacccattctcggacctagctggttaaagatgggccttggaatgacttgctcccaaatgtttcggaaaggaagcccgctctgttggctggccaaaagtgcaccactaaggggctggctggccaaaggctggccaagtaggggtgttcttgagccagagatccctgaccgaccccccatgccattagttgccagagtctagctgctcccgccactagatctgtgtggtcagacttgtccaccttcgggtagggggaagtctgtccttactcctgtagaacttggttggactgtttgtctgtagaccttgcttgatatgtcgactagtctccctttgagaggatctctaatcagatcttgacctctctcgacagttctttcattgaattgccttatcaggtcactagcttctctgttacggcagtctagctctgcctgatgagactggaggatgtactccgtcatccatccatctaaaaaattcgcctctattgtgcaaacacatcgcagccaataacgcgaggttcttcagtttggccaacttggcatacaacctctctaagtctggccaattcaaagtcttctcccaagtccacatgaggctcaccaatttgtggccctgtttctccaacataatactggggaccagagtcagttttggtgtgcaggggctgctccacattagctaaaccctctgtacgaggtgccaatggtggatctaccctgggaagcagaggttggtcattaggatgaacagggttggtaaagttgacctgaccaattgtgttggtcgagtgtgttgggcctaccaggttggcagaattagcaagattagctacatctgttgggtttgtgaaaactctagtggtggttgaaacacgaacatcaagattagcagtcatggagtcttgaggaagacccgatggggcagagattgtagtcgagttctcctagttacaaccatggtgattgatcatatcaatagacaatgctctcaatgaaagcaccaaattattgacttcaaatttgaccaaccaataacgaaatcgtatttatcattgaaattatcacgtgtaaacaatgagaacaagtaaagaaaaaggacacaataattttataaaagttcaacccccttagctagtgagtaatgacctactccccttttggttgtattgatattagagataa

SEQ ID NO: 318387 - DNA, 1958 bp, Cannabis indica
gaagaaaaaaattaaaaaaacttaatataattaaagatataaattttatataaaattaattattaaaatgaggtgtctttagaaaattttggagtataaataaaattttcctaaaatttaatttacaagagttctatttgcaccacataaaataataaatacatattcatatttaaaaaattaagcttaaaatatttataaaaatcacttttaatattttttctaagaatttttttctcaaattattttgtattaatttaaaaacttattttttatattttttctaataaaatttcatataattttatattttaatttttaataatatttaaaatatagaagaaaaagaattaaaaaagttaatataattaaagatatattttatgtaaattaaaaattattgaagtgggtgcacatataaatttttaggtataaataaaattccccttaatttccttttttatcttccttcttacatttcaaaaaacatattttaactattaagataaaacaaaaaaatgtataaaattttattagaataaatacagatacatagaggatagtttagtatgcataattaaattcatattacatattacaaatatggttaggataagtctacattacaattcattccttaaaatggtgttttagtaaactcttatctatttcggcatggtaaaaaactttttagttcaattattttttttcatgattgtatacgttatagttatttaggactacttttaaattatgaataatttacaatgttgataataaggtctaaatattttgttacacactaaactatttttttttatatgtgtggtaagtaactatttgaaccttattttttggtactgtaactattccgaattttttgtaaacttatagataatcctaaatagctacaacgtacgcgattatgaaaataatagactaaaaaactttcttaaatattgaaacaaattgggaaagtcgatctactgaacatccactaggagtgtactacaaaaatttcctacaatttattaatacttttcattttctacattacaattttttttttatttttctatgttgcaatattagggctcgtttggtacgccgtataagggtcgtattgattcaaataataaataacactactatgtttggataaagcaatgtattgtattaagtattatgacaaaaattttcaatacaatgtatgttgtattatttaatacataacaagtggtccgtattagtttgtattataatatttacaaagaattcgaggtcaaccccaatctccgacccagacctagacccgggacccgaacccgaacccaaacttgggacccagacctgaactcagacttcagacctagacccgagccctggacccggacctagacccaggagctggaccgggacccgaacccgagaaacgggacccaaacccaaactcgtacctgaacctaaatccaaacccaaaacgggatcgggacttggacacggacccaaacccagacccggggacccagacccatgacccggacccaaacctagacctggatccagacccaaacccgagacccggactcatacttggaccggggctgggaccgggactgggacctggacccggacccgggacccaggactcagacccgtacctgaccggctgaccccgtagttggtgttcgagtcgagtgtattgaaaatatattataactttacacaatctattaatacaagtcaataccaaatattatattgtattaaataatattaatataatacaatacaatctaaatccaacacaatacaatataatatgacgtactaaacgagccttaaaattcataactcaatacaatttattgagattaatcttcattttcaaatgggaaataaaaatacctaaatatttttttaaaaataattgtaaattttattattatttttttttt

SEQ ID NO: 318388 - DNA, 568 bp, Cannabis indica
ttatcgtttgctttatcgggcaacggtaatgacatatacagctcgtggttaacgaatggtaagagtactttataaagtaccagggttgtgattgtattatggtgtaaatgtttaaatatattaattacgcttgatcgatatatgtcataatgattattgttttaattactttttcttgctgagtctccgtgactcacgggtgcttcatggtgtaggtaagggaaaggccaaagctaagcagccatgagtttgatggttgaagcagcgatgtacagatcagccgtagtgtttcgacccagtgaacaggatgttcttttgattgtattttgatatataatcctatgttgtaaaagcactggtaaaccaatttgtaaatattttggaaacagggggtccccgtaaagtttagtaaaaaagcctttcatgataacgttgtgtttatttaaattgaaaattttaaatagtttcactatttttgatataagtatacttattagtaaatataatttttataaaagcacacacgtggcgtccatattggacagggcgttacaacatggtatcagag

SEQ ID NO: 318389 - DNA, 1612 bp, Cannabis indica
ataagaccttcggctataaatacagagttgaggagagacttttactctctctctctctctttgtattttaaaaatatcacttagtggttgtaagaattgtccacacaattttgttacaacacctagatctatatggacgattgtgaagaaattgaagattgaagaatgaattcttgatcaagtgaagatccaaagttagtgattggtgatactctacgacaaaaagcagcaagagttaaatcgcgctaaacagaaggagacataatctgatgtgctacatctatgtaagtattataaactctattcatgatattgatgttataggaaattaatatttatatgaaagtaaaaaatcgatcatattaagcatgctttcccaacaaaaataacaaatcgtatcttgttcttctgttgaaattgagtatcgagccatgaccaatgctacacgtgagctcacttagttatctttgatcctcgaagacttccacatcgacatatctctacctttcattctctactgctacaacaatgcagcaatacacacctccaaaaacctagtgcttcatgaatagacaaaacatgtggacatcaactgccacaaggtcctattagaggaactaagttagctaaccattctgttaagtctcaagtcaaattaattatgtctaactaactctgtttactactcatgcctatatgaaggcatttcttgtaaatgattatcttaatcaaataatattttacttgatttctctcttattcgatcatgtattagaattttgaacaatgtcaatttttcatggcttcgatgcataattgcacattttgggttctaagagttttgtagatgtagtacggggaccaaagttttacctaaaggctagagggatgtgcttttcttgtctcatctcctttaccattctgaatctaaatggaaggctaagtgtagactatttttgtcgaaagttggcagtgagctgtctcgatggctcctttgcatttgtgggagttttaatgaggctgattttttatctttgttttgtttggtttgtattttttagtttgtttaattttattagtgttttgcaccttatggtcttagtagcgttggcattatgttttttctttgtgggcttgttcctttagcatttcctacgtgagttttgagttttttgttcatttattttttgtgcgtgattggatgacaattgagtcatttcttagtgaaatttgtgcaactttatttctgcttgatttagggttttgtccctttgttaattatgaatgaattttgcattaaaaaaatgtattcacattcaatgtgaaagcaagaagcattgcatataggggtgttcattggatcacatccaatggatttggatccattcgatctaatccaattatttattggatattggatttttccatccgatccaatctaattgaattgagtcatccgatccgatccaatggatatatttgattggatccgtaccatccattggatgctttaactggttttttattggattggattggatccatcccatgaatccaatagatgaatccaatccattttagccactatttaggctgatttcattaaaaagaa

SEQ ID NO: 318390 - DNA, 1386 bp, Cannabis indica
aaatagccctaaatctagaaacaaagagtgaaaactaaccgaaaatacaacccaaaacttagactaatttagcctaacatagatcctaataaaaataactaccatcttattcacctataaataggggcaaaatccatggaaaaagagatgacaaaatgagagaaaatactattatttacttttattgagaattataccctgaatcaaaataagaaggagtcgtggagtatgtaaattttaagtacaaaatcacataaaatatctggtgtttatttattattattgtttaattctttagtaatttattacgtaaatgctatatatttagttaataaaaatatgcattaataaccatatcttggctaaatgttccattcccgtcatgtttacaccacttctctgagtttctttggggattccgccacatgggcatttttagtccacactctttcttgggttttcctgaagcttcttgaccttgacacaagagctactcaagttctgttctaggacctctgctttgaacaatccaggaagcacttcttgtctggatcatgccagaccttacccagaagacgtgggttcgcgtatgtgtggatatagacacataatgtccataaatagtcaaaatacattgggctccaagaatgagaatgtccacaaagagtctgggccttcgacgcaagcttgggcaagtttttcgtcttggtccaactaccaacattccccgggagtacaacccccatgaccttttgatgcaaggctcctgctctttaccgccaaagttggtgaagactccattctgttcgtccaaccttttagtgttatggcccatgcaacctctttccgaaaacttatccactaaacggtcgcggaggctattatctagtagcatcctctttctagcctttttgcactcaaagttgagatacttttggaggtccaccctagactacatgtcgtttgaataatgttccctgatcctaccatcttagttaacagaattgctagggcgaccctcttagcctttgagctcagatactttcacccttttccttttctgcatgattgttcctctgtgagcagaagggtgcctaggctcgaaagcaccggtggccttctgcgtctttagagggttgaccggctagattcatgttttttcaaagaggtatgggagtagcgggaaccccaatattgcctacactcaccttccttcgcccttcgcaagagcagaggcgtcgccctgacagcgttatctctgttattctcaacaacacacttgactaaaaggcttttgctagaacctggcatgtaggcaagctataatctttctgttggaatttattttaccaggatcttagatctactcacaagtatgttgtttaa

SEQ ID NO: 318391 - DNA, 547 bp, Cannabis indica
atttatttatttttattttttgtgtaaattttgtttacattcaaatgtatatatatagtctatagggatcatgtaacgtaactgaaattgattatcagttgatttttgtacatatgtgatatagtgactatattatatgtataggcaaagatggaccatgcacaacatgaaataattaagtgatgaagtcttcagaaagaaggtaatcagaaaaaactgcagtactactatactgtgtaaagggatgatatatttatttagacatcacaatctaactatatgttataacgtgtttcacaattatttatactttagaaaagaaacaaattaataagtagaagaagaaagagatgcatggtaactatgggtcaaaggtgtagcccaaaaaaagggtaatgaggaagaaaggaataattaatgattgtaacgtttggctttacttggttagaattaattcacataaaaagtaactctagagaagtgatcctcatcaaatgcagtacagcctttttctatttctatattcctaattaacaaaagcttactt

SEQ ID NO: 318392 - DNA, 2360 bp, Cannabis indica
agcaccaagaaaaaagaaagaaaaagagaggaaaagaagagaaagaaagctagagagagaaaatggttttggtattttgcattgaagatcaagtggttgattctcattcattttagctcaaattttgggtggtgaatccttgcatggtgatcttcaaatctatcggttctgatttgacaatttttctctctaaggtgctcttctacaatacccacttgatgagatctaaatttttctatttgtgtatccatattttgagatgatgatggtgattgtattagtaatccaagattgtttaatcttgatgttttgtgagcctctagttttactagaaaataactttttagtcccattattaaactttggtgatagtggatgatttgagaagattacagtcctgtgatttttcccgcattgggtttccacgtaaaaatcgtggtgtcttacttttatgcttgattgttgtattttatattatttggggtgctttggtttatatttgataattgcttattgtggtgtttgataagtatcctatttttgacatacaaagagagatacaattgtggttaattgcaataggttttcgcaacaagtggtatcaaagccaaggttgattggtgctgaattcttgtgtgttgaaaaatggatgagtcggatggaatgatgaaattgaacttatcaaactattccgcttggaagcaattgatggaagattttctctattgtaaagatttgtacaaacctattaaaggtaatgagaagtcgtctaagttagatgatgaggaatgggaagttcaacataaaaaagccattgcttatattagatgatggatggttataaatcttcatgagcatatctctaagatttgatgtcgtttggaaaaaggtagaaaatctctttgcgaagagaacgactagcaataagatttctctactttgaagacttgtaaatttgaagtacaaggatggtggtagtatggttgagcatacaagtaaattcagagtcttgcaaacaagttagttgccatgaagatgaatatggatgatgagatgcaagcatcattactcctcagttctttacttgacagttgggaaacgttagtgataacggtttctaatttcacgccaaaagggactttgtctacggaaagatagtttgcttaatgaagatgccagaaggaaagcacaaggtgaatcttcttcttcttcttctggggttcttgttattgaaaagcatgacaggcggggacgaagtcagactaaaaatcagcatggctctagaagaagatccaagtctcgaaaagatatcaagtgttatcattataacaagcaggtcacttaataagagattgcagaatattgaaaaaaagagcagaatcatggaaaggaaaatgagaaagagactgatacagtttccactgaaggcgatgttgtcattatatgtgatgatgtgtgtgttagtcttgctacccaagattgtagttgggtgattgattccggcgtttcattccatgttactgctcgtagtgatttcttcacttcttacactactggtgattttggcaatgtaagaatgggaaacagtggtgcatcgaagattttgggtattaaagatatttgcttgaaaacaagcgttgttagcaaattgattctcaaagatgttaggcatgttccagacattctgtaatatctcgataagtctaatggtaaataattagggtttatatttatattatgagttaatcagattataagtgggattatgatcctactaatctatttcagcataaaatttaaatgtactataagtggataaataagcgtaatttgttaattacgaagatttatttgaaatactagatataatatgagttatttgtgaaataaaatattttcaggttcggcgacccttgaaaaccgagttggaggccaaaaatgtcacaacggttttaattagaaatattattgggattattgggataagttaattttagaaataccgatgtatcatagggtacttgaagttggccaaataccctaaaaatatagatttcttagtggctaagaaataataagacaaccattaataataaagtttttattaatattattattattatttatatatataaaacttatctttgttaagtttatatatatattataagttacagtaagtataaacgaagacgaacgaacgaattctcgttctctccccttcgacaaaattttctctccctatatttattttctttgatttttaacccgaaacctaacgatctaagctccggtagtatcaagatagcaaatccttgaagatgaaagcttaaggtttggtttaatttcgttttaagttt

SEQ ID NO: 318393 - DNA, 1052 bp, Cannabis indica
tttgttttaaaattttaatttctaattaaaaaattgaaaagtgaaaacagttttatagaacatgtttttgaaaaatattttcactttttcaattttaaaaacaaaaaattgattaaaaaagtgtcaccaaacgccaccttagcttacacacactatttagactcacttgggttattgttcgatcatacttgttcgaacacacaccttgaggatccaagttcctattcatactacacaaaaaaaaactataatattctaaaaaaaaaatttaaataaattgcgtaattatattaaaaatgaaaaaaattaaagctcgtagtcattaaaaattaagttaaccagtatgaaagacggatttaccataccagtcacattaccgccaaaagcccatttagttacattatagacagtaaaattacataatttagaaataaacgaaaaattactagtcaaaaggtttgagagcattttacattgaagcacataattattaatacctcaaatggaagtagttcccttctaaaatttaatcaagtgtggcagcttcctcctccaagacaattgaagcttaatgttaatactgcccttgactcagctgctgaaattatgggaatcggtgccattgttagggactcttgtggtaatattgtctgccatttctaagtcgattcgaggttgttttcaagtgaaagagattgaagcccatactatctcgttatgcttacaaggtttgcatcattctggttatattattcatcttactgaaacggatgctcttgttgtatcacaaagtatcaatgcctacaagagcattataacctttttcatgatttaatatgtgatattatgggtaaatagcggcaaaacccccaatactttcgttttagtttcattaaacccccaaaacctaaatttctgcgggtaaacccccaaaatcaggaaactgttagcaatttacccttttcgtccaaatttagctgttaaatgccatgttggcttgtccacgtggacacaatatacacgtggcaccattttattggtccacgtaaaaa

SEQ ID NO: 318394 - DNA, 1594 bp, Cannabis indica
gtttacttgctaaaattgattcatctgtaatatgtagcctcgatattacttgtatattaattaagtgccaatatgaagctaggaacggggagcaaaaactgaataaaaattggcaatgtcgcaccaagctaattatatataattataaggataactaattaatggttacatgcttttaaactaaaattaatgattatatttttattctaactcttgtgtgatggttacatttattttaaactagctataaataatgtttttaaaaataaaataaaattaattataattaattactttttaaataattaatttttaatttaaatatataacaaaactcttttcaactattaatatttaaaaatatttttttatatatatttaaattcatattatactttttttaacagttcaaatcatttaattataatatttacaataaatctttttatttctttaacaaaattagactttcacctattctaaataaatttttgaataattgattagtttttgaaaatgacactaaattatttattttttggagaaccgcttgacacatctttctccattataaataaaaattctagttcaaaaaataaggtttcagttctaacctaatatctgtgaatttttcacttcgatacaatctttaatatctctaattctctgctacaaactcattcctccaatcaactagctatatcatgttctttccttttcttttcgattctcagttgtcttgtcgaacgaccagacccaatggtattgtacgtcattcataaatcaattgacaatatgacaaaacgttattttaccctgtctacttacttcttttctgcacacttttttttttcattcacatgatgtcaataacatttcctgcatgatcacaaatgtcattcagatataataattgtaatcatttttttgctaatttaaaaatttcataccaaagaaaaacttaaagtttaaaacaccaagttcatgatggacagtctagagaaaagaggcttcacctcctcaattaatcaatgttctttctcactgatcgcttcacaatgtaatttgtgccacttgtttcaaatatttttttttaacacgatgaggaaggagaaatagaaagaaaaaaagttaacttatccttaattttataattgttactcgatttcaaaaaaattatttatttattttttaaattaaaataataactaaatgacttgaaccaatctaaaactaatatagtcatttggaacttaaagtatttgttatgactatattttgagtactaaacatggacatgacacatgtcacataagtctaaaagaataaaggaaataataaatgcgaggaataaatgaatgttccgcctcaaaaatatgctacggtttaaaagatatgatgacctcgcaggatattatttatataagggaaatttgcggcaaaagtccccaaaaagttcagtttgatacagataagtctccaacctccaaaaatagcggcaatagtcctcaaagtcatgtttttattagtctgctggtctccagttatagatccgttaaccaattcaaatgccacgtgttgacatattattggt

SEQ ID NO: 318395 - DNA, 1925 bp, Cannabis indica
gatgaaaataagaaaaggggtattttgttctgttacattaagttgtagtctcaatcttgaaatcatagctcccacaaacttgtctggagacattaacttctgctcaggaatagagagaattggtgttaagtaattattgatgaagtcatttgagccaatggtaactgagaagagagacttttcaaacaattgcatggtagcttggagaccaatttgggaaataatgtcttgcttcgtatttacaaagttatcaatctgtgcatcaagatttattcttcctccctataaatcacatttgaaccatccaattattgaaacaaaaaaaaaaaaacttgtgaaaaacttactaaacaagaccatgtttgattgctcaacaatcaacaacaaattagttgagctttacaaatgtcttacaaatatttttccagtttcattaagtattccacctccaccagaagcataatttacaccatcaagaactattggtccagaagttgtgggagctaagtaaggtggagtgaaatgtttgaaacccaattcttgacctgttaaaacaaaatcaaaatcttggctgtagcacctatgagaaggaggaaaaacacacaaacaaacaaaagcttaaaagaagaaccttgcctataatgtcaattattgttcttccatttgtgtatctaccacttggtgaaccgaaatcgattccattcggaacacagttagcctttgataaggaaacaatgtagttgttgtttccagcatcaaccagagaatcaccaaaaataaaattagcaggaaaattttgtcccaagcaaattcctaaaaatgctaaacttgtgtgcatgcagagtgccaaggctacaaagtttactctctttgagtaaatatccattaaaacaatcaaaagatagaccttaaaatttagtagcaattttaaagtagtataggatttggagttttaatgaccaaacagacaacaaaggataggatcaataaaagtatgaggatgcttgaaatgaacttgtgacaaaaattgtttataaatttctgataagaaaataatcatgaaaattatatcttgtggtatagtgtatcaataattgaagaaagttagtggtaggtaactcaaatcaagtactaagccagttgttggaaatgacttctccaaaataaccaaataatcagtagaagaaaataacaaagcaaacaaatttcacaatgtatggactaggcaaactaactttacaattttgacatggtccactacttgtggaaatgaaaaaaacctactacaaaaatagagtacaacttaagaaaacacaagtgaggaaaaggagcaataacaatgttacaccttttgcatatgaaaacccttcaaaaactttcactagcttaaagctaaatagggtaaaaaagaacatgtacattagttggagcttgaagccaaagacatatgccctttttataaacaaataaacaagtgttttttaaatggtaacattaattcttcagctaaaaagaaaaaaaaaatattaattgctcctgcaaattctaaaccaacctcgtggagtttcaatgtagcaggaaaataattataaaagaagagaaaaaaataacagtcaaggtatgggaatttttatgtaatattttctacttttatgaaaatatccaagaaagtttttgaaaacaacatagtcgaaaattgttaagaaaaaaaaaacatagttgaaaattttatggatcagatctaaaattaagaagaacctcatattggttcaaagtaattatagttgatttataattgtggtgaggttaatttctcgttgttttgtaattgcttttttatttttcgttaagaaaaatatatttttataattttaaactttacaaacgtattttataaataaaaattttaaatcgtaaaattataa

SEQ ID NO: 318396 - DNA, 1211 bp, Cannabis indica
acgcgcgcgcacgaggcttgtccctcggacagcacgcgcgcagacaaaaattttgtctgaaatcctgggctccgcgcgcggaacaggctgcttgcagcctcttgcgccgacaatcctcgcccatgcagcctctgatgcgcgcgcggacagtatgcttaaatttaaggtcagatattactttttttttaaattaaattttttgatcactcataaggcatatacaccctagtatgtgtacatgagcattcaaaaaaatttgcacaactgagctagtatttctatggtttaaggaaatgttggtgttatccctagtaatagagtttcttaatcctaaaatgctaatgtgagtgctggtgagttcattaagttgatcaaccacacatacaaactatatgcacgcctaattttgcactattatggtttaatacataaacacttaaggtcacacgagaatataatgaccaagtttattaagtctaaagtgttagtgttagtgcaagtgttcctcctcaaatcacaaaaatcaaaaagaaaagaaaagtgtcatcaattatagaaaaatctctagaagcaggatgctgcatctagcagagatttcctaattgattggagaaaatcctttgggagtgggatgctacgttgtacttagcaagggtttagtgaaatcttcttttttctttttcctcccttggagctttttctcttaagactttaacaaggttgagttgaaatcattgagcaaagttcttcaacaacctacgatttcacccttattcaaatgatctggcgagtctttccacaatactctttaatagtgattcagctcacttatgctgatgaaaataacttatgcttgaaaaccaagtgcataagaaataacttactacaccttgagagtggtgtatctcgctgctagtagatacctttaacaaacaaatttaaaaatatctcaccctagttgctaagaaactgatgatggaggcaacaacaacaaaactaaggcaacctctgagccaacctttcagtactccacctgcatgtctagttcctaatagcaataggcagcctgtctagtttccaatagcaacacgcattaatcgcatcctcgatcaaccaaagaatgatgtactcattagccaggtttaaatctgttgggttttatgccctaaataaaactccatttaaatgtaatctattttattcaacatcaa

SEQ ID NO: 318397 - DNA, 2243 bp, Cannabis indica
aaaacaatgatcaaatagtctattttacacgtgtataaaataaaatagtcacgcgtgcaacacactgtttgaacgtagtttttggcgtgttaaacttttccaaatttctttaaattttgcaggatatcttaaataactataacgtacatgaccatgagaaaaaaatttgactaaaaaattatttcgagtgctaaaataaataaaagtgtattaatgtatccattttaaggggtgtattgtagatcgttaagttttttatttttataaagatcatttctttttaaattaaagtgtcaggtatgtttctaattttattttaatataataaagccattattttgttagttggaatgaatggaaatgtattgtattttcgttttattcatttaaactttaaagggtttccttttagaagattcactacaaaaaataggagaaatagaaaactaaaaacctcctgcttcgccaattttttaatgtcattagaataattcttttttagaaaactaaattatctgttaatagacaaattaaacaaaatttattacaagtagatataattcaaagagcaaaactatcgagaataggtttaccaaaccgtttacaataaaataaaagaagaccctaacaacaatctaaactaaggatctaataagtcaccagcgatcaagcatcaaagaagtatgaagtatactaggtttctaaaccaaatgaacttctgacaaagtccaactactaatgatcatcagccaatgatcttttgataataaaaatatgacataacaatcctattatgtaaatcataaataaggaaaaggactaattatattgtaatgctctataaaaaaaaaaactggagcacatacaaagatttgaaaatcccccaaatttgacgtccaaagagagaaaccaaaacgtccttaccaaagcaatttggattcattgatgcatgatacaccaataaactaataagaaacaaaatttacatctctcaccaggacaataataaaccgcattaatctaataaggaggtggataatcaccattattaaaaaaaaatgacaataaaactaaacctaataataaaaaatcaaaaaatgtaaaaaaaaaaaaaaaataattgttgcacaaatgtgtactcatcaaacacaattcatcacccaccgaatcgacactagaaattaaacagaaccaaaactctgcctcaaaaccccaccgcagtagcctcacaaaacacaccaagaccccactccctgtcgatctcacaacaaatctgcaaacccatcgaaagtgacaacccctaatcgactggccgcccacccatcaaccagatcggtacaaaaaccaaaaaccatgagacaccacaaagccgacgcaaacaccccttgcccaacacgaatccagcaaacctgtagaccaccaacgagacaaagaaaagaaaaccatagacctaacctaacatcgagcaagagaatcggcctagagagtccataggtgttgaataagcaaccccgaccagagccatacccaaaccctgaaaagggtcgacgagccctggccagagaataaaagaaagccacgtagcggctggactagattagagaggttttgagagagaaacaaaaattatataataaaagaaaaacacacgcgacaactagatatactttcttaattacttccattccagtaaaataattttgaactagtttagtagaattactatcttttttaaataaaataattaaataaataagatgaaatgttattttaatgcaaataataaaaagaaattatgtattaaatattttcattctcattcttgttaatttcaaccaaacatactccttaatttattaagactggaaaagatacataaagttatttattaatggacatatttagatttaatcttatttgaaggtgtgagcaaagaatatttaaaaatttatgatttgaaagaggaataatgatatatgcaccttttgattgaaaaaaatatgataattgcacctaaatatgattattctactttgtttgttaaagagtaagtaccatttggaggttggaccactttgtatcttccagtcaaatttgtgtaaatggtatcccaaatccttgtggtactggtaactagagaattgtgatatttaaagatactggctgtccaatcacacgtaagacataaaaaacaaaataagaacgaattgaatagtgtaataagaattagtataaatatgagt

SEQ ID NO: 318398 - DNA, 634 bp, Cannabis indica
catgtgttacatatatgtttgggttggtaaataattatgtattaaaatattcattaaaaaaaaaaaagcagagttatatctctttattttggaaagatagtcttcaaccatatgtaatcatactagtggaagtagcacaggcaaggcatgtgctgtggttggattttttaaaaggtatataagattaaaaaatgaaattgatatttttttaaaaaaaagtaatagtcaaactgagtaactatatatctaataatgccctctaaaattaagtgtaaaaataataaaagattaaaagtaaactgagacaagtatttttttctctccatacaagaaaactgtttcggtctatagttgctataatatatacattccaaaaatatattaaagagaagcaactttttattagaagtgaaaagttatgggctactattattatagcagttgatgtaaaggtaacaaaaggttaaagctaattgtaattgttagaaagtctttcattggtaatgtatgaaaatataatataatatataagagaaattagctatttttcctattgctaattagcgttgaaatggaacatcattcatcttattcctaaattctaacatagtatcaaaagcaaaaaaaaaaaaaa

SEQ ID NO: 318399 - DNA, 1104 bp, Cannabis indica
gtgtcttccaagtcataaaaagatgagttcctacaaaaccctcccactacgacaaggtactgtgaattatatctaagaaaactaaatgggattgacctctttagttgtgtcaagacaacagaggtagtgggatcatcataattttatgatagaacacttttggaatcaagaaaaatatctcctttatttcgtgataactggcctacaattaaaaaagatgtgtcccccattcaagattaaatctatgatctcaattgtttcgaatctgataatgaaaatataccatatgcgagcatccttactttgtaaaccttatcattctagggtctttttgcaaaaccctaaaggatgtacaatggtggatttgatccgaggacatagcacactagtgagggtttccaatagctcacttcctcttctatgtcttccatttcaatcttgaccttacttccctgtccagggctcgtaaaagagctttcaagattatggattacatttacagatctcagaacaggtggggtaacagacataccttttgcaatgttactgttacattgcttgtttgctttgacgaagctcaaaaattccttctcagcatcctccattctttgaatctctttctgtgaacttcgaggagacagtgggggttagaatagatccatgtcagcttgattcgattccaatccccttcttccctgcatctccccaatctcatcctcatcatcttcagattgctccaatggatcaatacaggtaacatcctccatcatttgcgtttgaatctcagtcgtaccagtcttcgatcctttcctcctcaaattcttagttgtagattttgattttccattgttttttgaccttgttttgccatagcttcagcacgagctgcaagagcaaaaagcgagggaaaatctattagcctccaatttacttatgatataaattattaaatgtgaattaatgtgataaatgacatgttaaaactatgaatttttgtaattatgacctgtgaaagataaaactgtgaatttaatttaattgcgtgcttatccaactatattatggtatagtatactaattattattattattattcaaaaaata

SEQ ID NO: 318400 - DNA, 1611 bp, Cannabis indica
tagtaacttttgtaaaacacatgtaaaatagtatttactcttaaatatttctcataagataattttgcaataataacataggaatataaaagaaactttaatttatttatcaatttacaaattttataaaagcgtatttttgaatacttattactatgcaatactaaggtttagcaataatgtgtgttttggagtacctgggtatagtgtatataatttcaagttcaattaaatgaactttaaactgtatatccatatttatcacgccaattagtttgcaaaatctttaattttttttaccttacttgtgtttagccatttgtctaaaattcttgaaacgtctcaaacgttctagattctttgagcataaggtaaagaatgtctaaagtaattatctaagatcgatagtgatgaaatactcataaccacctctagcttgtacattctaaagtttataaacttttataccagctcaaatagttattagactctatatttctctttagagaacaaatgtttgatcattttgtcttctacatagaattcgtagaatagtaacttacctaaggtattttattccaaaggttacatttggttagtctatttgaattccatcatagtcaaatatgatcaagatgtaaatgctatagatatcttatcattatcgatctttcaagatttatagtttttaggtctagttactttaaagagttctttgttaaatgtaagtggttcacttggtcttagaatatagagttcatttccatgcattcaacacagtttagatctatataaatactttatgacttgtgaaggtcttaactcattgttcttgatgtaaatctgaaattaaatttctactaaaatttagaataacataaacgacttttgtccatagaaaaacttttatttccaaattttagaggtatttttctagcttggaccgccacaaaagagaatattaaaaactctaaagagcatattaagtaatttattaatgaaaaagctatagaggaattttaaagtgcaatttcaattaaaataagaatccaacaatgttcagtttaggtgagagttaaatttattcttattttatgagttctctattgttttatctaagttgtcatctattggggatgagccaactagatttcacaacttacaaaatgcttctcagttgagatctaacactttagattgtgtaacgaatgaccatcctttggggatggtcccattaaaaataaaattgatactacataattaataatagaaattaatactagttcgatataaattcatacacaattttcatcaatttgtaaatatttagcaagtaatgaagatatgaaaaaatacattaataaacatatctcaaatattttttaagatttttaactaaatgatatacaatgttctgtattgggcaggatgcaaagatatcaccagtcaaatagagtagtcagctcatctaaaatagatacatattagtaaccttttattcgatcaaaataagaatttaatgttgtcccgtattgggcgggatgcaaggtcaatcaagatcttaggttgtttgattgtctaattgatgaccacctattggggatggatccc

SEQ ID NO: 318401 - DNA, 1038 bp, Cannabis indica
tttttttttctactattattattgttatcatcaaatttaaaaacacatatcacatatttatctcctttgtctttcttttttttcttttttttcattttatctttgtatttctttataccgtctttttacaaggaggaatctagtgacgacttgcgtagcagttttgtattctttttggattcatgattataacacttgattaaaattgagtggtctttgtttagcaaaaaataaaaaatataaaattgagtggtcttgaagtcataatttggtatagttttcttttatgatttgacttggttgccccattctgtattttcttgcaagccaatgccaaaaaaattcataaagtttttgtcttcaaataaggactgctttaaaagaaattaatgtatttataattttgtataatatatagtacaaatgttacagcaaaatatatatgtatatatacacacacctaattgacttagctggtggctgaactaaccatgagataatatatacatattttttttatgtagaaccatgagataatattagtaaaacaatctatcattgtcactgtgaatcagcccctcgtgagtcgtgacacatgaaatactagtaagattttaatttagaagaaataggacagaaaattaaggaatcatgtatagaaattttctttatccattaaactactactcatgatccatgccacacatgatattaggaggtattattctatcttaaagaacataacaacacccactcaaccctctaatttggatataataatgataaaacaaaagaatttaacttgacaaaggttgattgttttcaaaaaggtgtctaacttgtaagcttcacttgttgggcaaaaggggtacatattaaacataagatccatcaaacagtgtcactaaactagtttttttatgctatcactgatgaagaaacgagtgcacattttttacattactttattgtgtactatcaaagtccaagagagttattctggtgtgattttttcttttttgtaggtgttaagtgagt

SEQ ID NO: 318402 - DNA, 590 bp, Cannabis indica
tgtacatattagtaaagtacttttaacttgtattttgatactcgggatcccaatccatatggttattaagatataaattattaaagttaattatcaagtttagtattataaaatacgggcgttacacgatacatgacaaggtctcagattagatgaatgagatgttgatggaggaattttctgaagccgatgttagaaaagtagtgagtgatctaaatccttcgaaagctccaagtttggatggacttcctggtctttttaagaagtattgggatattgtgcaccaagatgttaccaaaacttgtttgttggtgttgaatagcaactgttctgttaaaagtatcaatgagacgtcaattgctctaattcctaagacgagaggcctaagaagattgaggagtacagactgatcaacctttccaatattgcgtgtaagattatctcaaaatgcttagccaataggctgagattgactctccatgagataatttatgactcccaaagtgtttttgtgaataatagattgattcatgataatattgttaggttttatgccctaaataaaactctttacaatctgattagttatc

SEQ ID NO: 318403 - DNA, 1969 bp, Cannabis indica
cacttctatgtccagatagatgcaatagactccatatctatgtttagcgctcccacttaattgtactattatgttcccaaaatgtacgtatcacccaaagtaaaaggtaggcttaactaacaaatcaaagaacacaaataaaactcttgagattgaacctaacaatgttaggattaagatctttttatctaagatcaaccagtgatattgacttagaaagatacaacgataagattataatatctttaccaagatcaatatcggtctcagtccaatgtataatccatacatccgaaactagcatactttgccaatgtcctagaaaaatcataacacttatccaaggtgtaagtatacttgatcgctgattatcacatcaatgtaaagccagtgcactgatgaatcaggaacattatcttttgaagcatataatcacaatcacattccaatgtgttgacatcactgtaattatgaataactatatgttctggacttaacagattttgtacacattaaaccataattatgaaaactacatgtaatcataaatgacttataatcttctattgataacaaatcagattgtattgaaatgggatttatttaggacataaaatcccaacacatccaccctatcctaagctcctagatgatcgtctatagccttgacctttgattttgtcgcggtaaaaatagtgttgcactttagaatttggggaaggtgtatattcgctactcatctcccaataatcaaaacttgaattggagaggttatcgctagataaagacggactagcacagatgtgaggatgatgctcttacagaagttgaagaagatcttagccgatacgatattcacttccccaaaactcaccagggttcatctacaaaaggtagcacacaagatgagtatttggcctggataaggaacagaaaaaggttggttatacagaccaggtccgtccgatcaagggaattaaaaaatagaaattttgcatgataatgatgtttgcaatcaagaatttcttaattttgaattaatggctgattttcactaagcccaaaacgggtgagtgaaagtgaatatcgtgaaattgaaattaaaatgcagttatgatcaagcaacgtgattaagcactatcaagatttcaaattcctaaacataaattttctatggttttcctataccaagttcaagaactatcaagctttgcaatagaaacctagaaaattaaacattcaaatacataagaggaaaggagtgaagaacttactcactgttcgaagcttgagatttgctcgggttatgttgattggtgtttcctagagaatctttgaagaatttgaaaaaaatggggtttcttgctctggttcttcaaaagcaaaaatggctaaaagttgttgattaaggttttcagccctatttataagcagattaataaggcaaagtaatcatttcaaattttaaatacctcgagttccccctgaaagtgcatgttaattcaaaggcatgccacacgtttagacaaagatctagactgagtgaagtccatgtgcgaccaagaaggttttgtgcagacttggggggaaaatgttatcctatttgttgcacaatgatgtggcagaatacacaagtgacacctgtccagcattcctcgcatctgggtggagatgaatgtcctgaacagactacatattatacatcttcatgtataacctctaattatccgagcagggtgaatggtagatcatctgagcacgcataaagctagtttttcgaattacttatcaagacttaactactttagaatgatctcgtgaagtccaacaacaaagataatccctatggtcatgggattgagtcagaggaatatggcaacctgttccaatttcctattttgtgtatcataattatgtaatgaatattccttccttttttatacattgtaagcaaaagagaaaccttccc

SEQ ID NO: 318404 - DNA, 1094 bp, Cannabis indica
aattaaagtttaacatagtattatataaaaatatgatatataatcaaattcaatataatataatacaatacaatatacgacttgatacgacgttctaaacgagttcttaatcatatatatatgatgtgtatatatatatatattaatttatataatatattgccgtttggtatagtacaattacataatattactcatctttattaatgtcatgattaattagtagcaaaaatgatatcttttttattttttttctcgaatatttaattgtaagtagttactgctcaagtggctatagaaaggtgcatgcgtgttggaggttctaagttcgagttccaagttatgtaatgtaatatataaacgcttcaatcaaaaaagacatactactttatctatatctatataccgcttactatgtatattaattttgcacacgtacactatttacatataattaggacttaatgaggttggctatgacccctcattatttgttgttctatttgatatattattttttattttttttttaaatttagaatttgggttgttccaatttttatatagttgtgatttgcaatttttctaaatcacacaatatgaaattatgaaaatgttgtggtgtgcagttttgaattctaaaaagctatttaaattgcagcaccgtattgttacaaataccaaattttgaatatagtttttaaatttatcaaaatctatatatatgcaagattattatgagattcagatttattaaattagataaaataatatatgaacaaatgttgctcaagatatatgtgggatttggtactaaagtcctcatgtattcgtattttcattaaattgttcggtaaaatttttattataatatttaattattgaattatttgacaatagtataaaccactttcaccatgttgtacttttatggtgcaatttatgtagttttgagattttatagtgcagtcacaatttgaaaaatcacaaaaactacatgtgttatttaaatttgaaaaaaaggttaatttcacaaatgcacaaaaataacaaaaatacggtttcacggaattttaaatatctttacgattttt

SEQ ID NO: 318405 - DNA, 1092 bp, Cannabis indica
ttaattttcaaatttaggatcattttacatctcaacccttaattttattccaaatcataaaatattccatttctctacatttaagatgtatattttatcacataaaccacaaatagagaagtgaaaattctgaaaatcgatttgagagaagatgccctaattttatcattggtttgcactatgatcttccaataccaactcgcgtctagtagaacttcatagttccaccaatctttcatcaacctagttaacctataaattttccttttctgagatagccccccatgcttgcctataacacaaaaatttattaattttatatctttaaaacataagtcactttctttttatcacgacaaatctaagaccaaatcggacaatttggcaactcatttccctttcaaagataagctcaacaaatatgattaattttgtgaaattgatttttctgtataagtagagtaacgattcctgtcccataaattttttaaaaactgtaagtgcgcatagaggaggaagaatgatgttgaaggtgaaattgaggtaagacagaaacatggatccgatcattggttatacagtcagaagagatatggtgtggtgatgaagacgtcataaaaatgtaaatgtacagtcaaaatcataaaaaaattaaaaactttccatgttagtcggtgaaatattttgtgataaatagtgtattgtgtgaaaattaaaatattataaaaaaaatggtaacaattgcaaagatttttcttttttgtagatctagaattcaccaagtaaattcccaacttattaattctgccttgcgccactatagatttagaattgaatatcactctcagttatatagaacgctctatatgtaccacgatatagatacgttatgattatccattcttacaaattttaatagtcaaagatcctttatagatgatttacactgaatatggacaatttaccgttctacccttcaatgtattttatccttaaatcacttagctacctataaaggatattttagtactaacataattattgaaatgagatctcaatcatttatctatattcaaccaagctcgaaagaaa

SEQ ID NO: 318406 - DNA, 922 bp, Cannabis indica
ttttgcactcattgcaacatactaggacacacaataaaatgctcaagattcatggctatccccccggtttcaacaagcaaaacaagtccaaagaagcaagtgcaaaccagatacaaacagaaaagaatgaagaaatcagcacctctgaaactcatactttgcttccgcaactctcaagtattcaataccagcagttattgaacttactcgcctcacagcaaactggtaacaactccaatcaacctggtacttcctctggaaattcaggtattatcttatctcataattccttgcctcctttgaacgattcttggattattgataccggagcaacaagacacatttgctctagtatcaaacttttccaatgcatatgtaagatcccccctactaaactcatcctccctaatgacaattttctaatggttaatcaaagtgggaatgtcaatcttggcaataacataatacttgaaaatgtactgtacgcacctactttcaagtacaacattatatcggtcagctttcttaccaaaacctctcctatttcagtcaagttcacatctgacagttttattatgcaggacaataccagcaacaaaatgattggaagagggagtgcgatcaatgatctatatgttcttgacaatgcacctgaagcccctcaagttctctcggtttctgcagaaacatggcactctcggcttggccatttgtctcttaaacgattggatttacttcaaaatattttagattgtaatgtctctgatttgcataaaaaggagccttgttacatatgtcccattgctaaacaaaggaaacttcctttcaataataaagtcaagtttgctcctaaaatttttgatctaatccattgtgacatttggggaccatatcacattacttcacacaccaattttaagta

SEQ ID NO: 318407 - DNA, 599 bp, Cannabis indica
tatttgagaaaagtgcaagcttttctcgctgctgaaaagttagtttggaaccaatttttaatacgttcgtattatcaaaacaatcaataagtacctcgattgtctcttctattgcttgcatagtattggtatagtcaaggattctgggatccaaatcaggcttttcaacatgtggtatctcctcaattctgaaaaattcatgtcaaggaggaggagcttcgagcaaatatattacatttgctgattttttctttttgtgagtttgaatgctatattatagcattctcttgagtccgcctggactcctcacactgatcccacacccgcaggggtacggaatttcatggtgagatgataaattgacgtgacttatttcatctctttcaaaatagggtgacctattaccgcattatatgcagaattcttatcaattattgcaaaatcgaccattgatttagcagtaacgggggaagtccctaaagttataggtaacttgatcattcattttaatgcgattgtatctctggtgaagttgtagatacttgaagttattggtcactagtgtaacaccttaactagcataggcgtattacgtgatt

SEQ ID NO: 318408 - DNA, 1100 bp, Cannabis indica
ggggcatgattggtacatgtcaaagttcagggggcaaaaatcataattaaccttttatttatgttcttgaataaatgaacaaaatgtaagtgaattaaggcatttgtaattatgagaaatgttaatcaacacttaaggagttaaacaccacataacatacaatttatatcagatctcacacattttgatttaataaataacaatagaaatcgttataaccactcacaacctgccacatcggtatggtgttggacactttaaggtgtcaaatagtaatgctcttataaataaaatcgaaagaaaaattaagagtaaaattctttaatggtaagaaatgctaggagcaccctaagtacgggtggcaatctgggtcaggcacaataatacgacttgaaacatgcacaatataaacggatttgggttggttgaccagtttattaaacgacccgatcattttcgggttgatacacaataataacctatgtaacagtattcattcttaattgtattatatttattacattaaattatatttttttagttaaatagggatgtaaacatgttagattgctcacaagtgtgtcataacaagattgtaaacatgttttaaacttgttataaacatgttaatgaattggtaagtttactaaaattaagcatgattatttatataaacgaattgagtttagttttaagtctttaataatttgacacaattaataaatgggtcaggtttgagtttggcatttacttataataccaaagcctcgacacaacaccaaacgaacactaattgtcaccctaccctaaggtatataaggggttgctaatggagtgatatttgccacatgtacaatgtggtcaacatttttaaataaactttatcaatattattgttcaaaatgggctaggcctatttatcccatccgcatttttttggtcaaatttatattttggatttaattcaatccgcataagagtttaaaatcaatccaatccaatccgcaatagtgcggattaaatcagttattttgaatgagttattttttaataataaattattttatattttataaaaatgcaaaaaaaaaaaaaaacga

SEQ ID NO: 318409 - DNA, 570 bp, Cannabis indica
ctatatgttttagatttaacaaaaattgtatattacatcttaaatataaaaactacatgtaaacataaatgacttctaatattctattgataacaaataagattatattaaaatgggttttatttagggcatataatcccaatatttttgtggtatggtcattggacaaaagaagtgatccattttgcgatccattttgatgtagattgttttatgttatatttcgattgttttgccatcgttctttctcatttatttaattttcattaaattttattgtaatatagttttatttattgttatttaatttttgcttggttttggggaggacctacgattattaagactttggcaataagtttaattttaatataatggaaatcacatgttttttgctgagtgttcttagtttcttgctattagccaaagggttatatttttggatggttctctgtaggtttttgtcgggatttcgttctctttttgtggttgatttttaatttttcagttaggtatttaaatttgaatttagtctattaagtttaattcaaggattttcttttctaatac

SEQ ID NO: 318410 - DNA, 804 bp, Cannabis indica
gtatcaatatggatgctgccatcgagaataccatgaagacttgtggttttggcatagtcgtttgaaacttcaaactccttcgaagatgttattgcctttggtgcttggatagtgtcacgtattgtctcccttgagattatactgagagccttgctatcaaaaatgtcatgtctcaatgcgtcactctaggactcaccaatgtttaactagataccgacaacaaaaatttagtttacaagcttaataatattttttattttagatttttcgttagatttaattcttaatgatattagatcacttatttttattttttttgttgtgagttttaattattgtccgagatctgttaatgttgttgattctattgcttagtttcctctttatggtacaagtataatttggtagcttagttatccaaattatattaaggaccttattttggttgaaactttaaattaatgaatttctataattctcagccgcttttcgctcttaggtaatgttctctgaaattatcttttcattaaaaaaattacaatttttacactaacattgataactttaaaactaaatatttgtcactttagatctccaaaaccaaagatgatacatgataaagatcttaaaatggttttgacttgcctcacttgaaaattcatacaatgatcattttcaattcagtgtagaaaaaaattccacgtttctgagatttttttttccaagtttatccatgagaaattagaataaatatattgagaattgttaccaaactagagaaatttgattttctatacttagaaa

SEQ ID NO: 318411 - DNA, 526 bp, Cannabis indica
tttcctttttctttcttttgtttatttgcgttaagacaaccttaatatgtggctacattactaattatttggacttaaaagtactactactgtaacttattttttgatataattattttaatatgtgaaaaacatatatttctttaccgtcatcaaataaaatattcaaaatcaaaaaaagtcctttgtagtttattttatattattgctaaatattattgaaaaataagacagtaatttttttattttcaagttatatatgtaagatttgttgatcaagatataattatatttttttaatagcaatttttatgtcatcttcaaatacattaaaaatctaatgagttataataaaataaaatttaaaaaaaaaaaagaattactttctatactatttttaattttttttttcaaatttacgattcgggttgtttttgtagctagtttctccggtagtttctatgtgggttattatacggattttagttgcgatttaagttgctccgttaattgttatagagatttc

SEQ ID NO: 318412 - DNA, 747 bp, Cannabis indica
atgaatgctcgtcgataaggttatttccatgaaagtttgaatttaaccagtttacttttatttcaggatatctcacttatcaaaagtaacttgtaattaaggtgtgtgtcacgtttatatgtagtttataagtgcacgttgataagatcacttccatagaaggtaaacttttccttttgtttgtcaggtaaaacccctgtcgtatttggttaaagctatggctatatttgattacacaaagtagtgtaaagcacttagcaatttttcacataaataagaatgtgaaatttcaatatattaagagtgtccaagaacattggaaacatttggagatgtctaattgtggtatttccacttatttgaaagggaattgtcgcgaatataatgttttttcgaaaacttgctgcctacgagtttgagaacaaggattaaaacatgtctaatcattttttttcaaaaagtgacgagtaacatgtcgcctgtggctaagcatatgggaatttcaataacgtgttttagaagtttgaagctccaaaactttaagcaaatgttctaatctcattagctgaacttgatggcagttcttacacgataattaataaaagttattaaagttagggctaattagcaatttttttcctcgaattttgaaatatattaaattatgccccctgaattttttttgccattaaaaattttccctgaactattgagattattaaatttaaggacttttgtctattttta

SEQ ID NO: 318413 - DNA, 1242 bp, Cannabis indica
atagcaaaaacaaaaacaaaaaaatatctagtgactatccaaccaaaaaaaacaagaactaaaaaaaatagccacaaaaaatctaaaaaaactaataaaaaaaaagaatgccaccaaaaattcaaaaatatcgatccaaaaagtaaagtaaaagagtcacttgtgattagggatagtgagccataaaaaaagtcacttgtaatcgagttgtctaagatagagaacatataaaatagtcatcatcttgaccttccatagtcaattagttttgaaataaaactttatttatcttatttcaaattctaacatgtacttcattagaaaaataaaaaaacaccttatattagtcgacttcattgccaaaataatgtagtgtaagacattacgtgtcattgtgtcacagactcacaaataatataaaaatgtatgttttgtctcacattatttctgtagaagtgatttgtgagatttatattatacgtactaagcctcaatctcatcgtaaagttttaatgatgggataaaaactatttcactgtgaataaatctataaaaaaaaatgtccaagaaatgtcaaaataagctcattttaacgtattttggagtttgctacatgttttattatttttgtttggtgtgggcagtgggtctaaagaattggcaatcaaagtaacttttctcccttattttcttcttttttaccaaacaaagtgaactaacaatagtgaatctattgaaggatgaatgaattaaggaatgttgaatagtgtaatctactgttctttttattcaacatttcttaatgataaaattattattttcatgatttttaagagaaaaatttcattttacggtaagaaaattaatttcaaatgtgtattggatttttttataatagatattcacaaatatatatttgtaaacgttgtttataaacttgtacttcatactttcatagataaattttgtatttttgtaatgcacaatatttttttattttttttaaagtatttttgaaaattcaccttcctctttgtcctccattccacctcaccacaccaatagttaggtccaactccacgtgagaactaggcctctctcttctaaattctggcccattaatatttttctttaagaaaagaaaggtaaaataggggaaattttttccttaaacctaaaataccctatattagtaaaataggacaatatttacttacattacccctgttggaaattatttta

SEQ ID NO: 318414 - DNA, 535 bp, Cannabis indica
tcatttgggttcgatccaatttcggtccgcgcctaatttttatgaccttaacccgtaataatttgtcatgttgtcgtattatgacctgaattgccacatccctaatcaaaagtaccaatgtgcaaaaaagaaaattatatatataacctatctaatagtaatatctacatgttaggttattattatattccaacaagaatataactcagtgtattattttatataatttaaaaaaaaattattaatccaaattgttatttaataaataaagaggctcaattgaacatttttacaaaacataatatttactttgtttttatttttgttttgaaaaaagaaaaaataactaaattgtcaaatcttcccttacaaaaaaaaattgtcaaatcttcattattaattgtttagatgaagttcatttattggtgccgtttggtaacacttttgttttctaattttttaatcacaaaatgaaagtaagatttttgtttttaaaaattttgcttttgaaaaataaaaatgcattctgtaacca

SEQ ID NO: 318415 - DNA, 947 bp, Cannabis indica
ttatttaagtttttttttttgtatatttatttgactataaaattgttgtggtatattcatattactctaaggtataatatttgtatgttatattatatatcattaaggaaaaaaataaaaataaaattaaaagattgcctatcagtaaaagtaaaaaatgacataatactcatattactctatggtatattatatgtatgttatattcatattactctaagatatttttataataccttttatataatgaaagatgttttaggtattaaaaagtaaaaaggacatttgttttattatttaaaaaaaaaaaaagacattaactatcactaaagttaaaaatatgactatttacttacatttcccttttcttatatttctattttaagcgcaatgaactcaaaatcatgtaatttttatttttgttatatttaatcattcttttttatatttaaatactagttttaatttaattatcataagtacataattattaaataaaaatataatttaaatattattattaattattacaaaaaatatcttaattaataatccaacttctattctctctttcttctaaatttcgccaacttaatatcttaaaattgataaaatcaataatgtgatttttaattgattaaataaattaattattgtaacctaatattaaacattatcctagatactgtaaggaccatgagcctataaaatcaagctcccaataagtagactcaaaatttgacaaataaagttcctatatacctcatgactccactataaattcaaaattgtactcttaattttatagaatactttatatacataatataaatacactataaattatcaattatttttattatatcaatcaataatcctctatagacactccacaattaaggacaaaaatgactatttgatcatttaatagtattttatctttaaaa

SEQ ID NO: 318416 - DNA, 1152 bp, Cannabis indica
tgggccaactatattattaagagtactttcatgtgcctccaacacataattaagttgtcaaccatcccattatggtgattagcaacattaggcacatagttaatgattgtgtattatggaattaaacctatgattgtatcagtccattataataattccaacattctccacttggacaatacaatcaagccaccataataatgtctattatctcacataaaggtaatcaaataaaacatacacaacatcatactagagcatacatatatcgaccttgtagacattcaattcaaaataataatcaataatcaatccaaacatgcatgaggtacaaaattgaaattatgcgcattatcatgttttgtactcgtcacgtccttgaacaacaacatatacgtataagtatacatatgtaacaacaataaagaagtgatttcattatcataatgcatgttcttaaccaaacacaagccataatcaatccgtacaaaatactagcatgttcaatacataaataacaaactcccactgagcttaacaagctaggctcccatcatggttatgggaggtatgtgttttattgtctttgatgctttaaataaatactagatcttggctttaatgattatgagtatcgtttttcaacaatcactcccaaaaattgttgaagtatttgactttacaaaatcaaaatgggtatggaaagatctttgtatttgttctttgactattaatttgaggttttatgtgattctgaagcttcaagtattatttaatatttgaaattttgataatttgaaatatgtatttatatgctttttttactctaattaaacttatgaaatatgtatttacatagtaataatctacctactacaaaattttgatccaaatattattatgaataactcaatttgtgatctgagattacattttggagtcttatagactaataatgtcattctctttagagtagattcttttattattatgtagaaataggaattgaagcggtattttattggtactcattactatgcatcccactctaagcaaattgctatatatcagtataaaataattaatgttataaaataatataaaatagatgagaagaaagaagaagatgaagagagaaagagaaagtgaatg

SEQ ID NO: 318417 - DNA, 842 bp, Cannabis indica
aacatgcacataaggatcaaagccctgtcaaatagatgtgaaagcacattcccaatttccataaacttaaaatatatgacagccaaagaaagcaatgtacaaatttgcaacctttcaaaatattcccaaataggaaatcagcaagctgccttatcttttctgactcatcaacaagcgagagaagaaatcttaagaacagaactcctctccacttcacgtagtccctctaaataaaggataagtaaaaaacatgaatcggcttctgccttgtcgttaatcatcaacttgctaagtaggaagaacatgagagaacaataacatacctgcaatagtcttgaaagcagtgtgaatgtctgccttctcacaagttcacatggatcgcggagacattttgtgatctttgttatataactgttgatggcaatgcaaactagttagtggaaaataagaaagaaatataatcaaaagacagttcttgttggctagcttagtgtcaaagagaccatttgaaattacttttaaagtttcttaccaatcaactaaagcagtatggtgaatgcaaaaatctgccatgattactaccaagttattacggagggctgcacagtcactcttctcaagctcctacaagaacaaataccttgaaattttagttaaagaagatactaggtactgatgcttagtcaataagtgtaggtgccaatcaattagagcaagcatttttttttacaatgaatatacatattaacagctgcttgtctccataagttttgttattttaatagttttgattgtatttgtgagctatggcttggaaattaaatttattttctttttttttt

SEQ ID NO: 318418 - DNA, 1062 bp, Cannabis indica
ttttatatcaaatttttatattacaccatacaacaatttctctatctttcttcttttgatatttattttaattaaaatataagaaaaaaataataaaaaaagtaattagtaggagagagaaagaaaagaaattacaaaaaaatattattaaaaaaatgtttgaagaagctttaaagcttctccacatgaagagaagatttaaatgatctctattttaaagaatttgtttaagagagctagtggagcttggtttatgtcattttctataaatttttaaagaacataaaactttaatttttttaagaatcataaaaattcattttgttaacttctaagtaggggtgttcctactacgagcgatgtaggttgtaacctactttttaaaccaaaccgcatatatagtttttgtaatttcttaaactgcaactataccgcgagattttaaaactgcaaaaatatattgtaaaaatgcagtgcagtgcggtttgattaatttgtactattatcatcttcaaacattataataaaaattcaaaaattaatcttataaattaacattaaaaaaaaatcaatataaaaaagttttaaagtcattacatacatactaatcttaaatcatcatattaaattgtatctaaaaaattatgtaatatattacatagatttgatcatatatttaaaaattaaaaattatattataaaaattaataacttttaatatatagtgcggtgtagttttagtcgtaattattaaatttaaaattataaaccgtactgcattgtatagtttggtaaaatacaaaccaccactgtaccacactgtattttttatgcagtgcaaataatttgtgcacattgaacgatttgataaatagcccatgttccaagtaagtgcaaataaaaataaaaattaggtcaaggtaaaagtaaaggtattttattaatatttttctctttttttcttaatttctaagaaaagaaaatttgttataaaataatataaaataatataaagtagatgagaagaaagaagaagatgaagagagaaagagaaagtgaatg

SEQ ID NO: 318419 - DNA, 1444 bp, Cannabis indica
tttataaagtaatcatttatgttattatttaataagataacgtgatgccctaactcgacatctacacatatcttgttgcttaataagacaaccatgatgccctatcttggcatccacatacctttgtcattatctaataagacaatcgataagtatgaaacctaacagtggtttcaattgacgtcatgactttctcttgcttaacggtaatcaccgtatcttgacctcgatcataatcgataatagtcgtattgacatgctatgtggtacagatgtactttcttacctcaagtttcaattcaagtatgttagttgacccaaaatggaaaaagatcaatgatcctgtatcctatgttacaataacaaaaaggaaccgattaatcaacttgacctaatccgttctacatctttaattcatcaccataagttctcctattgataaatagcatgtcaatatcctaaatatttagaaaatacaaaattttggtccagggataagtcccaaaacggacggttcgttctaaaaacggtcaacctattttagaaatattaggacggtatgaaattccctactcgatcttaaaatatttataacttactcactattaagccgaatcttaccaaattttttaaataacttgtatacatcataagaaacattttttatgaagaaaccttagccgaattccaaacaaaaaatcaagttattaagcatgagccaagtttgagttctttaatctgaatcttgcataacttttactacaaccaaccaaaacacttcagaacaattctaatcagtcctaaacaaccataggaagcctttcctaatgtccctagacttcttgaacaagtcatacacaaaacaattacttaaaaccaattaaaaccctagaaaactaatgaatttgggttaggttttaccttagattgcttcataggatggaggagatgtttcttctagctatacttagctgaaataagcttcaaaaatggaggaaagcttgctggtttgttctggttttagagggcaaaaaaatagagagaaaagatgaaaaaaaggtgagttttgacttttcttttcacttttgaatttctttttgttttaattctattgtcaatctttccaagttgctggtcaccataaatttggtgagtcacaaccactcctcactcaaaaataaggtgactaatcaaatgacaacgtttttcttaggtaacggaaaaacaacactttgtattgttgtaaaaaaaaatcatgttgctttcctgtagtagcaatgtcaaaacaatgttgtttaaaaaataatactctgtatttttgtaaagaaaaaaaaatccttaataatataaaaaaaatagtagatgtgtaaaaatgttaaaatgtaaattttttgttatttttgtatagggattggtggtaaaactacccaaactttatattttt

SEQ ID NO: 318420 - DNA, 708 bp, Cannabis indica
atattttatttatttttatttaatttccaaattaatcacaaccattaaatagtaatctaatggcttaaaaaaatgtacctatgatggttacaataaaaatgtaaccattgaaacctcttccatatatatatatatattaatatttttactccaaattaggatctagaacataagtgtacatatataaattggaagccttatatactatgaaagagaaaaaattaatgtgtggacggcaccaaattacctctcttttggcttttgactttttagaacaatctaaaaaagaaaaaaaaaatcaatggtcaatttcataggctgaaagggtactaaactgcatacacataaggccacactggatagagtagatctaaaaatccatataatttaactaaattttagtattaaaatgaattaattctaccttcttatattattttttcaacatcttgttataataataaataatgtcttctttttttcaagggtgttatttaatacgtatatgatattcagcttaattttattgtttacgagagaagataactctcaatgaagttttggttttaactttaggcgtttggttgggaggaatgaaaatataggaatgagaatgagaatgggaataggaataggaatggaatggaataaaatttaaaatgcataaaaaaaaattgataaaaaattattaaattttttacttgttac

SEQ ID NO: 318421 - DNA, 1948 bp, Cannabis indica
aggtgtgttaccgtgattttatatcaactgtgcaatctgttgctattcaatagtttagttaaaaatcgtgattaattaaaactctacttaattacccttatagtgaaagtaaagaacttttacataaactgggatttcgtatttaaaatatttacaatcgtaatataaattatttgatacaaaaagttgttggctagcgactaatctaaataatacctgctatcccaaagattgtacgctccaggtctaatcgtcccgactcatttgcttgcactcactgttgttcatccttagctttgcccttacctaaacatggaaacagcaactgtgagtcgacagactcagtaagaaaagcataagtataacatatacataatccggattacaataagacgcccatacaccaaatcataaccatatcccgcatcctacgcgtactgagtctagaacgtttgtacgaaagtactattgaccataatataaacatatactcagtactctagtcataccgttgtgatagcgttaatcaataattatgccaaacatacattcatcggtatccaatataattctatgtatgctgataccgctattttaatgtaatctaacaatcataaatatgcatataatatactaatcttaccttgtttctgaattaatgtatgtcagtcaacctgagtgcaactactgctcgacaatttacaggcccctaagtcataatattcataaaactgatgagtgatatgctaaatcactttttggggacttaaaattaaaaataaaagtttccctatcgatggataacatgttaataccctaaatattgaaaaaacatgaaaatttagggtaccctaaagtgctctagtcgaaaaattagttcccaatcggaaaacaagttctatggggtctgcctggggaggaatcggtagaccagttctacaggaccaaactgaattggttgtccggttcagtgcacaacccccaaaaaccacaaaaacaactcaattcaaccccaattcacaaaaaactttccagaccacctatacaagtcataaagaacataatctaagcaaaagaactgaacaataacctcaaatacataaatcaccatgagagagcaaagtttgagctctaaagctcaaactttgttcaaacaccacaacaagcactcaattcaacttaaaataactaaaatcatcaaacacaaactttgaaaaattccaataaacctaattaaatcataaaacaaccctaatccagaaaataagcaacaaacctaacttggaacttaagaaaacaaagagaaaaaagtgtaggagcttaccttgagtttaatccttaaaaatctaagagaaatcttgctacaacacccagcaattgaatcaacaaagccctagctttcagttgggttccaagaggtcgagagggagagagactttaagagagagaaagctatcttattgtgttgatttttctaacttaacttatttgatatttctaattaataaagacatacctactgttattcagttactaaggaaataaagagaatattcttaaaatttcactaaggacaaaagagggtaacttatcaatttgtcattttcttcaccaaaagtaatcttactattaaagagaattttggtcaaatctaaacctcaaatattcttgatgttctcaatgtctatctaaatcaccttgacatttttaaaatactaaaccataagtaaaagtgactttattggccaaacatcgcgttctaccattaccgagcataaaatatgaaaaccataaaatttcacatgttttattattagcacacctaaaattaaaatatatctccaaaatcataaaaataataataaaaagtccatttatgaaattaaaccttaatcatttctagttcttttattaaagttaagcggtcattacaatctctctctctctc

SEQ ID NO: 318422 - DNA, 1505 bp, Cannabis indica
tatatatcacaaaactggataaattaatggagagaaaacgacataataataatacattggcatgaattttcaaagcccagtttctgagttcgtcagatatagaattaatgaaatttctgtagactcataatttatgtcctttgcaaaaggactcataatacttaattcacctcaacaaatattcaactcatttctatctttttctcttttgatttttctttagtacataatgtgtatatatatgagacatgtttcatattactgttgtcatttattatactttcatggttttaagattgtccatgtgaaactttttacatagtctgcaaaaatctcaaagtaaaatactatattttatgtatatatatattaattatactctgattttgtttttgactgattgatattgaaagatacataaatcccatattctggaatctttttttttctttgtaaaaagtaaataagtcttttgatgaagaatattgtctaaactgcaacatttttttaggctaagaaataatatataatatatattattataggtgttaatgtaagtctgtaactccatcactttgtgtctgctcctaactttaaagtgagaattagtaaatgatttatttatttatttatcttctgattttttctatatttttaagaaccatttttgcattaaaattacaattaaaaagtaccatatttttttgcttatatatatcttgagtttatgatcatgatgaagtctctagcttcttatatgctttttgacttaatttttcacttttttaaaaacattattccacatagccaaagatgaaagaagcatttagccattattatttgctcaacaagtttagaatcatgaaaatgggccatgattatcaccatttcttctttgaatagcctttaatttatgttgaccacttttggagttcacatattctttttttttttcctaagggtttttgtttttgtttggtgattggtgttaaaaaatttgctcttagggaaatgatcacttgaggttttaaatttaataaaatattatcatgtatcaaattaatttgttgttgttggttaatcaaataatcaaccttagtttttttttttttgtctggggaaataattaacctaaactatgttgaaaactagaaagttggtttttccaacaattatttaacactcatggttttttttttctttcaattgagtcaataaagttttaatagtaacaattaagtcttatatatattcatcaattttattttatatacaatataattaacatttttatgcttcaatttattagtacataattagagagttggtaaaaattaatgtttactgttgtaataatctcttaatccttaattatcaatttataatggattaattatttaattataaatttgagatcaataactaaagggaaatttcattttttgcccttaataaaacccccaatatcaaaatttagaccctccactaatttgtacaaattaatt

SEQ ID NO: 318423 - DNA, 3079 bp, Cannabis indica
tctttactcagaaagatttgaacatgagacaaaggcgttggttagaattagtgaaagattatgattgtgagatcatgtatcatcatgggaaggcaaatgttgtggcagatgccttgagtcggaaaggacctgatcagactttcagaatggtaatgatctctcctcagttagcctcgcatatgtctagggaaaatattgagtttatgatcgggaaatcgcataatctgacacttcattcagacttgttagagtggattaggatggcacaactagaagaccctgaactgcttagaactcgagaagatgtcttagcaggcaaagccaaggacttttcgatctctagcagtgggatgttattgtttaaagctaaggtgtgtgtttcgagtagttttgagcttaagaaagaaattttggatgaagcacacagtaccccttactcactgcatccgggaaccaccaagatgtatcaagatctgaagccctatttctggtggtactggatgaaaagggacgtcatggattatatgactaaatgcttaacctgccaacaaattaaagcagaacatcagcgaccagtaggattacttcagccattatcacttccagaatggaagtgggaggacattgcgatggatttcgtggttagtttacctaggaccacgggaatgtacgactcagtttgggtcatagtggatcgttttacaaagacatcgcatttcttgcctgtaaaagtaacatatacagtagatcagtatgctgacttatatgtgaaggaaattggtctccttcatggggtaccgaaatctattgtcttggacagagatcctaaatttacatcaaagttctgggtgagtttacagaaggtcgtgggtactagtttgaagttcagcacgacctttcatcctcaaacagacgggcaatatgagcgaactatccaaatagttgaagatttattacgagcttgtgtcatggattttggaggttcatggagcaagtatttgccgctgattgaattctccaatacaatacttatgaaattaccataggaatggctccctacgggctactctatggcagaaaatgtcactccccaattcattgggtaaaacaggagaacggaaagattttaggccttgaattagtacaaaagacaactgaggcaatagacaaaattaaagctcgaatgcttacttcgtagagtagacagaaaagttatgcaatcctaagcgccgggatattacatttcaatcaagagatcatgttttcctgtgggtatcaccaatgaaggcaatcgagcgcttaggaaagaaaggcaagctaagtcttaggtttatatgaccttttgaaatacttgagaaggtaggacatgttgcttatcgattaaccttgcctccaacgttgttagctattcataatatatttcatgtcttgatgctgagaaagcacgtgtcagatccaatgcatatccttagttatgaggcattagagttacaaccgaacctatcttatgatgaacaaccagtgtaaattctaaatagaaaggagaaagtccttcgaagtaaaaccttaggattggttaaagtgctctggaggaatagtaaattagaagaagccacttgggagctggagtcagacatgagggctcaatatccagagctattcaggttagatttcgaggatgaaatcattttaatagggggataattgtaatgacctactatgttgatatgttggattatcaaataattatggtttattcatgagatttaattattatttacaatatacatattgtggagatttatttaagtttaatatatattaattatgctatatgtgaatttttcgtttttgtgattgtgttcggtatcggtggaaagtgacgttgggctattagagattcacgttttgtgtgtgatatagaattttattaacagtgcatcattgttagactttagaaatgtcagacattaatggggattgttaatgactaaaatacccttggatgatttaaatatctaagctattgatgagggcaaaagggtcagtagataggaaaccctcttttttcttttatggactttatagtttgagtattagattgattttaataaaagataaaatgagtttatttcttaaatggaaaatgattagaaaaacctagaaactaatccctctctctctcttcctctcgaattctctaaggaaccagctgggatatggtttttttcaactactattgagtgattctagtaggtcttgagtgttgtgattcaaggtaaatccatttagcttctcctcttttgagttctttaagttcaagttaactttaatttcttgaattttagttctaggttgctgtgttatgaattaatgtttattttggtgttctgaagtttctttggcattgtttaagttaatttgggttggaattgttaattgtgttgaggtttgagcaaagtttgagtttgagaactcaaaccttgctctctaatgatgattttggattttgtgttaattgttaggttctgttgcttgattagggtttgttggagcatatacatgcattctggaaatttttggagagtttgggcttgatttgagttgtggggaacatttttgaggttcccagcactgaaccgctcgatcgattcaggggagcctgtaacaaccgatcgaccagttggtccccaggaaccggacttccggttgggaaccggtctaccggttgggccatttttcagaacactagttttccccgtttttgtgttatttgggatattaccattctaattgtcgatagggttatttttagatttaaagtccccgggaagtgttttagcgtctctctcattgaaattacaaatgttatacgtcaagctgtaatttcactcaggctgactggcacagttgagcaaggaagcgaggtaagataacataaataatatatgtgtgaatgtatgcttgttactaatggtttacactactaacactaacagaattgtgattttaagggtgttagtacagtgtaggattttagggtagttacagtgttaccaacacgagtaccagggggtac

SEQ ID NO: 318424 - DNA, 1238 bp, Cannabis indica
ggtcttgtcctggagccttaaccaccttctttttccacaaaggttggttggaagtattcatgctccatggtgcagtgggagcagtctattttgttggttctcccataacaccttttccttcgttccttgcaagatcagaagttctagggtcttttgagttgtttttcttcgtagctttactttttggaggagtagggtcatctagaatattatcatcatgagcaacttcccttgatttaattctggcctctagtcttgctagagtatcttacatttgacaggggcattcctcctgattcgccaacttcctcttagttttaacgagttcttcacccatttgagcgactatagggtttggctgataataatattcctcttctttatcttttttatcatcttcaagatcatcgtccttaggatcatcttttcgatcttttgagtcatcttcaatgatgggacacttatcaactatttttcaatatgttgagtcttattggcaggaagattgtcgcttctgatgggtatccatcaactcctgcttttgcctgagtagtaggattcacatcatccatgggagtatccccatcacgaataccagatttatcgacggtgattcgggtggctaccatggtcgtagtatacaactttattggcgtcacttatttcttcagctctcaatgaaagcaccaaaatttttatagaaatattaagaaaccataaaatataataaagcttaaagaaatatattatacacgaagaataagaccaaagtttttacatgggtatatgattaatgatctctagtccacgagtccatattattatgataggattggtgattaatgcttaaatttgtataatttatggctttaattgtatacataaaattattttgagtaaaatattttcataattttatttgtaaaattatttcaattgaaaatatttagtttactttaattttatgttaagaattgaataaattggtataaaggaaaataaaatctcaaaccccaataaattttacaaaatttatatcatacattaattaactatatgtctatgttgaatttcttgcatttgggcatggactcttcagcagagatgtcactatgtatttacatgcttaattggtgcacacatataacaccctaacaagcgtaggcgtgttagcgtaattttaaatgtactgtgcagctcgttgctaatcaacgaggttattaaaattcgtgaataat

SEQ ID NO: 318425 - DNA, 2263 bp, Cannabis indica
gggcataaaacccaacacgatggtggtacaaactcgcaaaggagtggtcgatcaggtggatctactggcggtagatcctgcactgcagactccagggaatgcaaggatcccaccagccactaatcctgaacaaccaaacatgcaaccacttaccatggatcaaggtgtgacatctccttcagctagaataacacccggtgtgcatgagactggaaacaccagtttagcagccgatctggttactccaatcaatgggatcccttcagcaacaaatgtctagacaaccattggagatgacacaaacatccagaacctctgtaattctcttgggctcatacaaggtcatactaatactttgcatcatgatcagggagagctccgtgctgcaatgaatcttacgttcaaagagcaaaggcgtcagtccaccgaatggagggatagagagatggaaacgttgaaggctcaacaagcagccattgacgactaaacaagacaggccaccatattgatacaaagagcctaccatgttgctaatcagcgactacgttcgacatctcgctaggcagttcgaatgaaactccagctgggcatactgcccaaactctgaacggtcagctacccaattcccggtcacaggttcgagttgtgggccaagtggtaggcggtgttatacccaataactctgtccagacaagcagttttggccaaatgctcatccaaaccaaccactcactaaggaaacctggtgtttccgtatataatagactgggaacagttcatgatcttagggatgatctgaagagaaggagagggttagacgaacaatattttcaaccaatcactcaacctaggtttcgcattcaaaatctagctcaaagagatcctgacgtgacactgatcagccaagaggctgaacaagttcatccatccttgcaagcacagttagatgaactgaaaaatatgttccaaggcctggctgatcaaaagctcaatgatcttgagttttatcgaggacgtggatccccatatactccagagatcaatgttcaagaactacccctcaagttcaaaatgtcgacctagaagatgtatacagggaaagaggatcctttatcacatctcaagtattttgaaatgcaaatggacttgcaaggggtacgaggagatgtgcgttgcagagtcttccctacgacactttcagaagccgctcaacaatggtacttcaagttgacaccgggaaggttcaactcttagaaggccttctccttggagtttcatgcacaattctcttcttctcatcaactcccactacatttagaagacgtggttgaagtaaaggaaagaccatgagagcctctctgagcttacataagcacattcatgacagaggcaaaaaaagtagcgcaattaaccgaagaagggaagttagctaccacactggggggcatcgagattctcggagagttgtgaaaagatatcaagaaaagcagtccagaagattctatcagtggttttctcgaccgcgcaaatggtttcatcaagcttgaagaagcaatttagcgagcagatatcgaacctaaaccgggccaaccagaagctcctttagctgcaacgtccgtccaaaacccgagtaccctagtagttcaaattcgagcgttaaaatatctaacaaaaatagcagacaaggcaatggaaaaaagggaaagttcacaggcaaagctgaacagacccctagagagaatccttccaagttcattggtttatctatcttgactgacgacttggagaccatctacatggccactcaattagtagttccgtaaagaaacctactcccatgaaagaggacataagtaagcaggacatgtcaaaattttgccgttttcatggagattattgccatgaaaccaatgaatgcaacaatttgaagcaggaaattgaattcctgataagaaaaaataacctgcatgtgcaaaaagatgtcaaggccgaacaaaatcaacgagagcccaggcagacaataaccaagatttgttactgcctccaccactagacaggcatttgcaagtcatcattgggggcccgcatatagctggagattcgggcaaagctcgggaaaggtatgcccaaaccttcaacacgccaaaaagaagtggtcttggccgtagaagaatggaagccaaaaataccacgggtaggggaacccacgtataacattcagtgaagaagatcctgtcaaggtcgctgcacgcacaatgatcca

SEQ ID NO: 318426 - DNA, 3255 bp, Cannabis indica
aaagagcgaagggaccactctagtgattcagtcaatcaagacggaaggacaatcgtgggacattttgaggacatctggtccactgtagacctctgacaaaaattagacgctaggtatgagaagtaaaaaagtgagaaagtaaggccacgtggaggtgaccttaaaaaccacttgagtgataagatgagggggcgtgatctccccgagagtgacacaaagtgattggaggagcagatagctgctctgaccaagttggtcaagaaataaagtggagctctctccgattcagaagatgaagatccggaaccttgtgtaaggaggatcgtagagaccctacttctggaaaactttaaaatgccccacattgagttatatgagggaagaattaatccataagcgcatttggcaatgtataacatgatgttgcaagttgcctgaattagtaacgacactgttgacctcaaaaagtgatcaaccgacagcggggttatatggatttgatgcttgccatgtgtttgcacaaatcaaatagaaaagtaaaaacaaacaaattttttattgaggtttggcccccttagatagtgggtaatgacctactccccctttggttatattgatacttagagataatactacttagatcaatataggtggaatcagtaggcagatctctaatatgagagtgtgattaacttagaggcgtgtgagagatgaaaagaggagaaagcccttgggggcctgtagtagagagagagaaagagaaagagaggcaaaggtttcttacttagagtgattttgaggcttagtgacttaggtttgtaggctagggttaaggcctttatataggaggcctaaaccctagattacagtttaaatccctagatatttgcataggttgttggataattataaaagactaaagtgaccttcaatttagatattattcagccattttgtttggcttttaggacccaatttgcagccaatgatttgctgcccacattttgggttgtacatagagtccttccaggttaatcctagccgcccatagacctataaggaaggtatggctgcccaaggcctgcaatatctaacaagtcaaggcctgcaggatctggcaggtcaaggcctacaggatgtggcaggtcaaggcctgttggacctggcaggtaactatagctccaccaagaggagatcagctttttgcaagttgaggacagctttatacacaatttccttgtagaggccaggttcccttggtcaaacggatgcctccttagtctgaagtcacttcttggtcggccaacttgtgcacagatcctcatcggcctataggctcaccctggctggcctgtaggcttctttcggctggccagggatgttggtacaactccttgagtgctcgcttcactccattcaattactacttgacggttttgctatatcttgtatggaggccctgttctgctactaacagggttatacttcacctgtactctatctttggcttgcgtggacatgccatatcaagtggataaaatttgggataacattttccccccaagtccattcctagacctaggcgattaatgataggccttaaaacaacttgctcccagatgtttcagagacgaattttgctttgtaggccagccaaaggttggatgagtggggtgttaatgagctagagatacctggtcgaccccccatgccaccagttgccagagtctagctgctcccgccactaaatttgtgtggcaagacttattttccttcaagaagtaggcagtctgcccttgttcctgaagaacttggttagactttttgcctatagaccctgcccgatctgttgatcaatctcccttacaggggatctttaatcagatcatgacctctcctggcagttctttcattgaactgccttataggtcactagcttccctattacggcagtccaactctgcctaatgagatcaaaagatatagaaagtcatgtctctattgtgcaaatgcatcgaaaccaacggcgtgtggttcttcggtttggccgatttggcatacaggctctctaagtgaggccaattcaaagtcttctcccaaatccacatgaggctaaccaattgctggttttgccaattcctggccctatttccccagcataataccagggaccagagtcagtcgtggtgcatgggggctgctccacattgacaaaaccctttgtatgaagtgccaatggtacatctaccctaggcgacagaggctgttcattgggatcatctagttagcagggtcgaccagaccagttgtgttggttgagtttgttatgcttgccaggttggcaagattggctacatccgtaggattcatggaaattctagtggtggctggaacgtgaacttcatgatcagcaatcatggggtcttgaggaagacccagtgaagaagaagttatagttggagttctctttgttagagccatggtgattgatcggatcaatagacaacgctctcaatgaacgtaccaaaattttgaccacaaatttggcctacaggcagcagagtcctattcatgatcggaatcaccatgtgtaaacaattagaataagtaattaaatggacatagtaaattcgtagaggtgtggccctttttgttaatgggtaacgacttacttccctttttgttgtattgatatgagagataataccactcagatcacaagtgttgtgggttctagagtggctctctatgtattacaatggtgagaatgtaagacagatatcaaggagatgagatgaggaaaacttaatctctacaacactacaagtggcgtgcagaagagagggtgagctagggttttgagtgcttgaacgcaagagcttaggaatgagaactcaagagcttgtaggtttagcctagtgctctttatattggagagagcttacagaagatagtaggttgatatcccttaaaatgaggagatagcacctatttgttacatattaaataaataagaaaataacttattaattattcctaaagtataggtaaataactgaagttgaacctctattttcgtgggttgctgaagcaaattcgtaactgagagtgtctgtccaagttaaaagctgcatagacaccaaaagtgtctgccagaagagaagcctgctggcctaccacttgctagaggttgttgtaaagcccgcttagttaatttggaaattatcagttggttatgtttaattatgaaattat

SEQ ID NO: 318427 - DNA, 961 bp, Cannabis indica
ttagcttctaattaataatgattaaaaaccactcaaaatcaaagtaaaattaaggaaataatgcatattcaaacaaacaaagcaaagaatagctactgtttttcgtttttacataaaatatgtaattaatttcactaaaaacatttggcattatagattattacctgttaccaagaatggaatgaagatgaagaataagatcttgttcatgagacgaaaaagcgccacgtttaagatcgggcctcaagtaattgatccaacgcaatctacaactctttccacatctttgaagaccagcatttctagcaatgtcactccaacatccttggccattcctcaacatgtatctcatcaatttctcatcttcttctggtgaccataacccttttctcaacttcacattctttatcatcttattattattagtatcattattaatatttaataacatgtttgtattataatgatcaacttgatcaggattgttgttgttataattcttcatgatcataataatatatatatatataggagaggaatatatatggtaacactagagaatagtgtagtatatatatatatatgaaatgtatgtatgtatgaaaatataagagagattgtgttgttggttgtgtgatatgagttggagtgggaaacggagtgggagggggacctcaattgatcaagagagagagagagagagagaaagattaatattatgtgaagtggaagcaaaagtgtagctgtctcaaatagaaagatgataattaccttctcagtcaaagaaaaatattgcatctctatatatatctatatatatatatgccttaatttatatatatataataaaaattaaaataatagtaattttgtcccttgaactatgactaatttgttgtatttttatcccttgtagtttttatcacttgcgtaaaattctcttcgaattatgcaaattgtt

SEQ ID NO: 318428 - DNA, 698 bp, Cannabis indica
aacagtttagtgctttcattgaatctttaataattaaactttgaaaacacatcgtcctacctaaaaagaaaaggtgttttctatcatggaaaatacttcttaagatattcctgctgaacaggaagaaaccattcattgccttggaaaagagccccaagggacttaaaggactcaatctggttatccaaaccttagaagacactacaaaaaattactagttttagtgcaattttttagtcacaacataatttttttgtgactgaatgtgacttttatagtcacaacaaaatgttacttgtgactaaaacatagtatttagatacaagttgtcactaattttattttagtcacaacaagtattgtgactaaaaatacatttagtcacaacaaattgtaatttttgtgattaatatttttagccacagattttttagtcacaacataagaattataatttataattagtcacaattttttcacttttagtcacaaattttattgcgactaaatgtataaaataatatcacatttcatatataatcatctttaaccttacaagaaaaattaggacattatgctcatcattccagtaaaaattctaagaagaaatacgtgatattttgtaaatactccaactctttattatttattcataagtaaaatatgcattttcagctttatagataaaaaaaaaaaaa

SEQ ID NO: 318429 - DNA, 814 bp, Cannabis indica
cattaatggaacacaaaagtactaacctcggcagaagacccgcttggctctgttaatatgattctgggaaacccttcagcttcgtttactatatttaacggcataatcgttttgagacggaaagtctctttaatactactcacaattgggttcactttcccttttctcttctccagctacaacaccagaaaatttttctcatcaaccaaacaaaaacacaaaacttgactcactcacacacatacataataaataaacaaacacatattcatcatgatcaagattggttttttatgaaaacccgtttctctcctaaccaaaagagaaaagaaaagaaacagaacataattttatgatcgaaaggaaaaaatgggtcgtataaagcttacgttggtgtttgtttttattgtttttgtatattattaaaaaatgttatcggtttcgagtaaggaaaaattaatattaataataataattaagaagaagaagctaggctacaatagccaccaaacaaaaaccaactctgggtttcgtgaaaagtccatgtttatacaaccatatatatatatatatatgtaaggagagagagaaagagtgagtgaaaaataagaatggatatccatggaaaaagaaccaactatactttcttttggtcctcggatgctctggtcgttgtccctttcagttaacttctataatcctctactctccaccacatactattacctgcaccttatccaatatcatctcgccacgtcagctttctggaccaaggctgagattcctcaatctaataataatagtattttttttt

SEQ ID NO: 318430 - DNA, 1687 bp, Cannabis indica
ggatctccttgtctcaaaccctggtctcctttaaaagatccctgtaatcttccattcataattagagtataagaagtgtttctcacacaaatcataatccaagttatgaatttagcaggaaaacaatagagattcagcaacttctcaagaaaatcccaattaaccgtgtcataagcctttcttatatcaatcttgaccgtgcacctaggggaacaattcttcctcttatagttcttcaaaagatcctggagaatgagaatattatatgctattcaacgaccttttacaaatgcaccttggttctgattaactaaagtaggcaacactttagctaatcgagaacacaatagcttggagatgcatttgtaaagtgtcgtacaacacgttataggcctgtaatcaacaacttttgaagggttttccacttttggaacaagagaaagagccgtgttatgaaggtcaaaaagaaattgatttgtttcaaaaaaatgattaatagctctatgaatttcctttcccacctctggccacatagatttaaagaacttcgatccaaaaccatcaggccctggagatttagtactaggaataccaaacatcgcagtcttaacctctttaagagaaaaaggtttcaaaagagatacttgttggtccaaagtgaaaatagagcccatgtctatacaatcctactgaatcagcctggatgttggtttctctttgcccatgatgttttgaaaatgattaaagaagtgttgaattaattctggaaagtgatcaatcaatctcccttgctctgtggtaaaagagacaatcctattatcgtctcttcttttcttgagcatcgaatggaaataggcagtgttagaatcaccctgctggatccatttgatcttgctcctctgacttaaaaaactcaagtacaacttttcctgatgatgaaactgactagctgctgtcttctctctttcaactctagaactgtcctggggggctgcttggagttcggactgagcttccttatactcgaccttagctttatcataggagcctccaaaatcaccaatagaagttttgttgaaagccctccacttgtgtttgagtctcatagttttaaagaacactcctgacaaaccatgacttctaataggcctactccaactatccataaccaattgtttgtaatctttgtgatcaatcaaaaaattatagaatttaaaaggcttacatcctataatttctgtattgatcaaacagattagacacaaacaatgataagaacaagtttctcaagtaaaatttgcaatagtattaggaaaatcatccacccaagcctcattacgaaacacatggtctattcgagaaaaaatcctagactcttgtttatttgaccaagtgaaattagaacctgttctcttgagaggactaacttcagcctgcatcaaccagttattagaatctacaagctcagtagaagcaatcggattacctcccattctatcttcatgatggaaaactgcattaaaatcacctagaatgatccaggctttagaaacattaatcccagagagacatctccataattctaatcttccatctatagaattggctccataaatgaaagtagcataaaaatccttttgttgtccaatcatcttaatacgacaatggacatgctgattagattcct

SEQ ID NO: 318431 - DNA, 1570 bp, Cannabis indica
ttccctaagcggtgtgggactgcacagcttacccggtatttccccttacggatcacgggactactgactgtcacataaaatgagtggcaaaaattagcctatggttatgcaccttccattactaatttgctaacttaggcttcctaaaattaacaatggatatgatccattcctttaactaagaaaggacaatgttatttctttaacagtggcgctatggcctagtcatgtagattcgcatcccttgcggctggaaaaactatactggcggatgggtgagactttgactcacagaattgaggaagatcgtggttcgcgggagtctatctcttggccagcagttagggagcctcctttcatagaagctttccccacaaggttaattcccatatctttccgggatactcaatgaacttttgggcaacctagtgacttcttgaccttctttgattaaaatccacgtgtcatgcttacaacaatgcagataacaaaaaccatgattcgaatgtcccaatggttcctagaatgcatgttggagtacttggtctagattccacatgaacgtgggtgtttacttgcctttgcactcatggttcatatcaattatagattacttttgagtttatccttaccaaataaatccaaatggctacagaatcttgtcaacctttttcatcttttaccgcctaaggaaatggcatgtcccaactccccatgaaattaatttcctttgtgacttgaaaagaattcttactcaaaaagagaaaggattttaccacttccatcaattcagtccatacatagagaatgtgaccaagagcaactacgacgtttatcatcaagaatatttttataccccagtctttcaatcaagacacattacctttgagaaggcaggatgttttaagagactcgcttctttgatgactattggacgatgcctcttgaacatgacaaagaggatggtaaaagtgatgtaatttactctagaacaaatggcagaagatgagagttctattcgaaatgacctagaatattcagcaataatatttatgttcttagattaatgtgatggagaagttaattctgttaacaatgtgccagagaatgttggagaatcagtaggtcgttaatactccatatgtagtaattgtaccctactatcttgttttcatgtcccttctattgtactaaccacttcccttttcttctttgcagacaacataagttttctagtagccatggaaacttgttggaagagaaagattattgcaccaaagagactgaacctccagctagggaggttgtacatggtatttgttgacctcaaattcggtcaactgacaacagagtcgtatttatgattgaaatcaccacttgtacacaacaagaataggtaaactaaaaggacacaatatttttatagaggtttgccccccttagttagtaggtaattgcctactccccttttagttgtattgataatagagataataccaattagatcacaagtgttatggattccatagtgatactataatgtcccaataagcctaatggtgagtaatta

SEQ ID NO: 318432 - DNA, 946 bp, Cannabis indica
ggcataaaacccaacagttatttgtgacataaatattttatgtttttaaattcatacacttatatgatacatgtttttttcgacaaattaaatatttttgttatacctattacactatcaatctgttaagtctgattggactaattagtactaacatgtgtcaatatattattggtccaaatcaattaatattgattttagtaataataaatattcaaacaataatcattttacaaaattttaaatcaagtttattatcttttaagaaacaaatgtttaataagtaataattaaataaataaaaagaagaaaaagaaactcacgttcttcaccatcatcaccaccaccaccaccactttcttcatcgtcgaaggccatagattcagacgagctctcttctttctcaattatttttaagacaaaagcatctcgtaaagcctatgaggaagacaagggagatagcaatcatctttaacatatttgggtgttaatggcatgcagatctagaagaggagttgagagatcgagtgcttgacggagctaacagagaccaaaagaatagagagtagtcaaaatttaaggaaatgggtgcgggccttgtgcgtggagatcaccaagtgtcgagatatgattggttctttattatatctaacccctagtagatccagtattttgtttagtgttggtcttcatgctaggtagcaatcatgtcccaaagaatcccacttgagtgtcgttaagagaatctttagatacttacaaggattctaggttcttggtatcccaagaactcaaacattgaaatagtaagctactcagatgtcgacttttccagttgtaagatggataggaagagtactagtggaacatgtcactttctagaaaatttcttagtgtcatgctttagcaagaaacaaaactcggtagccctatccacaactgaagc

SEQ ID NO: 318433 - DNA, 711 bp, Cannabis indica
cattttataaaataaaaacttatattataggtacggacattcaaatctcaatactcacattaaatgtggttattaaactcatgataatttagtaaatgaacacttagttacaaattaagtatgtatgccatattcatgattacactctttttattaatttattcgactcacacataattatgttgttatatgtagataaaggtaaaatcaagagtgaccttagtgaagattgtacatattcagtaatttaagccttgagagttacgatatttgggacgtcatgagttatgtcgttagacgatacatttatatatattatgttataaatattttgtaggtaaattttgagatccttaattatatttattttataaaaaaaaaagtttatatttagtaaagttttaattattatgaaaattttatcaaatacactttttatgttaaaacttttttcaaaaaaaattaacttgtaggtattgtgtgggtttccaaatctaattaaaagatcttaattaaatttgaggaaattagatggtatacccaaggtagtccatctcattttacctctttcttaaaactcattaattttatgccctctttactaattatcagagacggacacagttatttgagtgtggggctatagcccctagtaaaaaaaagttagtgtgaaaaaaaattaaatatcttttatttagttaaataattata

SEQ ID NO: 318434 - DNA, 2377 bp, Cannabis indica
actttaattcaacattcccaggtttcatatcaaagtgtaggaacttgaccttccttgacttgtctaaaaacaatctcataggtccaattccagtttctttgtggaacctcaaaaacctcatctttttttatgtagataacaaccaactatcaggagagttgtcagttaatatttccatgcttagtaacttggaggacttagttgtttctaacaataatttcactggttcaattccttcaaagattggaaacttgaagaaactcaaaagattggatctttctcgtaaccatctcataggtccaattccaacttctctatggaacctcaaaaacctcatccatgtgtaccttttcaacaacaatctagttggaatcatcccaccagcgattggaaatctagaattcctcacaaattttattgtcggcactaatcaactatcaggagagttgccggttaatatttccagtcttagtaacttggagaagttctctgttattagcaataatttcactgggcaaatccctagagactttgggaagaatagtcctaatttgagcatcgttgtgtttacaaacaacagcttctttggagagtttccacaaggtttgtgtagtgggtttaatctagaatatttgagtgtaaataacaacagctttacagggccattgcccgagtgcttgagaaattgcaccaaattaaaaagagtaaggtttgatgggaatcgattcacaggcaacatcactaatgcttttggtgttcacccacatcttgattccattttcttaaacaacaaccaattcatcggtcatgtttcaagtatgtggggacaatgccaaaatctcaccacattacaaatgggtcataataaaattgctggtaagatcccatctgaacttgggaatttgatgaagttgcaagttttgaacttggagtccaacaaattgaatgggccaatcccaaatcaattggtaaatcttaaacttttgtaccagcttaatcttagcaataatcatttaacagaagaaatccctatgagtctattaaacttgagtgggctacagtatcttgatttgtcgacaaacaatttagtaggtaagataccagattggcttggtagctttgaaaatttacatagcttaaacctcagccacaatgttctgtcaagtgaaataccaccagagcttggaaatttgggctccttgcattatgcattggatcttagcagcaatttacttgttggagaaataccttcaagcctgtcaaagcttacaatgctagaaattctcgacatctctcgtaaccacctctcaggtagtattccacaatcattttcccacctaataagcataagctacataaatttttcttacaacaatttgacaggtccgatcccaactggacttgttttccaaaatgcatcaaaatgtgtttatgatggaaatcttggattgtgtggaaaagctacaggacttaagccctgcagaatgcaaaaaaacaaagctagcaatggtagtcacattttagtctttggtcttgtttgtagcctaatattgtttgttactaccattgtaatcattctcatattttgtcatgaatccaaagtgatggataagagtagaaaaggtgccaacaataatgaaatgaacaagtcattcatatgggagaaggaagcaaaattcacatttggagaaattgtagaggcaactgaagactttgatgacaagtactgtattgggaaaggaggttttggtactgtttacaaggccatattgagatcacatgagctaattttggcagttaagcggttgcacgtgtcagattcaagtgatattttagaagttaatcgcatcagttttgagaatgagattcaaactctaaccgaagtccgacatcggaacatcataaagctttatgggttcatttcaagaaaaagtgaaatgtacttggtgtatcaatatgcaaaaagaggtagtctttctaaagtattatatggctcaacaaatcttgattgggattcaagggtggagatagttcaaggattggcccacgcaatctcatacttgcaccacgattgttctccaccaattgtccatcgcgacgtgtctttgaacaatgtactacttggctcagattttgttcccattctatcagactttggtatagctcaattgttgatccctgactcctccatttggacaaatgtagctggatcctacggttatatggccccaggtataaatattgtactcgttactaagcattgttatttggcaaaactcgagttttatgaatagttagaggtaggggtgtttattggatcacatccaatatttttaggcctattcagatccgatccaatcatatattggatgttaga

SEQ ID NO: 318435 - DNA, 853 bp, Cannabis indica
gcccgcctatgcccaggaccggccctgggtaggggcttgctcacatatagatctatcaacaattcccaagactcaaccaaggatccaaaatagggggcaattcaccatatgcaaggtgaagaatgaagattaagaatcaggatgtctaattatatcggttaattaggatttttgtctctcgaattttaacatgcctcttaaattttaaggtcgttaaaaatatttttagaactattgagattattagatttaaggatttttatctaattttagtagaaaaaatctaacacagatgaaagttcagagacatgatttagtatcaaaggacataatttgatagatatcaaagtctggagaacatggtttagtacaaaaacaatcactgaaatagtaaaattgaataaaattagacaaaagtccttaaatctaacaatcttaatagtacttcaggatgattttttaacaacaaaaaaaattcaagaagcatcatttggtacatattaaagtttagaggataaaaatcctaattaaccaattatatatatgtcaatggtttcaattttgatttctcatgacaacatctaaacaaccaatttaatacaattcaattcaattacaaaaatttacatatccaattacaattagacataattggatttgaaaattttgatgttaattagattggattgatcgattattagatgatattgttaaaatttaactaaaaactatataatatatattacaaaatatttatactaatttatatataattatattgcattattattaattgttattttgaatagcttgaaacattgtcattagtatattgcttttttttaaaaaaaaa

SEQ ID NO: 318436 - DNA, 1266 bp, Cannabis indica
aaatcagcttcattatttaattactttattggaaatacaaggtcatttttaagtgcttttcattttcaaggatataacaaaggatggcaaagttgacaaaagcttatgtcaagattgtgttgtattgggtatgccttccttgtttgtgtaaatttaaatttgatttggtatacaactttcaatgttcgatctcctagaggcagagcattaataacagaagcaatttcaataaattattagcgaaacttattcactccttcaagattgagattatgttcctcaaggagatatttaccggaattattatgccttccgcagtaattaaaggtaagattattttcttacgtcagggtttttacagtaattgaaatggccgaaagttgcaatattttcaatattgtacatcaaggtttttacagggttatgtcaaaacatatcagtaaattatgacctacagatattatggaatttgatttttagtttacacattatttaataaaattattatatacctagggattttaataatatgtgtccaaaatggttctaaaaaaaaattagtctccttcagtagcaacattgattccattttaataataataagaaaaaagaaaaaaaacagaataaaaatatcacacataattagatgagtttcaaggtaagtaataacctggaccttccatctttcaataagataaagtttttaaataacatacttcaaggtttgtacgtagtacgccacatcaaaatttcagtaatgcatcatctgtttgctgcatatttggatattatgagatttgcttttaaatgggcacattattttcggacatttttctcttcacagttttctattatattaaaaatagtatttttcaggttatgaaactagatagtacatcttattgatatgaattgatggaaaaatagtactccaagaaaacttaataaaatttaaaatttatttctgagaagtgtactaattttttacacatatccattcttaattgcctggttcttaaaaatattagaattattaaataaaaattattaaataaggtaatcttctcaccaacagcgaatatttattctaattttattaaattattgacttactaaacaagttgatgtcctatcactgtataattttctttgtacttcccattgtataattactgaggtgatatggcgggaagttcctatattttcaataacgtacgtcaggattttaaaagtgttatgtcaaatcaatttcagtaaataatgacc

SEQ ID NO: 318437 - DNA, 1631 bp, Cannabis indica
gcattttaattctaatctttttatgatgatggaaatataatcaacaaaataaagttacttgtaaagttacttgtaaaatatattctaattccgttcatatatatatcttacgaattagactaaagttttacccattaaactaattgtataatttacattagtagtttaattatttaattaaatatatagataaataaatttatatattacaagataactttttttttcaagagaaaaaagaaactgatatttaatatttttatatatagtgaagcttaatatcatcgctatatatattaaatatatatgcctctttatggtgtaggtgcagtcacgtccatacagcaaagatattataatttataatataataagtagcaatattatatatacacacaaaatatcatatataaatatcataattaatgtggcaaaacttatcacagaaaacaaaagtttgattgatcctctggtacaataatttttataattttttgggaacacatttcatcaatttctcaattatcatataattaaactcaaagatatttcaattgaattattgaaccgattatataaatatcatatacctatagaaaattattagtaagagcttgcaaagctttataagaattcgttcatctcaagtccagacttgcttgcaaagctttagatcatatgagattggtgacttttgaggcctgccaatgaatttggcaaccaacaatatcaattaagctccaatcgtgtgacttctttatagaaactagagggaaaaaaaaataaaatctcaattacaaactaaatttcaacaaacaaaaagttcttgaataaatttcaaatcaaagaataaaatagaataaaataggtaagtgattaaataatgaattgattgaattgatgaatgaaaagtaaaattgaaatagaaaaaactatgaattattcatctattctttttatactttttttttttgacaatctattctttttatacattttaataagctttaaaatttatttttttatttctctttctttttaacagccatgatttctggtgtttcagcagttggtgaaactctttcttgcctcttgtttcttctgtttctcctacaagtcttctcgatttcaggatcaacgggtaatatgactccttgtccttgaaatttttgatttgttcattttagatcatgaagagacatatagatagagttacgtacgtggaaatactgttctgatttttaatgttttataacagttgcataaacattttactaatagttatttcgtttgattgaaatctttgtctgatgcaaccttcggccaaccaccaagcaaccttcgtctaactgaaacattcgtctgatgcaacggtcagccaaccacccaacaaccttcgtttgattgaaacctttgtttgatgcaatcttcgcccaaccacccagcaactaccctacaattaatcatcgtctgattgtgtaagtgctagtgtaagaggtattttggtaattaaaaaatacataaaaggtataaatgttgtccacaccttatggaagtatttttataaataaagtatcaatttatattttccatgtaataattcctaatttttttttcataataatctaaat

SEQ ID NO: 318438 - DNA, 686 bp, Cannabis indica
tacaaacagttgaaaaaaaaagagaaaaagtcaatggcaatctaaaaaagaaccaagagactcttgtgtgcacaaatacaaacaaatcacacacatctaaccagagccacgcccaaggcaaaggaaagccggcggagcttggtcgaaaaaaatatcacaacaaatggttttacatatatataatagcacaattggcattcaattattttttttaatcaaaatgaagataagaggatattttcataaattttaaataattacgaaaatatttaatataggctaattaggatttttgctccctgaactttgacatgtaccaaatcatgcccctgaaattttaaggccattgataatgcccctgaactattgagattgttggatttaaggacttttgtctaattttattcaattttactattttaatgattgtttatgtactaaaccatgttctccagactttgatatctaccaaatcatgcccttcgaactttgacatgtactaaattatgcctacttttatccatgttagacttttttactaaaattagaaaaaagtccttaaatccaacaatctcagtagttcagggggcattttcaatgaccttaaaagttcaatgggcatgatttagtacatgtgtgttgcccctgatttcgcccaatatacgtggaccaatcaaacagggaca

SEQ ID NO: 318439 - DNA, 450 bp, Cannabis indica
gggtagtttaggaaaattgtttaaatgggcatatattaccaattttaataactttgcatttaggggaaaattttttgggtaatataagcatattaattcaaatttcccattaataattagttatagattccattcacatgatcatctaagaaaaatccttttcacctcaattaaacaagagcattaaaaatagtagaaaatataagtattttctatctaacaattttcatgtatataaatataaatatgtgtatattgaattatatataatatttatatatatatatgtataatataaatataataataatcttatctgccacccaataatatgaagtccaaatattatgaattatgattaatttatgattgagtatggtgatatatatgaacttacttggattattacaaagacaaaactatcaattctagctcttccatcttatccat

SEQ ID NO: 318440 - DNA, 662 bp, Cannabis indica
tttttcaaatttacggtttgagtaaactttttacataatatccttcagatagtaatttttttggtaatatatatcttaaaattataaattttctgttacatttatatttgtacaagtgggtatgtatcattgtacaaatatatattttaaaaaaaaaatacatgtcacaaatattatcttttttatggactaaaattaactacaaaaaaacctattttcgctgactaattttttagtcattaaaactcattaattagtcacccaaaattttttacgactaattatttttagtcgccatttagtcactgaaagtcggtcgtagaaaaaatttagtgactaaaatattttgtcacaaatagtgttattttttatgactaaaatttagtcacaaaatatattaaatttagtcacaataaatttgatatattggtcatttgaattccattgtacactcttaacaactaaaaaactatgcttcagtaactaaaatttagtcatgaaagaattaatatttggtgaccaaatattttagttggcaataataaataaataattatataaattaattatttagtgacaaatgtttagttttaaaaagtaatttataaaattatttttaatttttaatttggagtttacatttatttaaattataaacaaaa

SEQ ID NO: 318441 - DNA, 809 bp, Cannabis indica
cgctgcaatcactgtaagttattcttaacttttatgtgtttagttcatcgttttagaagttcaatattaggttgttaaatcaacatacttgcaaatagatctaagatcctggataaatataattccaacaatggaagagtataaagtatttagatttaataaaaaaaattatttaatacgatatgaaccataaaccatgaatctcaacacagttatacataatgcaaaccaaactatttattcaaatatttttacttcttgttacctatcagggttttcaagctatcttttcatactatacaatcaaacatccaaaccaaaagaacttgttggacgaatataatttagtgatcacagtgtgtactcaactcatgagatatggaagaacacaacacacagagcaaactagagagagtggtgtgtaggtgaactagagagagaatatgtgtgtgagcttagagagagagagtagaaaattcaattatatttttcatctctaattgttctctgtaaagtatcgtatattttccttgtttgttattctaatatatatatatatagggtattccttaagtgagagcaccacttttgctcttatgaataatggcatttttataactcttaatttttaatggctttaatttatttgtttatcataggggtgttgtattagatttttctaattatcttttttaatattgaagccacatgtatgtatgtatgatatacatgtagcagtttttattaaattaataatcttattatttttacttttttaaagactataaccgttttttaatgtgcagtag

SEQ ID NO: 318442 - DNA, 855 bp, Cannabis indica
acaaataaataaactcataaataattataaaattaacataaattagtgctaattgcctttactaatccaaattacaaaagcggtcattacagatccactctttcattaggggctatgcctcttataatttttttaagaaaaaaaattattttacatatacttattagtaattattagactctagtgattaggtagttatgttcgttataggaagttaggtggttaattcagttggtacttagttggttgactatttcaaccaactctacccttgtctatatattcccaatgccattataacacttaattcaattcttatcagtaagaaattctctatgttttacaaaactaatatggtatcatatgtaaacatcctgaagcttcaagaacttcatcttgcaccttcaagaactcgatcatcaatggcgagaacgcaagctactaactatgctaccaccactgctcatcctcctccagtggtcaatgccaatctagctccgtcaccatcacagacttctgtagaaaatcaagttcgaattgacgatccagttcagaattctcaatcaactgctatcaatccagttctaaattctcgatcaattctgatcgattcttgatccactccaatcgatcatcttacctacaaagatgttcgttctccctactatctcagcaatgctgatcgccctgaattagtcttggccacacctgtcctcatagattgcaactttgagccatggaaacgcgattttaagctttccattggcgtcaggagcaagacttcgtttctgttagggtatcaacccaagtcccacattggaagaatagaatagagttatcttgaatataagtgtt

SEQ ID NO: 318443 - DNA, 780 bp, Cannabis indica
ttataattaaataatatataaatattaatgaaattaacaaatttttaaaatctgaccataaatttaaaaaataaataatcaatttttaaatttaaacctcaaaatatcaaaaattaatgataatctattaaaataaattttattaatttaaaatattgatatttaggtttaatattaaaaaaaaaatattttattttgacattacggtttaaaaattagaaaaatcccacaaaaatcggattttgggttgaaaccatgcaagctgtccaagaggaggctgcgtgcagcctcctacgcgtgcgcatggatgaggcaacagggtgcatgtgtggggattcacggccacttccaggtgtcagcttgggcggatgcatggtctgtgcgtgcgtgatcgaagcttcagacagggtttgtcccctgtccgtgcgcgcatcacctcattgtacgaagcatctggtgcgtgcaagcaccatgctcgacatcggcggtaacgattttcaaacaaccataactttgtcatttttcatcaaaatcgagttccgtaaaattaaaaattgcttaatttttcacaagaaatccaaataaaatattttcagtacgaaaataaaattattttcatgaaattttttgtaaatcttatacattcatcaaataacacataaaccaacataaacacatccaaatcaacacaattgataatattcattgttttaaatccatattacatgaaagtaaatcattaccatggctttgaggctagttgttaggaatattttacta

SEQ ID NO: 318444 - DNA, 1925 bp, Cannabis indica
tcaagaggtatttattttttcatgcaatttatgttttgatttattatatatatcaggagatctttggcactatggtacgatgataatcagataaacaattattctgctgcgtacttgatttagtaccataaactcaacaacgtggtaccgagcgggcgacttggcaccaaaggtcccctcttggaggggcaacttacaccaagggtcccctcttggagggggcgacgcgacaccatggttcctcatttggaggggtggcgtgaaaccatggtcccctcttggagggggcaacacgacaccatggggatcctcttgtgatcttggcctttttctcaagattagggtcttatttggatatcaattctttcttcggacctctctttttttattatgacttcgagattatactttgtaaaattttggggtaacatgcacctataggcaaatagtgattaaaaaaataactattatttgcttaatatatatatagagagagagagatttaggaaaaaaaaataagtgaaagcactttggtaaggatatttttctattttcagtatataaagaaattgtgtaagttattattttatataatgatatacattatatttatatataattagtattctgtctgttttagaaaatttttgagtaatttaaattatgattgcttatgagattatgcacaacttaaagaaaaaacgaagagggaggaatggttatatgacacttaaactagatgttagcaaagcctatgacaagcttgagtggggttatctctgggctatgatggtaagggtgggctttgatggtcgttggattaatttagttatgcaatgtgtatcatctgtttcctataccattttacacggtgggaaggagttgggatccatttctgctcaaagcgggttgtgccaaggtgatcctttgtcactatatctgtttattctttgtgctgaatgcttctctagttttgttgcgtagctatgaacagagtggcttacttacggggtgtaaaatcgctcgaggtgcgccggtaatctctcatatactctttgttgatgacagctacatttactgtaaggcaactgaggaagaagcatacaatgtgaaggagctgttgcatacttatgcggtgtcttcggggcaaagagtcaacttctctaagtcttccatggttttcaccaacaatactggaaatgcggtgagggattccatttatgctatgttggaaatttatgagactggtgaaaatggctattacctgggtctttcgtgttcggtggggagaaataagaatgttatccttagttttattaaggataagcttcgaaagagaattcaagggtgggaagggcgtattttatctcgtgcgggaaaggagattttgctaaaaatctattgctcaagccttgtcgaattatgctatgaatgtttttctcttggcttcaaacatgtgcaaggagttagagcgacttattatggctaagttttggtggcaatcggattcgagcagtggtaaaggtattcattggatgagctgggaggggttgtgtcgccataaacatgcaggaggatggggtttccgaagtttgagagactttaatttggctcttttggggaagcaatattggcgtttgttggttaatgatgattctttggttagtaggctttataaggcaaaatattatgctagtggtaatctgttttttgctgaattgggagacaatcctagtttatatggcgtagtattcttgaagctaaagatctaatccatgcctgtgctcaaataactattgctaatggggaaaatgtctccattcttaatgatccttggcttctttataactctaacagctatgttgtctcacgacaccctactcttgtgaataagtcggttagctgcctctttcaagttgatactc

SEQ ID NO: 318445 - DNA, 2200 bp, Cannabis indica
gtttgtaatttggaagatgagactatctaccatgttctagttgactgttcttttgctagatcatgatggaataggtctttggtggatattggtaacacaatggttgctgattttttcagttggcttcaggagattgaaagtcgtgggaaggcaggagaaatggtagagttggctatggcggcttgggcaatttggagggctagaaatgaagtcgtgtggcagcaaaagagttcaaatgctactagcattgtggcatctgctagatcatgcctggatcaatacaagactgctcaagaacgaagagggaactctctttctcatttgcttgaagatgggaataaatctgagcattagttgaagcctagtagaaacaagatcaaggttaacgtggatggtgcattgtttgctaatgaaggacgttttggtatgggctgcttagccagggactgtgaaggtcgaatgattgaagctttctccttgggaaagctgggcttggttcaacccgaagtggcggagattatttgtataaaggaggctttgagttggatcaaacgctatgattggcaaaatgttgtcattgagactgatagtttattacgtgtccaggctattcaaagtaacattcctatgacgtctcaatttagtttattaatgcttgatgttcgtaatttattattgtctttgaattatatggatttatgttttgtgaaacgatctgcaaacaaagcagctcactgtcttgctaggagctcttgtttctcgtctggtcgtgcacttcagttagaagattgttcttttgaagtgtgttctattatcctgaatgattaccatttttaataaaaagttgctattttattaaaaaaaaaaaagtaattttaaagtttaagatatatctgtattgcaaatgatagaaattataagaatggaatcataaattaacatttttacttatcacataaacacaaactcaaatatcaggcccataggcccattccagccaatcacttacgtgtctattatcaaacaaacttaatttgactctgtcaaatatcaatcattaaactgaaacaatataatctcctatgcttttttccaacaaaagctatgtacacgtaatttcttttaagttatgattagtgaaaatagtttccctagagtataagtgcaatacattaggacctatggtgaaaataccctatatatatatggtgaaataagattttaataaaatgatccaactctcatcatttgagataaagtcaaggatgtgtatctcatgtggaacggttttgagtagacccatagcacaccaccatgcggctcccctgaatgtcgcgtgcttggaaattgtttgctaacatgaatgaaggagtacttatatataaagtttatagctctaggacatttttttctcattgatatggatgggcggggaatactatatgatacaatttctcatcaacttctgttaattggaatataatatcttaaatcactcccactccctcacacatacataaatatatttatatttaattaaaggttaattaggatttttattcccaaattttgatgtatcaaattatacccctaaactttatggtcgttaaaaattctcctgaattattataaaattattatatttaaggatttttgtccgatttcagtaaagaaagtctaacatgaatgaaaatccaggggacatgatttggtacatgttaaagttcaatgtgcatgatttgatagatattaaaatgtgaggagcatgatttagtatataaacaatcactggattaataaaattgaagaataattagtatttttgccccctgaactttcgacactacttaattttatctcttaaaatatatggcttgttaaaaaatttccctaaaatataacagttatataattatgccgcttctgttaggttccgtttctttaaccgttcaaaagtactatttttaccctctgaactttcactaatataaaattttgctcccttttattaaaaaaaatagttataatgattataatattctatttgtttaaagcaattataatattttattaattctaaaaaaaataaaaattaattagaaaaaacttaataaaaatattaaattaactaaagtattaattttactttaaaaaacttaaattattcctaaaatattttcaaactttatttcatttataa

SEQ ID NO: 318446 - DNA, 837 bp, Cannabis indica
tttaattgtggtatataatttagttagtatagtatacatgtatatattagtgatatatttttattattattattattgttagtatatatattttgatgaatggtatatgtattttttgttatacagtatatcatttttttttaaaataatatttaagttctattttctattgtacttttgttgatatgacatataattttattagaatgctatatgtctttatttgttgctattatatatattatcctgatttttgcttatctgacgtgacatgtctatgtggacaatattagcatcacgtggctttacagctcaccaacaagaaggccaagtcatctactcaacacttcaaccaacagggagtcccgatactcaaacaggacgacagatgacgaaccggccacctcaaggaggctgaccggtcacccctggccggccctatggccaacataggccggtcagcttctagacagtacaaggctggccagcatgcatcctgcagatgcatggccaaccagacattaagttggcaggactttggtgcacaacttcatacgtggtcatcaagctagactgcgaattgggccttaatagtccacaaaaatagaagaaaaatatctattttaaggggcattttagtcatttgtattttactaatttaatttgtaaatatctgcttattttatttaatttcaaggttttaagctctcctatataaagagccttaactaaaccctaaagccctaaagtcattaagtgctaagttcaaaaacctaaatccttaagctctaatgtttgatagctcatcttctgtctctctctctctgacgcccattg

SEQ ID NO: 318447 - DNA, 1956 bp, Cannabis indica
gtagaaatccccaaaaccccctggacgcagtagaggccgcggttgtgctcttagaggtggccaacaggatccaccccatgctccttttgactgggagaagaggtttgctgagatgcaagccgaaattattcagtaagagaaagaaattcgaaggttgaaacagcgggatgctcctgttgagcctcccctacaaccacctactgttgtggttcctgcggtgccagtagaacaacctgttgcttgcaatcttatggagcctttatatgagaggttcaagaagaaagcagccccagtgttcttggtaggctttaatgttcttaaagcagagcagtggttgactatgattgagaggatacttaattttatgggagtcaccgggaacgatagggtggcatgtgccacgtttcagtttcaggaagatgctctggtgtggtgggagatggtgtccctctcaaaggatgtcactagaatgacctgggaagagtttcaggacttatttattgccaaatactataatgaagcagttcgcagtgcaaagtagaaagagtttgttgagctggtacagggtgaaaatatgtcagtaactgagtatatgaccaagtttgatcgcttggccaaactagcctcagggattgtaccaacagactttagcaaaaaggatgaatacttggcggggttgaatgccaagattaagcatgatcttgttattaccactaatgatacaaccagctatgctgaaatggttgacaaggctcttccagccgagaaagcagtaagtttttgcaagaaacctgagagattcctagtgctggtaggaccactactctccctatgtctgttcctgaaaaagagaatagtgattccactattgaggtaaagaagagaactttcccacctacagggagttcaggtcaaagcaagaggtttcgtggaagccagggtaaagggggacgtcaaatatattcctatcctaagtgcttgcgctacaagaaacatcaccctgggacctgtaactagagggcttgttttcagtgtggatcgattgggcacctcaagaaagattgtccccagttgaagaaagaggaaccaaaacaagaagctaaacctacaccagcacgtgtatttgccatcactcaggcgaatgctgtcgccagcccttcagtagtcacagatcagcttcttatccacgacattacttatattgttttctttgaattgggtgctacacgttcatatgttgcatcaagagtacttaatcagcttggtaggcctagtgatgttttcgaaatggggtttggaaccctattacctaatggggaattaattatatcaagaaagtggattagatctatgctaatgagaattgagggcagagaaataagtgccgatctcgaggagttaccgttggccgagtttgacgttatactcagaatggaatttttgtccaaataatctgccaatattgattgcatgcaaaaaatggtaattttccaaccggagaatgaggaaccatttgtttttgttggttcagttcaaggttctcgtgtcccaagaatttcagcgttgaaagctagggatatgctacatagtggatgtgtaggattcctaggggttgtaattgattctggtaagcctgtgttactcggacccgaagaggtcaaagtggttaaggaattcctggatgtgtttcctgaggaatttccaggactaccgcctcaacgagagatagatattattattgatttgatacgtggagcagaacctgtttcaaaggcaccttatcgtatggcacctgcagaattgaaagagctgaagatacaactctaggggatgctagatctagggttcacccgacccagtgcgtcaccctagggagctcaggtattgctcgtaaaatagaaggatggaactcttcgaatgtgtattgactactgagagctgaacaaattaaccatt

SEQ ID NO: 318448 - DNA, 805 bp, Cannabis indica
aaaaataatatattatttttatatatgattagtaactataatacatccaaaaaaaaaaaaacttataaattaatatacatatgtataacggtcgcttttggtttttttggttcgatttattacccaaaaaaaaccgaccgttcaatgtcaattttaaccgttggcagttttttcagttttcggtttcgtcagttttggttccaacggtgttcggtaggtcggtttgaacggttttttcaattttttgaattttatgctcacccttattctcagggaatattgctccaggctgatcaaattgggaacacgagaatagacaggaagcccatgaaatatttcatctagaaccataagggtcccagacaaaagagtaaagcttagtcaagtttgaagacactttgctgaattcaatcagttaacaaaaatttacaaaggaaaatagagtttccaaaatctaatattttctatagacaatatagaaataaaccaatatttctattacgagcaacattcaagttactctgataagcctaaatcctaattggagtcaatcacgatagacatgcaaatataaaaaagaaagtcataatcaatcagatacaccagcatggaacttatctgtcctacacaaaatctaaccacattccagaaatatgaaaaagaatacttacgtgttgaaggcgaaggcgctggggtaggaaagcaaatgtcgtgtgttggccgaattggaggtacggaagtaggggttctgatgtaaaacgaaagtatttacatagcctcagtgactaatagattattgcttaat

SEQ ID NO: 318449 - DNA, 2689 bp, Cannabis indica
aacctgagccatcacactaaacctagccgccactctcctttcttcttcttcattgaatgtttcgaaccctcgtagtgataatactctgcgacagaaatacaagggttagagatctgagtggaaggagacatattattccgcggcacccaatgtaaggtttctcatactttatatgtgtttatttataatcgttttagaagttcatatttagggtgttaatcaatatacttgcgagtagatctaagatcctggtaaaataatttccaacagttgtcttcctcggcctttttaggggctccatgttgacatataatggaacctctgagatggtcaacctcttatttccctttttgcctgatgaaagaaagagatgtcaagattcatttctgggagattcattatgttagcattcatttgaaaaacgagtataaggagaaattagggcataatctcctgcctaagggatttatcataatcataagaagacatagaggaaggactataatatccactaaaatccctacaccccgtgatcctgaatatgtcataggagttaaatagttctaaatcccaggtcgcatctaaatgacttgccctatccagcatggtttcgtactactcagctatcccatagaacgagtcagtacagctaattaggacgtggaaccttgggtactaactatcaaacctatgtgcaatgcactctatgaggaggggattccaagtgtaaaaattgtaacgactatctcgaaatgacactaaagttttatgctcagccctaagcactgtgggtgaccaaccacattgattacctcaggatgctccttcttcggcttctcgaaggacgacattctagaggtaatgtgctcgagccacataatcctgaccttccgcatcggctgggacgaaaaacctgctaccaagaagaatatttaagatatttataatcacaagtaaactccttgtcagtaaggagacccacagacctcaggttggcctcgttcaaaagaaacttagatgaccgaagaccaaagggaagacccagcagcagcctgcgttgctcggccatctcgggagtcgaaactagtcttttcgagaaagctatcgaaaaaaaaggcaaaaagatcagaaaaactagagtaaaaatacatggaataatttaaccaagtcttaagaaaaaattccttatgtattatgcgaaaggtggttgtgctgattggggaaagaccagtcgtccagaagaattcttctttaaaaggagttttatttggcaaacctacaatgattacaatcgcatgtgtgagtcccaagatagtgaaaaacccctactgcattcttccttgtaggaacagccttgacagagtaaagatactctattttttggggagtggggcactcccaattcaaaattttgtacggaaccttcaaacttgcaaggattctgtatgaaataggattcaattggaatagggcaagcccaagatagtttaggaagtccttaaagtagtctcgcagggcgatgacggcttgagccctgatgtgttcgaggatccaagcgcctatcccggtcgagccacctgtactggcctcgccactggtccactcagatgcttcaggagaaagtcgtactagttggtaacagctgaacttgccaacagccactgatctaacttggcattcccgcttatattcaatattgcaagtcctcggggtattacctacgtaatctttgatggctcgcaccttcaactctattagtttagcctcaaatgtgacgttaggatcctggagagtctttgattttcaaggcttggaggtcatgatttcaaagtctaggtcacctggttcaaaagtaattgtgactctcggtaaaaataaaggcctagccagaggaattgacgataaattggagggtttaggccaagcagcatctcgtaagaaatgacgttttccttctgtaatttcttgcaagaagcgtttgtggcgactaacaatgttatcttggtaggtttttactgagtgttccttaatttatgcatcatttatctctaatttggatttgggttctcaaattttgggtttatatgggatggcaagtttagtgggacactctatttctaaatattctggacgataaacttctgaattagattgggacattgctgcaaagagaaagcaatcccaattcctggaagaaatttatcaaaccagaagttggtaaatttgagagacacaaaaatctacgttctgcctaaaccctaaaattacccagatacaattcaaccctaaaacagctaaaaccagataaggagataaaggtactaactaagaaactagtgatcaaacccagaaatgcaaaattaaaagcatgtaagaaaataaagagagaaatcttttactgtttaatgctgggttttgggtggttctgcaatcgacaaaacaacaaacagcgtgatgatccctctgaatgcttgagctcaaaaatcaagtcggacgaaactcacaagaaaaatgtcattgacaaagatggcatgcaaggtttcgaaataatatgggtatgatttttgcataaaagcttgaaaaatttccagaattttgaaatgtcaaaggtaatgaaaaggtggttcttcttttttcgttttatacttttgggcttgtaacatcccgatttcccgagatgtcacatagg

SEQ ID NO: 318450 - DNA, 1623 bp, Cannabis indica
tttattttcagtctgtttaatataaaagtttaaattctgcgctattttaattagtaatcccgattaggggattagggccttataagtattttgggtagcgtgcctaattatttagggcgttacagttgccctcatctataagaacactcttagttgatattctttcttagtaacctctggcagaaccagttgccctttcatgtacaacaaacatatcttcaatttcaattcatactctaatgggtctccaactctttgtataaaatatcgcgtattttgtgtaaggttgtgtcgatttcaactatcaacgtcaaacttcatttgcttttataaatccaattaaaatccttaataccccaaacaccatcataaaatataaccaaaacacagtcaatcctacaatttcatacaaaaaaaaattagttaagacataactaacaaaaatatcaaaatcactcaaaaattggcaaaatcatatatttcatcgaaaaatatcaaaaaaacattgataaaaaatagtgaagtatatagaatgacatttcctggtgcaaatcgagaacatatcaagaaacaatcgtgatggagacaaaataaagttttctaacaacaatcgacaaataaacaatcgataaacactcatgatggatagaaaaaactaattttcaagaagcaatcgagaatgtattgacaagccattgagagaatatcgataataaacggaaaaaacattacaatgttaaaaaattcagacaatcgtgaaaattatcgaaaaactatcttaaaacaattgaaagaatcatccctaaccttagtacgctaaccatcaagataatattgaaaaaccatcgatattgttcaaaaaatccaaatttcactggaaaaaccatatctccccaatttatagaaaaatagtaaaataacatcaatacaaacaataaccacaaaaatctactgaaaatgaactacatactcttctaaatatttgaaatatacttgtccattattgtggtgaatgtgcatttaccagtcaatgtgcgtgattcgtgacccttgtggtctgactgttgtcctagagagagagagttgtatttttttggtttgttagctttttagtattatttgtataaattagttaggagtctaaaatttgataatgagtaaacttttaagcaagattagtgaaatttcctattttaattaattaaactatgtttggtaggaggaaaaagtggagggatgaaaaggagagaagggagagagttgggaggagataacaaatcttttttctttggcaagagggattgaatgaaagaaatgagtagggatgttcatcaaactactcaaccgctcaaaccctgaccgcaaaaaaaatgtggtttgaagttctttacgatgtggtcgcagtttgaatttttcctaaaccgcacggtgcgatgtggtttgcggttttgaattgttaatatgcggttcaaaccgcactgcactgcacattataaaaatatcaatttttatatttatttaggtccaatatgtgaatgtccagcccaaagcccactaattattatattattgaaacttaattttttttcatatttatttttaagtcttatgatatttttgaca

SEQ ID NO: 318451 - DNA, 949 bp, Cannabis indica
tgtataaaatataatttttatacaattctcgtcggttataaagaaacgtgatcttctgataccgaatgtccaaaatcaacgcaaaaatacatctgtttatgtttgctgtatatacgttggttatgaaaacttacatgaatagtataaatgtcagataaaaaccgataaaaattagcctttttatagtagcggccaacccccttcaaagatcttcttaaatattcttcctaagaaaatgaaattttgtctaatcttttttagaccaaagtatatacatatatattatttggagtttttacataaaattaaactattgttaattatattattattatttatgtgtattgatttaaattgaactaccaaaaatgaggaaaaaaatacagggagcttctctaaagcacttttgtaaaatgggtgcaccgatacatctttatttgttttggtataaaaaaaattaatgtaattttttatagtcatgtactttttaattattaattaaagacattctataaaattttgagaaatttagagtaatttacaatataaaaaataaatgttcaaacagtttaattcatacgcgtataatataaaaacgtcacacgtgcaacaaataatttgaactttgtcaaacatgaaaaaattaaactaataaaaccctttgaatgccaaaacagataaaagtgtatcagtgcatcctttttaaggaggtgcattgaaatttttttcaaagatatatgtcaattagttataaatacgtaatttaattctacaaattatactattcaataaatattgttattaatattgttattctatagaatatacattcgaagataattactcaatcgacataaatacttctgctgagtacttcctaaatgtgtaattttataattaattaacgatattatttaaaaattattacattaaattatataagattcaa

SEQ ID NO: 318452 - DNA, 1065 bp, Cannabis indica
taaactcttaaaatttttccatattttaagtaatttttactaataatttttctcatattattgaaaatagcccaaatttttatgtagtatactccttaaaggaatgttctggtaaattttcttatctgttttgttatttaaaaaaaaataatttaattttttttataattatgtacgttataattatttaagaccacatgtaaatttttaaaaaaatttaaataatatatactgtcaaaaataagattcaaatatttagttatcatgcatataaaaaaataaactattttattacctctaatcaaatctcactttagaattttggatttcgatcgggtaaataatattttagactctgtgttttgcaaaagttaccaattagaccctttgttttgttaaatgataaaatagaccttatattttgaaaaatggtataaataggaccctgaactgattttttgtcaaaataaaatttaataataattcgatctaaatatcttataacaaaactgtttacattttctgaatctgtttgtgttaggaattgtcttcaagttggctatattaaaaaaaaagtgtcgaaaattaagctcacggtcctatttttactattttagaaaatacaagtctattttatcatttaacaaaataaaaagtcaaatctataatttttgcaaaatacagaatttaaaatatttaccctttggatccctctcctttattaccgaggtagcctcaatggcttcttttaatgaacttattcaatgcaagcgatggtgaatcgttgacgggttagctgaagtggggacccattcattgaattattaccaactcactcagtgcctctacttatgtttatcaaaaaaaataaataaatctcattgctagtaattatttgtatggtataaataaatgcaaatacattatatgctcaatcttaatttatatattgcctgtcaaaaaacagaaaaattgggatgaagtagttgatggaataattgtaatattttagaaaataaggtggagttggtataatatttttattttttaaattattttattttt

SEQ ID NO: 318453 - DNA, 868 bp, Cannabis indica
ttgagtgtacgaattctaagtatattgacagttgtaatttgttagtttgattaattattagtgattaatatatagtgctgttatatcattatggtgattgttatgtatatatatatatatatatatatatattatatttgtttgtggctttaattttctcttaaaatatcagttatttcatttcttcttaatttctctacatacaagatcatatatctatatatatatatagactatatataaagatggccaatccagataaacaatatggtaattgctcttctctccaatcctaaaccaaacatatatatcatcttgtaagtcttatatatacataaatatatatacaataatattgtatatatattcccatatataataataatatataataaattattataatggctagacaaacgccacctaattaggtgtccactgtcaattatgttctaaaatccatcttagcacaaaaatttaaacccatctttatatatatagcactgtcatattataggcaaccaatcaaatttaatagcttattagattatatatgagattgtacaaattaaagtactaatcgtctcttctttttgtaaaacatataataattgatgagtgattgtatatgtacaaggatatatacatgattttcattaatatatgtttatctatatataaaaaaaaacacttttaaaaaggtggcgtttggttggaggtaatgaaatggaatgaaatagaaaggaaacaattttcactccattcctttgtttggttgcattttaaagtattggaatgacattccaatgaaatgctcttttcaccattttggtagaatgactattccattttaaaaagaaaggaatga

SEQ ID NO: 318454 - DNA, 586 bp, Cannabis indica
aaaaatgatatagagtgtaattttatcattaaattacctatgtcatttgggtatatagttttagaataaaaaaagggggttctttttcatttttacacttcaaaataattttcgttgcatttttatgaaattccacatagaaacccctattgccattagcgttgtagcctaaattgcaacaaaaaatcgtatagaaacccctattgcaactagcgttgtaaccacttcagaaacccaaaccgtaaattttttaaaaaataaagttaaaaaatagtatatggagtaattcccaaaaaaaaaaaatcccctttttacatatgtgtactgtaatataaattaaatgatttttttaagtgtgatttttcaacaagagtcaagatctttttcatcactcaatttttggatatatataactaatcattacaaaaaatcttacgtcacaacaaaacttgtgagtaaaagtgaaaaaattgtaactatttatataaattactattcctacattgtgactaaaaggtccgtacctaaaggtattagtcacaaaaattacaatttattgtgattagatatatttttagtcacaata

SEQ ID NO: 318455 - DNA, 573 bp, Cannabis indica
tggattggatcgtgcggattgaattggatcggctattttatgaacacccctaaagggatggcagttgattctcttaattttggtgaacattgtgaaaattaaactactgccaaatttaaattttaaagtttctttcattcaggtaaagaaaaaaacacgaaagtaactgttggataaatctccatactaattgttacatggaaaataccttaaacaaggttacaaggaaaataaatagatttttttacaaagcctcaatagaccattataactcttggagtagtcggttctatttcataggcttaaatcttataagctctctacaataacaactcaagaagtaaataacaacatttcaaggctccaacaaactttcagcaactcaagaaaaagtaataactgctttttatatttttcttagctaataacataacatcagagtcaacagcaacaatattaataaggggtcaacctgcccttttttgacagagtttttttggccaaaccaaggagagtaggagcagcctctttgtcatgaagaaataacctcagtcaagagagagagagagagag

SEQ ID NO: 318456 - DNA, 1020 bp, Cannabis indica
aacatattgttatttgaatgtattgagtataccggttatgaatttaagatggatggtaatcggtatatgtctaaattttataagatgtcatatatctgcaaataaaatacaatttacgtctttccgtgcaattaatctttttaagtgtctttatttatgttttcttaatgtgtgtgtatttttggagcggattgttgctcgtttttcttaatttcaggtttaagcaaatgttttgggcatttggaatggcatgtggagagaaagtgctaaaccaagctcaaaaatacaagtgccaaaattgtattagggatgcggcactaatgtgctttacaaatgcgacaagaaatgattcacatattgaaatttgaagtcccatactgaattagggtcgcgtcgctaccgatggtgttatggcagaatttagcgtcgtggcgagggttgtggatgtcacgacgagccactacacaaaggatgacaatttcccacggtgtctggcaccgcgacaaatattggtgccatattggctttatcgtccatatgaatcgcaaaattttcaattttaaagggggcaaagattttttttcacttagaatcgctagggtcactatataaacacatttaagtgcgattttcatcaatttttcacttctaaaaagctcaaaaatttatttggaggctagggataatgaatattgaagcatagtgacaaccccaaatctaatttcttctctctctcttcctgattttaatgtcttttatagatttgattatgaacatgttaatggagattattagctaaactctaatttatggattttaaagaagattgtttgaaactttctatggattaatgctattttgattttttcttcttctattgatgtttcatttattcatatttatgcttattacatgtatttgattggtcatcctatacatgatttatgatttcaatacaaaagtgagtattgaatatgctctaattgaataaatataagtttcgacacaaaacgagagtat

SEQ ID NO: 318457 - DNA, 1376 bp, Cannabis indica
gagagagagagagtttagaaatgagggcggtaaaattgggtttaagtaaaagttatcccattttacaaattatgtatagttttagattaggatatcaattttagtccctaatatgcatataatttcaaatttccctttgcattttacatttgtgctttccatatacataatttttctgggccaaatatttgtgcccaacagcatcaataagtatctaataccatcacaaaagtgatcttttataattaattagtcattttttataataattattttactaaaatatgtagagaatctgatattaacttatactcatagtgttgtatcatgatattaatgttggacaccacatatttcgtgtcacctaactcgcgatatgtaatgtaaccattaaaaatgttttgcttgaaatagaagtaatccatattattattatctctgcccagttgttggtataaatgttaatgatatactttatagtttatacgtaaaagtggtctttgttagattcgttagttgagaagttgttacgctcagatttttttttttaggctcagattttttgaatgtgattaaatagcaaaacattaataatttttaatagtatgtgatattatgattatgtggatgtgtggacctataatacttttggggcagttgctatatatgtggtatcaatatgtagccacaattatataccattgttaattataaaaataattgctgcagaaaatagaaaggaacgaagttattgttaccgaattagaatttgagttgagtcgcggattaggtcgccgttctctttaagacgttcacggcactgcttaaatttgtgcaagtaaactatcagcctcgtcgtccccgaaataaaacagccaagtcaaacacactgtctcagaactttattgcacgatagagtaccgttgaaatactacacccaaaaatcgactactgctcaaaatataatatgtaatataatcgtatatatattatgtatgtttttcagagtgaaaaaaagatttttttcccctattgttaagacgcattatatagacaatgcactaaaggtagaacatgagatcgtgggaacgatggtaaaaatcaggaagcctctgtttaccaattaatcaataaataaataataatttaataaataaattttctccaaaaaatacggtgacaccacacccgccagcttgtcaagtttggtcggatagacggcagcagcgcgcgtgcatggtggtccagtgtgtgagtcctcacccatatcactactacaatatgggcctttagcttcctttttattttataaaaagggaagctaaagggtgtgaaaacacccacctaattcgaaattgacatttagaggcggtttt

SEQ ID NO: 318458 - DNA, 925 bp, Cannabis indica
gtaattagggttaaaaaataaaaatgtactctgacactcatttaatgtaccctgagactcatttaatataccatgaaatacatttcatgaaagtacattacggaacaaaatcgtgtcactatatactaatatgttctttttagtatatataaagaattattataacttattaattaaaacaaaaacaaaaacaaattcgtactcctgcccaccaattatcttgtgaccattatttacaatattgtgtatattaataaacaatattatttacttaaaatataaaaataagttgatgatgatgataaggataagaataactcccgtaatataatagtgaggcacatcgtatataaacaatgaccatgcatgtgtattttatatactatacataaaagacacttacaaaatgtgaccaaaaggaaataatacttatatgtgatgaaaagtagatacacagctataggtatatttaataaaatgaccaattattgatgtaggacaaaaaagattgatgacatgttacaaatattcttgttacaaatacttttgtgttgatgacaaataagacaatacattcttatattattattaattttatttttaataattttccattgctttcaaatactaaatacaagagtttcaaaaataacatcttattcgtatttcttgataggtgacacgtacgtgtacttctatgaagtgaaaattacttctataaaatatgagattttataaaaaaaaaagttacaaaagtatatgcatttataggtttgtcacacttctatgatattttttttacatttaaaattttttatggtatttaatatgccatatttttgtaaacatattatccaaatctatatttcatgtttttgtttctaacttaattagttttatttttttagaataattacataaggca

SEQ ID NO: 318459 - DNA, 589 bp, Cannabis indica
aataaaagaaaaaccatacgtaacttaaaagtaataagttatacaattgataactaactagctacaacgaaaacaaaaatgaaacaatatcttttaggtatttaattttaaataggtgtcattctattttcattaggtgatgaaattataagagatgtattataaaattaataatatataaaggttatagtattattgatatttgatgaactagagaaataatgagaaagagaatgtcaaatgggtgagctgtgatgatagcctgtctttctaataatctcatcatcatcaccttcttaattataattaagggcctaattaataatctcatctcattatagctctggttgccgcgtactactatatatgtatatacctctataactagctatagagatcgattgatattgttgttattgattaattaattttaatatatatataagaatatgattttgtcccctaatgtattttcacggaatgtatttcgtggtacattagatggatctcagagtacattaaacgagtgttagggtacgtttctactttttaaccctaattacccttagattaatttcaaccgtcagat

SEQ ID NO: 318460 - DNA, 535 bp, Cannabis indica
ttagggtggatggtgaattagttgttcatgttcgtttctcatcgtcgttgtatccgccgtaaaaaaatgaaacttaagggtgagtctattatagtcaaatgctcagcttaagactcaacatttgtctaagttattatacttgagacggtactttgctgatactcagcctcctatgatgaaatttgtctggcaagtatccttgggtacaattggctaaaatttggtttataccttatcgctttgtcaagtttctcacctccccttgtctcttctatgcaggtgatcttgagtgacagttgggggaggtgacaaccgtgtcgacatatatttagttgatcttccttttgtggactagtatccagtctattcctctagcagcttttcgagtgatcttgaggcttatattggtccattatggcaaggatcaaacagacttgccgcaaggtgccacctttcgaccttcacattgcaaggctggcaacaaggggtagagtgttgaaattattttaccaagatcttagatttactaacaagt

SEQ ID NO: 318461 - DNA, 635 bp, Cannabis indica
tttttttttttaagaaaaaagaaaaaactctcaatatagcgaacagttagaagacatgaaacgccattgctaaaaacaaaaggaaaagtcttctgtttttcaaggctgcatgagtataggtgattgaggataaagatcacgagccgaaatgaatcgaaaagatacaatctttttatggttctgatataaatggtgaagctgatatatatagatacaaatatatttatttatatataaaaaaataagaaaaaaattgaatctggaaaattagaaaaaacacgcacgtggctgttttagggtggtgacgaggagtaatgagtgctttacacatagtggggggaatttgggtatgttgatgtggagtgactatcttctttgaatcataattagtaggataattaggagttaaaaaataatttaattaattaaaatatttaaaaataaaaataattgtatttaagtagatttttttgaattaaatcttgagcttttattaaagtaatggcaactaatttaggagacaaaaatctttttaaatagtacgacttgtgaagaaacaaaaaattcgtgccatataatgagcagttttatttacaaatcgtttaacaaaatataaagaaacaaaagacaaacgt

SEQ ID NO: 318462 - DNA, 2547 bp, Cannabis indica
ttgtattttgtttcctacctcgctagttggagcaacaagtagttggttcaacaaatttattcatcattccattactacctgggaacacctgtccaaggacttcaaaaaacagttccaggccgcaagagataggcgacctgaggcgtccttggtaatcaatataaagcaacagccaggcgagacacttaacatatttaagtcgttttagcacgacagctgcaagagttttaaatctagatgatagtacacaacttactgcccttcaggcggggatcactactgatctatccaccgcagggggcaaattgtgggacgacttacagggtcgtctagtgaagaacatcactcagttcaacagagggctcatgtgttcatccaaaaggaggaagcttgaaaagagatgaacttgctaaaaactggctcaggaggcaaaccaagcagtgtttaaacaattactctctcaactagagctgataactcaagggccactggctcaaagagaaaagacgattttaaggggttgtcaaaggacaaaaaaaaacaaaagaagcacgatgagtacgtgctagtttatactatttataccgagcttaatgaaactcgagagaatatttacctcgcgcatgagtgcaaggttgcgttcaccaagcccgagcccatgaggcatgccaggcataaaagtgatcctaccaggtattgcaagtaccataaggacattgggcacacaacagaagagtgtcgtcagtaaaaagttgagatagaaagtctcatcgcccgggccacttcaagcagtatgggtcctctatgacccatactgaatcataaattctcgtggttctaggcaaaccaaccacaaagtccattgtaacatcctcccacttccactcaggaagcattaattgttgtagtaaccctctcggtttttgatgttctgccataatttgttaacatgtaaagcacttggacacgtattccactacatcattcttcattttgcaccaccaataatagggtttcaaatctcgatacattttggtggtacccagatgtaattaataagctatagtatgagcctaatcaagcatctcttttctgagctcaccactgctttaaacacaaactcgagccttgtaaagtaacattccattgtttgagattgatatatccttagcccaaccagctaacatctcctgtcgagtcttgactaacttagagtcttccaattgtgcctctctgattctttcaaacaaatatgactgaagtgtcagattatgcagtttccctatcacaagctcaatatcagctttaaccatatctgaagccagttgaggtgatatttttatggtactaaaaacctagccaggacctttcccactcagagcatctgccactactttggccgtctcgggatgatacaaaatctcacaatcgtaatctttgactagctctaactactgcctctgcctcatatttaaatctttctaagtgaagaagtactttaggcatttgtggtgagtatagatctcacacttctctccgtataggtaacgtcaccatatctttaggtcaaatacaatggtagtaagttctaaatcatgtgtcagatagcgttgttcatattctttcaactaatgtgaggcataagctatgaccatgtcagcttgtatcagaacacaccctagaccctgtctggatccatcacaatatacaatgaacttttcttgaactgatggcaaagctaacactggttccgtgatcaatttctatttcaactcttgaaagcttatttcacacttattagaccatacgaaccactaattcatttagtcaattctgtcagcgtcattgaaatcttaaaaaatcattctacaaaatgttgataatacccttccattaagagaaaacttcaaacctctctagctgtccatggcctcagccaattgttaattgactcaattttcctcaaatcaactatatttctgtcatttttgacaatattccctatgaaggacacttttgataaccataatttgcacttttgaactttttatacaacctatgatctctgagtcattacaaagccattcgtaaatgttgttcatgctccacctccttctcagagtacataaggatgtcatcgataaacactataatacacttattgagcatatccttgaacacccaattcataagatctataaaggccgcaagagcatttgttaaactgaaggaaatcacaaggaacttagaatgataatacctggttcgaaatgcagtcttcagaatatcttcctcctaaattctcaagtgatgataacctaaatgcaagtcaatcttggagaacactctattaccttgaagttgatcgaacaagtcatcaatgctaggtaatagatacttattcttgattgtgagtttattcaattcgtgttagtcaatatatatccaaagggatccatcctctttttcacaaacaaaatcacagctccctagggtgatacacttgttgggttttatgccctaaataaaactaaatttcaaatataa

SEQ ID NO: 318463 - DNA, 606 bp, Cannabis indica
aatcaacttaatgatctttgaactgcatatgtaccaaatattattactataacttaataatcaatttttggtaataagatagactcatagactataaagaattaactttaaaactacgtaaaaaccttcttaatattattactataactattattgttattctaaaatatatttattaaattaatatttagttatttgttaagaaaaaacggtgttaacagtaattataacgaatactttgataaaaaaattattaaaaaatagtatttcaacatgtaattttaaacataaaaattggctaaaaattataattagcaatccaaattatatttacttagcaaatgaacgtgtttttttgccaatatatatttatatacaataaaagaatggatcatcatataatacaaaaacaaactacttgtttttgttggttttttttatgttttatgttttttcttatatatcatttattttggtaaatgattttttttgtatttattattagtattttaaagtgtttaatatcatactaatgtggtacctaataattagttaatatttttttggttcttttgttgttttttatttttttattgatgatttctg

SEQ ID NO: 318464 - DNA, 1993 bp, Cannabis indica
aaaatattttttaacaaagaagtacctgcaaatcaaagttagccagaacaaataaaaaactccccctgagaaatacaatcgaataccgaaagacaaaataacaagctaacttttaaaccaaagataatcacaagtaacaaacacaacttgtaatgccctaactattaggcatgctacccaagatacttaagaaagcctaatcccctagacgggattactaataagattagcgcgaaaattaaattttaaatgtaagcggaatgaaaataaacttataataattttaactttacaaaccaacaaaaatacatgtcttgggatcccaaaatattttacaaaatactattacaagtcttatctcatcatctgacctaagcggcaaaacagagttacagaaaatcatcactggtagaccccaacccacttggtctagtgtgtcccgaacatgtacatacaacgtctagctcatgcactcatggctgattaaagatagatttaccatttcctgcacagtagagcacccgtgagccaagcccaacaagacagtacaatataataacaattataattaactcatcacatagtgtaatgccatttcatatttatctgtatgacacagacctgcgtgttacgctcacacgactatttatgtctatgtggcatagacccatgtgttatgctcacacgtctaattacaataaggccttaaaatggctcatctcggttctagttaccgagtccaacctgcttatacacatcatatatcactagggtaataaccctaaatcctagcatatacatataattaacatgacatagcatatacacatcatatatcactagggtaataaccctaggctgttaaaccgctcatgttagggtaataaccgtaatcccaattactaattactcacatatattatttctaatataagtgccaccgcgcatactctacgtgctaactactatcttacctgatgtcccacaatagtagagattccgaatccccgggtgatcctgaccaagtaccggtaatcctagtcacaattctaggatttagacctatagggttaatccctaattccacgtttataaaatatatacatggcattcaaaatatatttaatcacatagagctcagaacgagctttctaacggtctatagaactcccgaatcggagtctggatcacaaaattaagaatattcaaagttgcattagaatctgcccagaaataagggggcgggccacgacgctccccacatggggccgcggcgcctggaaccaaatcccgggctcccacacagaggcgggccgtgacgcccaaaagctgagccgcgacccctgggttcaaaacccagaaaacacaaaaaccagcaacgtttttcatggccaaaacacaatatttcaagctaaaaacacaaccatacaccaaattaaactccataataataactgaacatcacagagagttaaaacaccaatcatgcattagaatccatcaacataaaccctcaaagttgagtttaaaccctttccttgctaagctccaaccctagagcaaaattcacatgttcatccatgaagaagctacacaaagatatcactaaataaatccaaatttcagcatgcttttctaattatctcactcaaattaacaattagaaatccccaaattcacaatcccaagcatacacaacacaccctctactattcacaacaccaccatatttacaacatcaagaacaacccatatctcataaacatgcaaatcaatccttctccaaaactgaaaatcattaaaacaacatcaatttcagctactaaaataattagaaatcaaagacaaagaaactacctcaagtttcaaactaagattaagctttaacaccaccaagaaccaagcttcaagatcaattttcttttcaactcttaaaaatttgaaaaaaatggaggaaaagggggtgagagggggttcggctatagctggaaaa

SEQ ID NO: 318465 - DNA, 855 bp, Cannabis indica
agtaatcaccatcttatcaatagactttctagcatcgaggcaagtctagaaacctgatttggtgtagtctaagagtattgaaataccacccttatcgacagacatatagctcctcttcttgatcttaagatttacttaattatcttccaatgatcctttcctagattaatctgatacctactcattataccacccaacaataggtgtctggtctaatgcatatgttaggcgaaaattagtctaagtttcgggtcatattaggcgaaaatggtcaaaatgtttccttatggagaggtggaactaaaaggtgaaagccccgagactttcaaagtcaacaagcagtggttaaagcaatacttgggaggtaaatttgaccaagccaagtccaccatgattctggcgccactgtgaagaactcggtcaacgtctagctgagcgacgataaagatagcgctattgggaggcaacccaatttattttgtattattttttcttttgaatttttagaagacaattgcaagtattttgtagcatttaatttgtttcattacattttgattaaattttgtactattttcagtgtaatcaaaatagtgaaaatcgtgaaaaaaaaaataaaaaacatgaaaaaaaatagtggtttgctacagtggtcgcgacggggcacattgcccatcgcgacggcaccacacaaaggcatagtcgaaaaaaaagggccaggctacagtagtcgcaacagggacattgcccgtcgcgactgggaaaagcaggaaaataatcgaaaattctctgcctattcccgtcgtgacggggcaccttgccccatatgaatggttttaaccatagttctcttgg

SEQ ID NO: 318466 - DNA, 466 bp, Cannabis indica
ttgagactgctcacagagtctatatcccttaataatgaggttacaccagataagagattaagaaagcccaaatgcagaagattccctcgtacaaaagatctcaaggcacaagcgtctaaagagacaaccacgataccaagtgaaagggaaagcacttgtcgaacatagtctacaagaacacttaaaagagttcttatagactaggggcaagtgttaaccccaaaaatcagtagggttaactctcgagattagtcaacatttagtataacgaagcaagacacattgactttaagagtcagtcgaggaatgaatgagtcaacacatatggcccgggactgctcgaccaaaccctagcttgggtgatcacttggccagggttgaggaaagactactcaatcacgagccttaagatgtcactcggccatgtgtttgagatgtcactcggccatgagagagagagcgagag

SEQ ID NO: 318467 - DNA, 1109 bp, Cannabis indica
ttaatttttaccttttttttttttattactctttaatttatatccagttttataggttatatcctaattatgtgcgttagagactctaattttaataaattatgtgagattatatttagcactttattataaaagagatttatcaattaaaattattttattattatatttagttaaggtctaataagaaataataattttcaacttacatctcaagctaaaatagttcaaaatgtaaaatatataaaaaaaataataaaaaaaaaagaaatgagaaatagtgtttgtctatattttacaaataatttcccctgtctctttttattttttatttgatttttactttttttttatttatatgaataaatatatttaaaaaaaactgtacataatatttaaatgatataaaaaaatttatacatggtgtaatataaaaatatttaagaaaaaaaaaagaattttagtaaaatattttgaataatatttttccaaccatgctttagtaagagtattcaagaataaatagacccttgtgcttgtagaatttcaccttttaacttttgttatgttgtaattttttttttttctaaactttaaaaattattgcaaatatccttttttcatttcattgaccgttttctttaaaaatttgttaatatagtataaacataatgttagtttctatactccaaaaaaaaaaacataatattagtttgacacagtcatcaagagtaaaaataatacataaataataatttaaagtttttgtttgtacgtttaataagttaaaccaaataagcaaattgttaaaaaaaaaaaaagaatggggaaaaattttcacaataacaaaaaactaaaaatttcagtagaaaaattatgggcggagttcgtcatatttagaagggatattggcggctaaaccacctgaactttacggtttgtaacacttaaccaccaaaactgaatttttggcggctaaactacctaaactccacttccgttttgctctgcacacctccgtccaaaaatcacagttaagtgccacagtggactgtccatgtgtacacacttgtacacgtggcaagtttttagtggtccacgtaatacta

SEQ ID NO: 318468 - DNA, 1818 bp, Cannabis indica
ggcataaaacccaacaaagagtacatgatacaacaaagagaaaagtgattacaatcataaaatagcctgttgttctaagcctaaagcttgcttagctagatgatgagcggcagagttagcctctcgtgggatatagctaatcgaagtttgaggaagagaagacagtaagctaatgattttgataagtaattcttacagatgaatgttattggtgtgacccgagcgaatagcatgtacaagagtttgacaatcaaattcaatgtgttgaaccgcaagtgagttctcttgacaccattcgagagcgagttgaagagcatgcgcttccattataagcggctggtgaacaccttttcagggaatagctaaggttgcaacaacatctgtgttatgatttcgtactatcattccaaaacccatcctgatctcttgtatattttgggcagcgtcaacattgagcttaagatgaccagtaggtggtggttgccactgggatgaggaatggctagcatcttgaagcttgtgtggtttgtttctttcattgtgttgctggtattggagtagataatctttcgtccactgaatgagcgctggggcatcttgatccgactgatgatgtaatacttgattcctgcaatgccaaactttccagaggagacagataaagaactgaaagtctttgagtgtcataatatcagtacacatatatagagtatcattacaaggtaaggattttaatttaataatatggtcataaaagatagttatttccaaacattctggacggatgaacaaccaaacagagcatgtattaaggatacctagtctcgcatatatctcggtatatgcacgacttgtataatcctctcttggtcctccttattttatactatgcgaggcacagtatgcgactagacgctgtcaaggtcgcatcatctcgcgagtttgggtcaagcgaggtaaactctcggaaagtcattaattaagagttcatccattgatgtcgcccaattagttacactacggtcgcggtagtaaacgggctatgtcgtatccacagggaggtaaattactactaaagattagtataaatagaaaaagatagaaattggaatgaattaaaaataatgaaatgatgaggtgagaaagttgatcagataaagagtttggtaaggtagaaatgtagttatacaaatcctattctaataccgatattaattcgaacgcagttgcaattctacaccattaattacaactggaagatatatatgttaaaagcacaaattaattaatcttgcataaattgaatcttacttctaatttcacagcatatcatattatatatcataaatcgacaaaataccactattggcagaatgcagtaaacgacatacaatataataaatataccaaaatattaatagcctaacttacataagaaaagcatgactgaacttatataaaagatactattaattttggaagaaaaattagaagatgaagaacaatttaataaatgagatatggagatgaagcacacaaaaaaaatcaatatcaataatagaaataagaattacaaaagctacactctaacctcaccaatattactattctaatacactcatttttgtcactaaaataagtatagataaaatagtaataagagtaaaaaataaaatgacaaaataattttctactctctctaaaatctgatgcctttttacaatgccaaaaggttgtatttataggcccaatttattccaaaagcttggcattttcgtatagggaaatttgattttctatacttacatatacctaata

SEQ ID NO: 318469 - DNA, 1384 bp, Cannabis indica
tttttattattttttttcacatttttatagatttgtttctttacatttttatagatttttttttactggttttcaattgatttttttttttagagaaaaatgttgctttcattttacttttccatagtaacacttcgtattgttgcaaaattaaaaatcatgttgcttgtgaaaagcagcaacatcaaaacaataattttttttaaaacaacagaaaaataacactctatatttttgtaaaaaataaaataaatccgtaaaaatataaaaataaataataaatctataaaattaaaaacaatgtaccatttttataaataataatgagctggttatttgaaatattaacttttcaaacatttatttaaaatcctttaattctgagggtttttttttaatagaagttttattttgaaaaaaaataattctcactattaatgtctatttttaatatttgtttcatatatatataagaattttttactataaggatgtaaaaaagacctcatgtatgggagtgttttatgacgagtctttgacacgtcattattaagtgaaagttgtgttttgtcacctgcaaaacactacattattatttcttcttgtagttttttaggttattttttttttgaaaaaaattaggaatgaaattaattgattcccattttagggataaccatttttaacaaagaagaaatattttcatgaggagagattaaagattatttttctttttagggattttgcttagatgggtttctcgcagtgacatgagcagctgtatattgaaccttttgtaggctaactctaatttaatagtggaaaaaaaaagattataatggtttagatgggtgtaggctgtttctgcttcaaaagtgaatggaatagttcactcatttggtatatagtggttaataagattcgattgcataagagtgagttatggtgggagtctggagaggcttcgtggatttttgggtttagggagatgcaaatcgtgcaatttttagcttaggaatttttggagtaaagtaattttttgttctatatttcttctctttctttgatttttgagaataagataaactttcattgagaaaaaaaaaaagctattcccaaaatagaggagtacagtccgattttgggttaggaaactcttggagtgattaatttttcgttctagtttatttatttatttcttaagatggagagaaaaagaaaataaaactacaacaagagatgggcactgataatctcaataaacaaaaataaccaaatacacaattatagttccattagtttgtagaaaaaaattaaaacgagtatacaatatacgttgatgagttgtaacaagatcttagttcgttgaagtagatcgtacatc

SEQ ID NO: 318470 - DNA, 760 bp, Cannabis indica
aagaatatcagtgtgataaggatttggatgaatttataaatcaaataaataaatgatcacatgaacaaaataacacattaaacaagtaatgaaattaaatctgtttctttattgataattgaataaaaaagattacattgcaatagagttttatttagggcacaaagcccaacaaaaataacataatataatattgttgtgaaaactaacatacatatttttgtatgaaaaaaattaaatcattcaaaatgtcgaaaaggttatacatccgtattttgtattttatttttttttgtcatttttagatagtatgaaaaaatcaaaaaaaaaaaatactattggagaaatgaaactattggaaaaggaaacttacaaaaatactggaatttgagttaatttttacaaaaatactaacacacggaaatcttttcaaaaatgtttttataaaacaccaggaaaacacaaagcaaaacaactcaaaataacagtagaacatcagtaaaacaccagtagaacaccagtgaaaacttaagacagtatactgcagtatgaaacttataaaaaaatacagtaaaaaataccgcctgacaatatttttataaaaaaaataacaaaagttagtataccatgtaaattttcctgatgcttcatttcaaatatttctttaaattggacccacaggcccaccacctaaatgcctaaaaggctaataatgacccctttcattttaaacaattttaaacattttaacgattttttt

SEQ ID NO: 318471 - DNA, 791 bp, Cannabis indica
actggtttttggtttttttccctctcgactagtgttcttgctttctcttaagggatgttggtatggtttgtactgggtcagttatgctctatcctagagaccggacaggtcgtttgtgccctataagggttcaatccctttctcgccttcagggacgtttgattggaacctatttattgttgctgattggcagtagattgactatgatgcagtgaacctattggctcctttggtgagtctactctttgatgaacttctccgttttgggagatttggagcttggaatgttcaagctttcaaatggtggattaatagtctcgatatcattctgcgtaacttcatgaaagtcctctcatggaactattgtgggctttgtcgtgctctgatttttcaacatctcaaggtggacttaaagactcatcagcctaatatggtcttcctctttgaaacaagacataaaagtgacaaagttaattaagctctagtttggtagcatggaaattggtgatttgttgggattttatgccctaaataaaacctgtttcaatctaatctgatttgttatcaatagaagattagaagtcatttatgtttacatgtagttttcatgtttatggtttaatgtatgcaatttttgtttaagtccagaacatatagttattcacaattacagtgatgtcaacacagtggaaggtaattgtgattatatgcttcaaaagataatgtctcatgattcatcagtgtactggatttccactgatgtgatagtcagcgataaagcttacttacac

SEQ ID NO: 318472 - DNA, 1140 bp, Cannabis indica
aaaaatagtatttattattattattatacattgtgttttgcaatgatatgtgcccgtcagtatacataaaaatcaccgttgtgataattaatttactaaatattttttttctagaaagagaatttactacatactttataaattgctaaactaactagtagatctatgcttttatttaattaatcttctaattactgaagatgttcttattagaattagctagcccacattagtgctactggtccactatatttccggcccactttatttattgggttgttatctttcttgccctatatataatcataatgtaaaaacttaagattactttttggcatttctgtcgtgatctaatagcagccatataataaaaagagttttctccttcctatcatggtatcagttgaacaaaataaaccctaaaccgtcgcctccgactccatcttcttccatggctccaacaacaaggaattcctccatagctgtcgcctccgtcagcaagccgtcacaacctcccactgccatctccagccacgatttctcctccgttgaagccactgtcgccgatgtcgtcgctctgcccccatcgcctccgactgctccttccttgacggacacaatcggagctcctccttccatgtctgatcctcccactttcggtgtgttcggctccggttacgttgccgatctccccacttgtggaacaattggacaatctttaacagcttcaatcagttccagctcggcgctgacgtcttccttcacggcttctccacttcacattccgcttctgccattctccactccaaccttgaccctaacggttcaatagatgacttccatctctttcggcaccacaacaatcctagccaccaccttcggccctccccccgtccagaacccttcatttcttagtggtaatcttccttatcttggacatcaaggccaaatgccttttaatgataactctttgtttacagctaatcacggcttttctcgtgctcttcttgatcgaccttcccatgatgaacgtactccatatcatctaggaactggagatcacccaaataatcccattgcttcatttctcttgactggtcaagaaaatttccagtcatggaagcatgcagcctctattaa

SEQ ID NO: 318473 - DNA, 1302 bp, Cannabis indica
ggatttccctgcttaatgaatacattcctcatcttaaatgaaaaatggaagtgattggattttgtaccagtagccaccataaattaatttgataccacaataaaagaatgtgatacttttagatgttgaatggagttttccattctgtcctattcactcttaggtggcgtttggttagagataataaaatgaaatagaaatgaaacaatttttattctattcttttgtttagttgcatttaaaaatattagaatatttctatcattttagtagaatgactattccattttgaaatggatggaatgaacatagtaaaaatttaataatttttatcaattttttttatgcattttaaatttggttcaattctattcttgttcctattcccattccattactattcctatatttttattccttcttaccaaagaccaacttattgatcattgatacagaatcaattgttttctttctttggcctaattcatgttccgagtctcacattcacatacaccctagtacacgttcctcgaccctgaggacacccccatgaaataatttctggtaaaaacttttggtaactataatagattcctgtaagtagactagagcccacaaaccacaaaacacaattccatccaaagcacaagaaggccaaaataaatcagcataaaaaatgtataaaaggtaagaaaacagcatgctgcatacctaattgagtttgatcaatccgagccttgacttcagcaataattttgaagcagtaatcagtgcacacatggtagggattataggcgtttctgcaatctgggtgtactctcccttcctcagacattttcaacttttctcaagatcaaaatcaaccccctctctacagtagtacgaccctttaaattacctaaaatttaaacgaaataccgtaaatgaaaaagagaagtgttaaaagccttgaaatttcgtaattaagagaaacattgacggcttataacacataagatcaatatctaatcctaacgtttctttatccctaatcagagattcaaattttggctcaaacaaattcaacaattttaacctcttaattcatacctttcaaagatcataaggccgtccgaagctcaaacttgagtaaggagagagaggagactggcgacagctagggctagggcttgaagtagtagaagatgcccaaatttcactacacagaggagagcacttgccttggccgtatttatactttcttttttttttttgtcctttcttttattagcttaattttttttttttaaattttcttaattt

SEQ ID NO: 318474 - DNA, 1259 bp, Cannabis indica
tatatatatatggatatatatttaagtagaatttattaattatatattatatatatacctcaatacttaaacctacaaatagttaagttatttaatagtttataatatatttactaatacattaatattactgttagagtttttattagtaagaaaaagaaatagttaaaaaataaattaaatacaaaatatatatatatatatatagagagagagagagagagagagagtgagcgagaatatgagaacatccattaatatattaggagcttaactgatttaatacataaataagagaagtacgtactactaacatatattatttcattaatatatatataactacatatataaaagcacaattaaaataactggaagatgttctcactaagtggctatacccttattacttggtatagtaaggtacataaccttgagcagcggcttgttttttggtcaagccattctgttcaccattattgccactgcggccgccgccatattcagaaaccacatagccgccatagcgctgggccgcctggttgcaatctatgaccccggggccggtgggcagcagcttcctcttgggttgggagtagtctatgacgttattaagatttgtttgctgatgatgaggataagaactacgctcaccaccatgactatttcccatatttgtaatattacactattaattgattgattgtttttaaagcaaaactagcttgatgtgttttgtagcttacttaattatgagctttgggaccaaacctctcatgcattatatagacacaagttgcttttcacttttttgtgtttggattcttttcttgaatggaattacgattctctccctagctatatattatatatgtataaatatttatactccactcaaacaagctatagtctcaaaatattgtatagatactcttgtactcaatttgatttggccattgttatgaaacgtggccatgtagttaagtatacataacgctacttaattaatattgtttactgtcatatcatatcattgcttaattttaaagatatattttgcgatatcaacaccacgtgttaattttaaagtattatatattttgatgattgatgtttaatttagatattatgtacaacggtctacatcgatcaatttggtctgatactgctgatatggattgagctttataatacgataccaaactaatacaagcacgattcgatataaaaaaaataatacttagacacaataacgacat

SEQ ID NO: 318475 - DNA, 1474 bp, Cannabis indica
aaatcacgtaatacgcctatgtcagttagggtgttacacaagcaaagatagaagtattcaagtactgacaaatcctgactggacctacagctagccggccagggtggacaggttccatgcaccgggcaaccttcaataaggctagccggccaagcatacaggcatgacccaacacgtgtttttcccacatgccttccaattcctcctcagtattcctatgactttggagcagttcaaactgcccacgattctagaaattcttcatcaataaggaataaccctattatttaggaattattaattatttattctgtatttcaaatatgcagtgtaacttctttatttgtaagaataattctatgtacatcttataaaccctaataatatataaagggtcatcaacctatgtatataaatacgcttagaattactaaagtaataagtcctctctcttttctcatacttttcacttgcaaaatatactctcattgtaatactgaagagagcttagctaaaaattacaagattatagtctgtaatctgcgttggtattatttcaagagtgaatacaactaaaaattagagtaagtcattacctgaacaaaggggccgaatctcaataaatctttttgtctccacatttattattattccacacgtgacaatcataagcaaatttcgatcctagtcagactccgcatcggttggttgaatccacaatcaacaatgacttttcttaacaattgtaaatcatcatttaaagtaattttttcctatagttataaacagtcttttaaagttctatatttttatgatacctgtatagctaacagtattaagcatcgataaaaaatagtataaaagacaattataaaccatggaaaaaattaattttgtagtagtaatattgtggaaggacccaataaaattttgatataattgaataaaatttttaattttccgtaattaaatctataaaaatattaagcggggtcaatactaaatcttcagtactggagttgggtttgaaaaatcgtccctccttcctttttcgcaccaattaaggaatctaacccaacttatagaataattttactttgcagaagcatgcatatatgtttttgactttaacacatatataaatattaataaatttaaacagttcaagagaccggcccctaaatccatctattgtgtatatatatattagtgaataagcttattttatattgattaccgattaattaaaagatgaaaactcgattagtatatttgtcagtctccccgatcgccacgtgtcaacctttcaactgccctttacgtgatatacataacttatacatatagcacatgcatgataatcttaattgtgttagaaatcatattaacgaagaaaactctgccgatcgacatatagtagtgtacatgtactgatctcatgcatgactgtgcatatataaatataaatataaat

SEQ ID NO: 318476 - DNA, 1014 bp, Cannabis indica
atgaatttagtcaaaatatattcaaaaactacaaaagatatatgaagtttatctttgtattttgtagcaccaaccgcaattttttcagaaacaaatactgaactgtcatcctatatttatctttgtagagaaggcattctaatgatacacaacaaaacaaaatataaaatttttcataaatagtagttaaattatttttttttattaaagagaaaaaactcgaagtaatcttttaaaaataattacatcaatcatcagtcacaagaccaatttatcaaattcacatgctattatcatcttcatttattttattataaaatcacattcaatttcgttgttaattctaaaaattttaatatttctcacaaaattatcgtctttctatatattttaaatataatatgttatgtttctaatttctgtattatttttgtatataatatacacatcgaattgttatattttagattatatcacttaatataagtacaaaatatatatctgtagatggtatatgtaataataattaaaaaagttgaacaatttcgcgcgacttaattctctagttatagtataaatcataatcaatccatttattaatctctttgcattatccactttagtgttattcgtaatcaatttacattttacaatgtatataaatttatatatatatttggaataagagagaaataggggaggtagggtaggaaaattaatggcagaatgaagtaaaagagaattatttgagggagggaacagctatgaagtggtggccatcgatggacttcataaattatagcaagcaaggaaagacagcacacgtgatgcattagggaagatacaatgacttgagcagactagtggggtcccactcggacattcatcataatcatatctgttatattatttataacaaaatatatattaaaatattatatgttaaaagtaatgtaagaaaaaaagtgagaattcaataaatattataaaataatataaaataaataagaaaaa

SEQ ID NO: 318477 - DNA, 860 bp, Cannabis indica
gacttgattttttttataacaaattagaggttattcttgaatagagtattcttaaatagaagttctactgtagtttacaatctaatggaacatttttctaattggagacccgaactaagattaaattaaaaaaaacgagtaaaataatcagtcacctaattttcaaattatttgacaaaaaaattaaaagtaaaacagataaaaaagattacagcattatagttaaccttaagaacacttaaattcaattttagttaccgtacgttcagaagacaaaagtaaaaactgttaaagtaggttcattcaacctcgtagcttgagcactcaactattatgcaggtacgtaactgtactaataacaaccacttgttatttctaactactaacaatgatttgatggtgagcaatcgaagaaacaacgaagcaaaacaaaacaaaacaaaacaaaactatatatatcacaaaagcaagattaaaacactcaaaatcatatcacaaagacaagactaatcgcagtagcaaaaattaaatcgcaatagtaaattacaacttgattaagatgtacctatgcttacaaaaggtcgacgggcctagccaaaaaaaaaataaccttctataattataaatttaagaaaaaaaagttaatttttatatcagcttattatattttgtttataaaaatgtataaatatttacccaaggaggagattcgaaatcccagacacatataatatagttgctaagttatatttagcctatgtttcgggtctaatagttaagcattttttcggttattagtgtctttcaaagcggttttacgcttgattttccttgtttcaggttcccggggcattaaagtt

SEQ ID NO: 318478 - DNA, 617 bp, Cannabis indica
tcgtcactagtccctttaattaccatgtaattgccgtaaccgaggcttacgttgtctgacatgtcctattataggtgttccaagatattttccccatgctgcattaaatgcgaggtgattgttcgagtatatcctcattgtcccggagatgttgtattatatgtctgctcccggagaggaagggtatgctcattgcacttctccgggggctcacttcctgaactacgcttgttcatttgaatatgtctccactaattcttaggtgaggtgtccttttggtccacgtgtaatgcgtgatcggggcaacatattttgggaaaaacttgaggcaacaagaagaaaagagaatttttactttattttttaattaagagaccttgtcgggcctaattaataactaagataaatggtaattttatttaataattaattacaattattaaatagataaaattagtatttaaacaattagaataagaaaatggtatttttgaagaaaagataagtctcattaaggaagcaataaaattgacaatttcaaacccgtgggctttcatataaggtttggccaagctagagttcattaagcttattttatcttttttttttaattttac

SEQ ID NO: 318479 - DNA, 929 bp, Cannabis indica
aatatgaaaaaaaattagccaaatttcttttttctaaatgccgaaacaaattaaaagtgtatcagtacatccttttaacggggtgcattgtagaatcacccaataattgacattcgagtacataaacttttaaaattcccttttcctttacagtttttttagcgaactccaattttcaaaccctaattcccaattttcaattttgaaatttgatctttcttaacctcactggctctgcaatcctagcttcaccgccgacctttttactcctcaacaatgtcgtttcatcgcacatatagaaaaccttatctgatgaagatgactcaagctataacaggggtaggggagaagtttaaggaggtccaacgcccccagcatggagtagctccgaccccaagcccaccaattctaaaccctatttcttcgactctaaagtgatcccagaaatttggtattttgatctctttacaggtacctacgatttcttcttcttcttcgttttttttttggtctgaaacttacgaaatgatagctaaacttttttatttttattttcagtttcatatagatgtatgtatttatgagtgaatgcaatgttcttatctgttttgatacttatttgagtcctatgatgatgtgtagaatgcgagaaacgtaagaaacaatgagaagaaaatgaaattggtgcactacttggcgtatttgagcagttgacaggttacaagaacaacattgataagtttaaggtttaatgaatttattatcttagttgttcgtctatgtatggctttgtagattgagttttagtaaaattttgatgcagtatttcacaagattttggagttagataaagttgtagtctctttttgtaagtattttgttttaaaatatatatatatatatatatatatagtagagagagagagaga

SEQ ID NO: 318480 - DNA, 2138 bp, Cannabis indica
ggtaaaatatttccaacacagacaacctttatggaccttatgaataaggtgttcaaggatttcctcgataactgcgtcatattgtttatctatgacatccttgtatactttcagttagaagtggaacataagcaaaacttccagatggttttaaaatgatttagagatcataaactatatgctaaattcaagaagtgcaaattttagttatcgcaagtgtctttcttgggtcatattatcaagacagacaaaatcacggttgatctggggaaagttgagtcagttaagaattggccgaggctgaagacagtttctaaagtcagaatttttttgggattagctgtgtactatcgtcgttttatggaaggattttctaagatctctatgcctttgacaaaattaactaaaaagaattaacggtttgtgtggactgacatgtgtgaatctaatttttaagagttaaagcagcggttgattacatctcctgtgttagctttggcatgagaccatgctaagtttgttgtttactgtgacacctgtagacaaggttttgagtgcgttctaatgtaagatgacatgttcattgcttatgcccctcgtcatttgaaggagtatgagaaacgttaaccaactcatgatttagaactcactacagtagtgtttgcactgaagaattggtgacattatctttatggggagaaatgtgaaatccatactaaccacaagagtctcaattattatttttactcaaaaaaatttgaatatgagacaaagaaggtggttagagttagtcaaagattatgattatgagattttatatcaccccaaaaaagccaatatggtagcaaaaaccttgagtaggaaaggtcgtgcaggtttttagtaccaaaataatctctcctcaattagaaatagacatggtcaaggctggtattgagtttctagaggcaaatttcataatttaatgcttctgtttgatttgttagagagaatcatatgtgtacaattaaaagaccctgagttaatcaagttttgagaggaagtgttagctggtcgggctaaggacttctcaatcttagatagtggaatgttactttacaagactcaagtttgtgttttgagtagtgttgaactcagaaaaaatatattggatgaagctcacactactcgctattcgttgcatccatgtaccgccaagaagtattaagatttgaaaccctaatattagaggtgcaatatgaagaaagacgtagtggattatgtatccaagtgcttaacttgtcaaaaaatcaaaactaaacatcagaaacccgtgggttattgcaatctttgacactagcacctgagtggaaataggaggatgttaccatggatttcgtggttggtttgcctaggaccacagaaatgtatgattcagtatgggttatagtggattgtttcatgaagtcatccaatttttttccaattaagacaacatatacagtggaacaatgaacgaagttgtatgtaaatgagatagttcgtctccatggggctctaaaatctattattttggatagggatccaaagtttacttctatgttttggaaaattctctagagggccatgggcatgaagttgaaatttagtacagctttccatcgttagatagatggacagtctgagaaaataattcaaatactaaaagacatgttacaagcctgtgtaatggactttgaaggttcatggaataaatattttccttagttagatttttcctacaacaacaactatcagagtatgatagggatggatccttatgagatattatacgatagaaaatgtcgttccccgatacattgggatgaaaccagggaaaaaaaagtatttgggtctagagttatttcagcgaaccagtgaggaaatagaaaagatcaaggcacagatgcttactttgcaaagcaggcagaaaagttattctgatcctaagcatagagacatagagttttaggtaggagaacatgttttcctacgggtcttaccaatgaagggtgttaggcgcttcagaaagagggaaaagttaaaccctaggttcatagagtcatttaaaaatactcgagaaggtcgtgtaggtagcgtatcggctagccttaccccca

SEQ ID NO: 318481 - DNA, 960 bp, Cannabis indica
aaaaatttaatagacctaaaccaatcaaatttttgatacatggcaatatacttaatacttaacatctaggtaccttaaaagttttagaattaaacttaagtattattaccgctaaaaattaaatttaagtatttatttgcaaccagaaattaaactttaatatttataccacaaattaatcttattttttttaaaaaaaaaaaaaaatagttcaatccattctaaaaccaaacacaaaattacatattccaatgccatccagtccaagcctaatccaattcgaactcataattcataaacgatcactgtaaatgacaatgtttacacacaatattgagcaagtaaacacaaattcagattttgttcacagttacgtcctccaaagtctcaatgctacaaatgtgagcctatcacctttggagaatcggactcatatcagacaactaccctcacaatgatcctctagttgttgaggttcactgtccaagataatgatcgacgatggagcgtcatcaaatatcatgttcaagcaagccctaatcagaatgggtttaactctagacctggaaccatgcgaacaacttatgtatagtttcaacggagctagcattctttcatgtggcaagatcaaactaccacttacagttggcactgccaaaagcagaccaccatcatggcctcgttcatagtggtcaacgtgaagtctccatacaccgtaatgctcgaaaggcctgctctctatgactttcgtgttgagttttgtgccctaaataaaatccatttcaaaataatcagatttactaattaatataagatcataaattattttattttgcatggttcacatgatttatctcatgatttgtcagttcactggatttagactggcatgataatcggtgataatgtatacttacactttggataagtgttatgtcctttccagggcattgacaaagt

SEQ ID NO: 318482 - DNA, 1035 bp, Cannabis indica
tttggcgtcatcatgatcaaaccatctccaaatcaaagcctcattccaatggttttgatggataaagttctccactaaactgataccatctgtagcattcaaacggggttgtggttggagaactccgtttggaacccaggggtggaaccagattgaggtggttttgccatcaccaattctccgacacagccctttggataagaggcatctggaatttaaaattgctttccacagtgtggaatccgcagcactagcttggagatccatgaactcgcgattgaggatgtatttatcattaacaactctactccataggctattgctgtccgttagagccttccaagcccatttcatgaggaaggcaacattgattgactcggttgagcgaaaccccagtcctccacatgtcttggggcggcacaggacatcccaggcaatagtgtgcattactcgtctccctggctggtcaccccaccagaatcacggagtgccttgtcaattttcctagctgaggccaagggaatgacatccgacgccactacatagtttgagatagctgaacctacagatttgatgagacatgacttcccagcacttgatagcagtttagttttccaaccttggacccgttgtaaaaccttctcaacaataaactcagtgtccttggttcatttagttaaaggtgttgttagaattgttttttaacaatttggctagtatattatttttttagacaattttttaagcaataacatcaagtaatattttatgtaattaaaagaataaaaattataaatataatcaagaagtagtatctttaattttaattaatttatatagattataaatttattgtgataataattatttatagtttgtggataaataaaaatgtttgcatatataatagtaagttaaatttcttggcttagctaataaaaagatgaactaataaagatatttaactattttttaatttgtaaaatttgttggtgattaataatattttttcttaataaatgatgaatttatata

SEQ ID NO: 318483 - DNA, 1203 bp, Cannabis indica
tttctcatagcaatgtgcctattcccccttgcaataggaggctattgggcatacggtcaaaaggtaataatttattttctctttttgaaaaaaaaaaaacatattaaagccaatttccaaatttttaattattaatcggttaattttttgaatgatagataccagaacaagggggtatgctaacagccttgtatgcattccactcacgtgacacatcccaattcatcttaggcctaacgagcctattggtaataataaacgccgtaagctcattccaaatatatgggatgccaatattcgatgatatggagtcactgtacactaggaggacgaagaagccatgtccatggtggctccgcgcagttttccggattatgttcggattcagctgcttctttgtggcagtggccattccattcttggggagcctagctggtctgattggaggaattgcgttgcctgttactctagcttatccatgtttcatgtggctcaagatcaaaaagccaaagatgtgtagctcaatatggttgctcaattgggcacttggcctacttggtatggctctgagtgtatttttgactgcggctggtgtttatgttattattgacacaggtattcatgccaatttcttcaagcctcaatgaaaaaaattgggcaagatatcaattatattatatattaagatacctgaatatatgtatacacacacatttcaaaatcaattaattatgtgtaataaggattatagcctttttttttttcattttctccttgtttgtttctaatattgagaaaattatgataaagattttattataatggaagaaaattaaaatgtattacaattctattgtaaagtaatataagaattaaaatagaaaattgattaaatatatgttataatatataaatacattatatatatatattgcatatatataattaaaaaaaagaaagaatataacacatatgtaatataatatatatatatataacaagagaatgtacatacactcattcacaattatgagtgtagattagtgggaatcaccataactttaaggtattacacctttgtccaaaagcttatttttcccttcatttccaagcactaagggaactctctaggaaatagttttggaaattatcaagtcttagggttttctaacaatgtgtttttttgatagaaaacttcttatc

SEQ ID NO: 318484 - DNA, 428 bp, Cannabis indica
aaaaatttttgattttctaagtatagaaaatctaaatttccctatatatatattgaaatggatgtggtacatatatttgagttgttacttttagtttgagctagatatttaaatatctgtagtagtttgtttagttttcaaattttcgcttaacatttttgccttatgtggaatttgcttcctttgctaattttttgtatgtcttctgagatagtaatcccttcattgtttatagtttttttttattcataatttgtagctttattcgaaagaactgtactaaatttggtaaaaccttgacttttgtttttattgttaagaatatttataattattattagctaattaggattttgtctcttaaactttaacatgtactaaattatgtcttttaaattttttgggtgttaaaaattccccataaacta

SEQ ID NO: 318485 - DNA, 1761 bp, Cannabis indica
aaaattaaattttttaataaaaaggaatttttttttgcattaatcaaagttcaaggggtaataaaaatgttaattatttaacggtaaatagaaaacctaatacaaagacataattatgtaaccgttatattttagaagaaatttttaagaagccgtatattttaggcgacaagattagctaattaatccaagaacaaaaatactaattattatttttaataacatataaagccatcactaataagaaatgttaaatttgtccagtattttccacaaaaaaatatctctcaaaactcttaaaatagagacattcctatcactatcagtagggacaaaaataattaataatgtcactatgatagaattttcctatataatgaaacaacttttcctatgtcaattattttgtaatattagtcgaccttcatattcaggaattgatgtacttggcaaaattagaagacttagaaaaatctaaggtcacctttagtaattatatatatatatatttatatatgtatttatgtattaattatttaacaacttgaccacttgtcttgtgttgttactaaacaaactaaagaaaagtatagtaagaaaagtatgaaagcttattataggtgttgagaaagacaataataattgtaataattccaataatacctaacaagaataaaatgttacaaaaagaatttataaaacaactaaaaaaataataaattatttttactgaaaatatatttttataaataaaaaaaattaaaaagaaaaactgaaaatttgtcagtaccaacatatattttttaaatttttagtctattaaataaaattttcttctacaaaaagaagatatatagaactggagtacatatatatataacgcaagagaaaagaaaatcttatgctacataatacatcattattattattattattattgctattattattaatggaaatgaagaagaataattacttgtggtgctgtctctttttgatggtgttatgggcattaatatcatcagtagcagcaggtcttactatggtaaactcccccaattgtccgaacaaatgtggagatgttgaggtcccatacccctttggaatccacgaccaaaactgcgccactaggaagaacttcttgctcaaatgcaagacttctactggttctcctaaactaatacttggtgaaaacttagaagttagcaacattgatgtggaaaaagccacgatgagtgttaagcatttctactccttcgactgttaccgtaagaatggtagcttaattaatcgaaacagaacatctataagtttgagtaagtcgttcacgctctcagattctgagaacaagctctttgctttcggttgcgacacccttgccttcatgaactcttcagaaaataatttcgggcgtggctgcatctccatctgcaatgaaaatgtaaacatgtcggcccaaacctcgtgttcgggttcaggctgttgccagacctctgttcccaagcatatcaattatttatcagtcagaacacgtagcttaaataaccacaccgatgtttactcgtttaacccttgtgggtatgcgttcttggctgatcagaatagttttaacatatccaaaatgcgtcttgattttatgcccgaacaaatgaagaagtctatagttctgctggattgggttgtgggaaaccagacatgtgaggttgctaaatcaaattcatcttcctatgtgtgtggagaaaatagtgattgttactattc

SEQ ID NO: 318486 - DNA, 965 bp, Cannabis indica
gtttttgcttttgacaattgttttggcattactggaaaatgtagggatgataagagataaattggccatgtagatcaatgggattggattctcagtgtgtaggttgatcatatttataataagattgcatggccgagagaggatttaatatcctctttctcgaaaggataattttgtaatttttttttgtcggcattttgttaatttacatattaagaagttttattaaatatataagattttagtgacaataaaagttttgatttactaaatgtcaggtaaattatttattttgtgtatattattattgtgagtataataataattgtgtaaatttattttatttgatggtatatgtatttattaggttattattatttgagatttaataataataattatattaataatatactattatttaaatgggtgcggtatatatagtgttgaattttttttaaaaaaataagtgagttgttttagggttaatattaggatttggggatatatatatatatatatatatttatgtgattcttttagggcttataacgtgcatagaaagtgaaagagtgtgactgcgacagagaaagtgtcgagcaaatcactaagagaaacttgagagtgaaatttcaagttggagtttagagagttaggctattaattattttagtataatttattatattatatgtcatttactgcattctgcgaacagtggtattttgtcgatttatgatatataatatgatatgctcttaagttagaggtgaggttcaatttattcaagattatttaattgtgctcgtaatatttatatcatccggttgtaattaatggtgtagaattgtaactgcgttctgaattaatatcggtattagaataagatttgcataacaacatctctaccttactaagctctttatctgatcatccccttttacttaccattttattatttttaa

SEQ ID NO: 318487 - DNA, 718 bp, Cannabis indica
cttttttatttttaataaataaacaaaattaaaataaactaagttagaaaagaaaaagatattccctataaaaatgggggagagtctctaggaataaataccataccattaatttcaatttcctttaagtaaacataccataaaatctgatggagagaggagatcactccatgccaattcctcgcccagtgtgcatccttaacataaagtctccttcattcccttttattatttcacattcacatagttggttggatggtgtccaatgccactttattttttgttattgaaaaggagagatggggggctacgagtgtggaatgtattattcaatgaagtacaattaaaaataatttacaactcaataacaaaatacaaaaacttagaaattgattgaatagatatgttacaccaccaatactatttgttgatatctaaaatttgcataaagttactaagaatagtgatgcattgttcctttctttgaatccaagcttttccaatgactagtcatattctctgatggaaaaaacaacactcggacttaaaaaaaaaaaaaaagaaataaatgtatgagaaatatttgggcctaggtagacttcttgcaatttaagtgggcctaaatatttggactcttaacatactacaaatagaatggcttcttttattcatcaattaatcaaatttgcctctaattttatatttatttgaaacatac

SEQ ID NO: 318488 - DNA, 847 bp, Cannabis indica
attaaaaaaataataataatataggtatagtttttttgaaatgcaaaccctcaacctaataatacaacaacattacataactccttcctctctctcaaacaataaactcactcccagctgtcactctcactcaacccatttttttaaaaaaaattcaaatctgcatagctctcttctctctcactcattcactctcacactcatctctccctgccccttttttgtgcctcccatccactcatcgaggctccagctccggcagtgttcccccaccctagccgcaccagcaccatcgttcagatctccatccgcgccaaccattcgcacctggaaccaccactgtccaactctccacacgccagccgcacctactaagttttcaacttgtaagtttttttttctcttctcttctcttctcttctctttttcatttatttttctatgttggaaggaactgaaactttattttttttttttttgtttcgtaagcatctcggcggtcagacaaaggctggagttcattgttctcagtgctggagttcattgttctcggtgaagataaactcaggtcttgatcttactttttttgaccttattttttgtgataaatacaatatttgtttgtgtatatgaagttttggtttttattttgctattatttacatatttatttattttttcttataaattatttggttatttttttcactgtaagtttttgctatgatgtttgaatagtatgttgattataatttaaataaaaataaatttgaatataaattgattcttagctactcttgttttgaatattaattttggctaatgtaatttgctactataatagtgt

SEQ ID NO: 318489 - DNA, 657 bp, Cannabis indica
tgaaatttcccttctcatatttattcttttttttttactttttttttaaaaaaaaaatattttcatatttagtttgatcgctactcaaaacaaaatagtcaaataaattttgtgaatgtgtttataaattatttagatttgttttgttttttgttttttgaaaatgttttgcagattcatattacaatgtaaactattatataaaaatataaattataagctaccaaaaaatattttaaagaataagttttgactctttctagaacatttctaatagaatactaaaaacgtatcgatattgctttctaaaaaaaacttgctattttaaaaaatttacaagatttctttcaaaaaaaaaaaaatttacaagatttgtcacaagttaaaaatggtgcaaaattgcaccagaaaatagaagagtaaaacttgacacacaataaattttacatttttattatttattgtattactattaattagtataaaattaaccttatttatttgttatttatattaccaataatttatataataaaattgtaacttttacttaaatattaaagatagtctcacattggtaatatataaaaataaatatttagtgcatcgtgatatattgtatatattagtatttgttataaatattaataattatgt

SEQ ID NO: 318490 - DNA, 3426 bp, Cannabis indica
aatggtaaaaatttggaaggcaataaaaaagaggatggaagtttactaggaaaaagaaacaacatgacaaatacaacaaaatgtggggaggcgagacacaacaagagaacatatatataagaatacttcatttatttgtggggatcaattctaaaaatactgaagcataaatataaatagaaccggtttcataaaaacaaataaaaataaataataccacacaataatttaaaaactaatataaaggacgcgattatatttatcaattatttaatttttttttaactaaattagttccataaaataacaaagataaaaacttacacacaaaagttaagatatattaggaataaaaataacctgtctcaatataagctctctctctctaaaagaattttcccgctctgctagggttcgactcagccttgtccctgtcttcttccctcgctttcgaagggttcccgtttgctgggattgaggtgatcacctccaccatggatgaaattctgaagaaaacccacaatcttcatgtcacggatgaagatgaagaacgagaagttaataagagcttgtcaatcacggttgctaaatacaatttgaggggccgcctttgcacaaactcagaacacagtaggggattcctcaagaaagtgttgggacggatatgacgattgaaggatgtcgaatggaatatcaaattcaaaaagaagttcgacacaggtcttttcttaacttttacatttgcatctgagtcaattcaaagcagaattttatctaaaatgccatggtatttatctaatggggtgctaatcttgggaaaaatggaaaattctaatgaatcttggaagaatgatttaactagctttccaatatggggtcaggcatggggagttccgattgatcttttgactataaacaacacagttcgaatggcagctaaggtaggggaagtgattacaatgcacaattaagatatttccatgatggtagcagatggcttcttccgattccaaatctggatgtctattaacaaaccagtgtgtcctggttttcctctcccctgtgaaggaaagaagaagtggatagcattccaatatgatgaattacctttcatgtgttttaagtgtggaagaattgggcattgccataaagattgtcatcatgatccaatcactatcgaggaggagggaaatgaaggtactactgtgtatggaagatggctgaaggtagataatggggtccgagaaggtgtgcaaggtaatagacaaggaatgggacaacacagtaatccagaggatactatgaagcaaccgacacccatcaaaggaatgactactactgcttctccttctcttgttgctatgggagacgtaagaattgggaatacgaatgggaaggatggcagagaaaccaatcacggccacttacagcagatcatagaaaggggtcaaagtctttaccaaaggactatggtttgaaggcaggggacattgggaaagaggagactcaaggtaggagtgatgatggaagccggggaaaacgtcgaatcgtggaagactatggagtctcaggctacgggaagctgaaaaaatcagccacggtcatgtccaaagaaatttaggaccaagatgtctataacattccaatttcctacgcacatgaagcccatgttttggatggatgtacgccctttgtagtgggaagcagtttgaaaaacatagcaaaagaaataggagaaaggtaacaatgaagaaagaatccaaggcaaagagaggaaagttggaaagcaaagtggctggcatttctcttatgggggattcggtagtcactaagttcacggaagaggcgaaccctgaaactcagggttgcctacagccacgaatcttttgatttggaatgcccaagggttggggaacccttggacggtgcgttccttaacttccctggtgaatcaatacaatcctaaactggtcttcatttctgaatctaaagttaataaagttcgtgcggaatccttgagagtcaagttggggtttgttgggttctttgcggttgaagctcgtgggaaaagcgggggtctcatattgtggtctatggaggtagaaacgcatgttctttccttttctcctttccatatcgattctttcattagaattgaggatagtcaatggtggcggtttactggtttctatggcgacccggatcctagtcaacgatttcattcttggaagctattgaaaagaattagtcgaatgtactctggaccatgggctgtaggaggggatttcaatgaagttgtgagccaaagagagaaaatgggaggcctccctaaaccgggttacctcattaacaacttcaggaaggctttggatggttgtcatttgcgagatgtgggttttgagggaagtgattatacctagtgcaatggtagaaaaaatgatctcatctttgaaagaatcgatcgggtttgtggtaattcagaatggtttgacatgttctcttcagtgaaagttcgtcatttggatcatacaaactcggatcattgccctctgctcctaacgggctatgatcccccacttcaagatgcataatacgactagatggtgaatagattccactttgagagcgcttgggcagatgatgaagagtgcacaaaaattgtgcactcggtttggcaaaaagacaagccgattatgcccacttgggagttaaaaactcggttgggaaattgtggggtggctcttcaacaatggaataacacaaagaaacaagagatgacaaaggcacttaaaggaatatgaagataaaatctccttgctatcccaaactactaatgtaaaggattggcaacaaatggagaaattggaaaggaaacaaaatgtttggcttgacaaagaggagaaattttggaagcaaaggagtagagctttatggctgaaagaaggggacaagaacacaaagtttttccatagaaaggtgagtaataggaaagcaaagaataccattgaaggcttgctagatgatcggctacaatgggttatgggaaagagttacatgggtagggtggcgtgtggctacttcatgaagttattcacttccaatctggctactaaagaggagttggaagatttccaaagaattatcccgaaccgcatatcccaagctactaatgcttacctgttggagcctttgaccatggaggaggtcttcaaggcaatgcgtgacattcatccccaaaaagctccaggtagtgacgggttgcctggtctattttacatgaaatattggtcaactatcggtcctaaagtttcaaaagtgtgcttaggaattctcaatgaagggatgcaggtaaaggacattaatgatacactcatttgcctcattccaaaggtcccaaagccaccccaaatgtcggaatttcgatct

SEQ ID NO: 318491 - DNA, 629 bp, Cannabis indica
tgattgcccctggcaaacaacccagtggtggtagtgttgctactccaacattccgagctcccatcgaatataaattctaatcacaaaaccaaaaccaaaattaaatagcatatatgtaacctagctaattcaattcattatttcatcaaaaaatatacatgtatatatatatttatacctgaacgaatcgagcataacttgtgaggagcacattaaaaaattgttgaatattaggataagtaagttgaagaactgggctgatataataattttgaacgaaatcgcttgtcccagaacttatcacataaatactattagacaatatagaagaagcattggcttcccctaccattcccacaattcttgcttggtattcttcgaaatactccaattgtttacttagagaaaccgcaaactacaaattaatataataaatacacatttgttaattagtctgtaaatatatctaaatatatatacgtaacataacaaatatgaatatagatatttacgtataagtttgcagtagtatcggaatatcctgaaccagcagaagcaaaattagctccacttaaaatattgcttccaattttcgcttcattgctcagataagcaacttggtacgtttc

SEQ ID NO: 318492 - DNA, 543 bp, Cannabis indica
tagggttttgctaatccatttttgaaatccagggtattacaactatgctttagatttatccttactacatgaaataactaagtaatagcgatagtaaacaataattctcgtaagtcaatcttgccaaacaaaaagttactaaggaaacaaaagcaatcacaaaatcaataacatttccaaactagggttcgagacatctccccaaccctaacaagaacttggcaatgccaatacatgcttaacatatcttgcccacgtacacatcgtgtgagttaaggaagttttacttgtcttataacatccaaaaataagtgcaacaaaataataatggaggtactattggccccaaaaatttctattagtggcatatgtagtaaaaacaacaaataagaaggcaatttggccagtctcaaggggcaagcttcctagtgtccaagtgtcaagtcctggtcttgtgtctgcccaaattcagcagcttgatcgaactaagcctctgcaatttctgaatctccttgtcggatagcttgttctcctcggttggaa

SEQ ID NO: 318493 - DNA, 5038 bp, Cannabis indica
aatgctattagtttgtacaaaaaaaaattaagtaatgaaacatacttaatttataaaaaaaaacataaaattcacaataattaattatacgcgtatgaaaaaaaaaaaattatcacaaatataattaatcgtttaaatcttattttggacatgataaaatatttcaattaccttaaaacaaagataatatttactattaatataatataataagataaatgacattataagtatttaaattttttagtttgtaaatgggatgtatacatgcaaaaatacatgtctctatgcgcataataattaggcctaatatgaaaacagtcaaatgcatactgtataaaagtgcaatggccaataaaaaccacacaaagctgcaaaaggaggaggaccagactccacaagttgaagaaaccctgctaaaaatgcataatacctcaaatcaaggtttctctttttcttttttggttctaaatatcaaaagaagccactgataatcagtaccacacaatatgaatatcaataagaataatacattttgtgtgcgtcacatttatttttgcacagatgagttcatgattggtgtcacatttttatggaagcaacagtaattcactagtattaaatttgtatgttaatgtgatattcgtatacaattggtggtggtgctatgcacactatgttattgtggtgtcccagaacaataacaatgatatgtcactactatctatggtagatcatacttaaaaatctccaaggcctctcaattttagtagtgatgttcatctagtcaacaacttcaaattaaggataacagtaatgagtaacaaattgcactagttactccagtgataagaagcactgtttcaggagtctacagatatctaaatttgaatatgtcccttgtaatagcagcaaaaatcttctcaaaatccacaagtcactattatacatacaattttctggtgcagattgtagccgtaaatcacccaaaaacattagaagaaaagaaaaataaaaagagggttgttgcataaaatcatgagaagcctaactctcaaagtcaaatgtaatcttctctttttcagataatattttgacccatccatcttcatgtgggaactgccgacactagttcaaaatttgtacaaagcaagcataacaacttcaaaactagtctttatttcattgtttacaattacatcttatctacctatctgtctgtacacatacatgcataactttcatttctcaaaattagaatgaactaaaaactgctccattatgggatcagcttttcttcactatataatactttatgccaaggtaagtaaaacaaaatcaaccagaagcaactcacaaagtcacagattaacaatcatacacaactaatgttactattcaaatgaaattgtggctaaactaagcatgaatatcgaatagctctacttattggcttcttcattaaaatgtattaagagtttttccatatttggtatgcctgttgtctaaattgtcatgaagcactcccaatagctctttcaaaataaagatacctcaaaattttaaggaacaatggagcaaatacacatttcaacatatgatgtaaatttcttctctatttgaaaacatctctattattttcaaatgcttctctacatgtactattcttttcaaaaattattttattcgtgctataaatttttttaaaaatatagtcttatcttgtcttttgacatggtatgtttgtattgagtttggttctatgttttaatccttgaacgttgtttactttgtttcttgtctggttagtatggcttctccaagcaataccaatactgagtttgctaatctgtcattggaggaggaagaagatattggattggtcattgaagataatggggatacggaagttgttgagtttgttttccattcaaaattatgtttggtagggcatttcattatcaatggagctgttgatttcccttccatgcaacgaactttggctgccatggggatacggaagttaaaacaggaagaacaatattaaaggtagctaaaatactaaagcagagtaatattgcagagtatagcagcaggatgtattgtattcaatttctcagtgagtaactacatgtaatagggggtgtatatataatacaagaaagggaatatttttcctaacaagaagatattctctcgatcaatgattggctaatatacaacggaatcccacgattttaggaggaatcatgacagctcatgattgggaaatatctatttgacagcacaccaaaatagagtagtgatctggtgcggcagggactacagttaaatttaacacgctccctcaaacttggcgtggttgagccaccacggtaagtttgtttttcaggtactcgaactgttgaattgagatggcttttgtgaatatgtcagcggtttgctcagaagtgggaatgtgcctgatttcgatttttccttgtttcacttgatcccggatgtaatgtacatctacttcaatatgctttgtgcggctatggaagataggattggaggcgagttgtttggcacctgcattgtcacaccagattacagcaggtagtttgtgtgctatgccaagttctttaaacagagaattgagccaagccacttcagtggcagtttgtgataaggctctatactcagcttctgtggatgattttgcaacagccttttgtttctttgagctccaagtgatgagattacctcccaagtaaacgcagtaaccagttgtggattttcgatcatcaatggatccagcccaatcggcatcactaaagcattcgacattgaggttgtttgattgtttgaacataatgccttgtccgattgtcccttttagataccttagcagtcgcttgcacacattccaatgatgttgtgtaggatcgtgcataaattggctcaatttgttgacggtgaatgcaatgtcgggacggctaagggtcaagtattggagtccccccaagacgcttcgaaagaatgtaggctgatcgaatggcttgctgtcattggcactgagtttgtcactaactgagatgggagttggattcatgatagagcaacatgtgtgttttgttgagtaaatcagtagtatattttccttgagataaatgaataccatacgcccctctagtgatttcgaaaccaaggaaataattcacagaaccaagagttttgagagagaaaaactgttggagctgggagattattgttttgacctgttgagtgttgttaccagttaatagtatatcatctacatagacaagaagatatagttcagcaccagaatttttgtagtagaacaatgaggagtcggacacagaattgctgaagccaagagagaagagtacatttttgaggcgatcaaaccaggcccgaggggcctgacggagaccatagagagctttttgcaatttacacacatagggagggatgtgtggggctgacataaccaaatgggttgttccatgtacacagtcttcagtgagaatcccattgagaaaagcattgtcgatatcgacttgttggatatcccaattgttagttgcagctagagaaaggatgacacgaatggtggcaactcttgactaaccggactaaaagtttcaaagaaatcaacaccgggttgtgttgaaagcctttggctacaaggcgagctttgaggcgttgcacagtcccatctcgattaagttttacgcgaaaaatccatctgttgtcgactacactcatacccggttgtctaggaacaagaacccaggtcttattctttcgcaaagcaaagatttcagtgtccatagcggacttctagcgaggattctgaatggcttggagagcattatcgggttcatactcggtcataaaagccacgggtgaaggtgagaaaacagagaagatgcgaggttttctaatgccagccttggcccgagtgatcatagggtgagaaggttggcgttgcataggtggtggaatggtatggggttgaatggtggtagtcatttgaggcggttgtgtgagctgagtgagaggtgagatgggaagacgcacctgtagtggaatggtggagtaggaggaagttgatgtatgggagagtggtgtgtgtttatttggtgaaagggtctggtatgaggagttatgttggcgtggtgaatcgggtgtaggatccaaggagggattttctgttgggacaacagaggcaacatcttcattactcacacgagcacctgcatcataatctgaaagtcacattagagatataaggcagccattgagggtagtgactaggttgaaatggcggatctgtgtgtgcactaggataggtagaaccactagcaaagggaaaatcattctcatcaaatgaaacactacttgctacatagacacgacctgaattatgaaggcacaagtaacctttgtgacttgggctataacctatgaacacacacttggcggacctaaactgaagtttattggtgttgtagggtctaagatagggatagcaagcacaaccaaagaccttcaaaaatttgtaattgggagaaagaccaaatagtttttgaatgggacatttgtagtgaagaacgggtgtgacaagatgattaataaggaatgtggctgtttgaaaagcttcccaccaaaacctttgaggcatgctagaatgagctaagagagtgagtcctgtttcgactatatgtcggtgttttctttcggctttcccattttgttgatgggtgtgaggacaagggtgtctaaacttaacacctatggattgaaggtatggttcaaacctgcggtattcaccgccccaatcggtttgaatggttttaatggaagtgtttagttgtttttcaacttgcaattgaaagtttttgaacgtgtgtaaggcttcatcttttgtcttgagtgggaaaatccaagtatatcggctatagtcatctataaaatgaatatagtaacgataaccatgtcttgatatagttggggaaggaccccatatatc

SEQ ID NO: 318494 - DNA, 882 bp, Cannabis indica
gagtcactcaaatgatttataggaatattttgcagtaatacacaagtacgggatgaaattgaacctaaaaaagtgtacttttggggtagggtcaggaaagtttatgagatttatcgtcagccaatgaagaatagaagctaatccaataaagatccatgccctattggatacgccttctccctcaaagcataaggatgtgcaaatgtggtttcttttcaggtctatggacaaatgtatcccattcttttacattaaaatgttatacataatttttttaaaaatatatataaatatgtataaattagattagaccggttactttcacatgtcaatcaatttctaatcagcacaagtgcagattttagatttttttaattcaatctaatctgccgaaatgcgtatatccccactttacagattggtttagaacacccctaattgtaagatgaatagaagagaacaaatgtatatactagttgttagttgacatataatatatattactaaggaaataggtccgagattcaggtcgagcccagggtcgaaattcgggtttaagtggggtccaaagtcgagatcaaagttcaaaatattgaggaaagaaatacaaagactacaattaaaaaaaaaaataagggtaaacactattttagatcctttattttgtaaaagttaccgactgaaccctctatttatgacaaaatggatcctatatttttcagaatagtaaaaataagaccttgagctcaatttttaacattttttttttaatataaccaagttaaagacaattcttaacacgaatagatacaaaaaatataaccaattttattataacatctctaaatcgaattcttattaagttttatttcaataaaaaat

SEQ ID NO: 318495 - DNA, 1056 bp, Cannabis indica
acattttttgtagttaatttgtgggatgtaaataaaatttttcatatttttataataaatgagtcccctcaaaataaaaagtcgtgttgaatacgcgtgcggagcacgtgtgcctccgactagtatatatacaagactcaatccataattaaattgcactactagtcatataatatctactttgtgatgttaagcattttaagatgtcttttaataaatatttctcaacagattagatgattatccatttctacattttatatctaaaggaagcttggtcccctcatcctcaggattggattaaactaaattgtgatgtcaaggtgggatttaatagtatgtgtattgctgttgttgcaagggatcattttggcagagtcattagaattcagacggctcgagaagacttctcggatgtcctctgtggagaagctgcggcttgttgcttgactgtctcggtagcctcagatattggttctaaatttgtgattgtggagaacgactcgagtgtggttatcaatgctatcaatgggaaggactctcgttgggcgcttgaaaactacatctcattttgtactaagtcttctccctgttttattagttgtaactttgcttatattagtagatcttgtaattttgccgcttacaatgtggctagatgggcgtttgctcatcaggggtttgggtctatccatgtttcggttgtacctaacaatatattgtgtaacgaccgcgaggtctaactatttgaatttataatttaaacgtttttttttcttaaccaaacagcaaatacaacattattattgtagatacgcgcgcacattatattaattaaataatatacaaagataataaacaaacagaagaagatcttgataattaacatctctcccactaattaatttcaatcacaacatacctaacacatgaactgattttgcaaattaatttaacatctttttcttaaataatcctcttgcaaaaacaataaacaaggaggagtagtattatatagcatatagagtaacatataggaaaacttacaaaaaaata

SEQ ID NO: 318496 - DNA, 1785 bp, Cannabis indica
ttttgtttttctccttttgttcttggcgccgtggttagccaagctaacactttagtgaaatttgtgcaattttatttcccttcgatatatagagctttgtctttttgattaactatgactaaaaattttccctaaaaaattattatagtacaagacactaaatcagttaccaaatgccatttaatattaatctaaaatatattatgtttgcaatcatttatttcatataaatttaaataattgaggatagaatttattacttacatgatgtaaagaatgaaaacaagagtacaaaaagtaaaatagaaaagagtgtaaaagaaactaattacaatttttatcccaatcaattacaaagttaattaatagatattttttttttctcatcaatgatacctagaatcacttagtagttagtgtgatatatgattataaatatagttaagtattacatgcgttcactttcattacatcgatgtggattcccgcgtgagttagcaataaaacttttggagaaatttataaaaatactgaaatttaagttaacttttataaaaatattgtcacacgaaatctttttttaaaaatactgtgtttttataaaacaacagtgaaacacaaaacgtaaaaattaaaaataacagtagaacactaaaaaataaccgtagaacaatagtaaaaatttaacaaaaacttacacagtatttttgtaaaaaatttcacctcacagtaaaaaaataaaaatattaaaaatttcaatatgtagtgtaaataatcttatacaagtaattcctcatggaggcccactaaactaccagccaatcaactagcccaagcaaatggacaaggcaatccatctctcgaatagatgtgaatcctaataacacatccgggaatgatttggatctaccaaattcccaagagcagagggaaaggagggcgagtggggtcatttgccccttcaacattctacaaattaattttttgtgtataaattttgaatattatattttatgctcccacaacattaatatattttatttatgttcttatacatttcaatttttgtatatataaaattttaatttttaattttattctcatatacattttttttttatatttttatccttataaaatttatattttcataaatactcttttactaaaaaaacctttttccttcactagaacacgaggctagctccaccacttccctggaatatagttcaactctaattaaatactaaggagagaaataatcttggaaatctacaacaaataccccaggggtcatccagaagtagaagctgaaagagttatccgaaatggcctaaccttctagatactactcacgtctctgtcacaatcttgaggaatttggtgacctttcttcttcgtcagattccagattggctcacggcaaaaggtagttaccttttcatgccatacatccatattttgacaatctctttcccaacaacggaccacacaccagttgtcactgtcaatagtaccatgtaccgtatgatagattactttttggaattaaacctcacctacccgactcaatagcttatgaaagcaaaaattcaatgtattttacactattgatgggcttatttgataaaaaaccctagtacagtccaaatctgtccagcgcatcaaattctacatatttaatacaaatgaatattacaacaatcgtgttttatctgtattaggtagcgtatttaataattttgagtcctatttttataatactatgatattgtaatagcaaaa

SEQ ID NO: 318497 - DNA, 543 bp, Cannabis indica
gttcttgagttgcatgagtatggtaattgatttagttttgatatagtatgtaaggttgtgttgttaattcatgggtattgcctttagaaatatttttgatgtgctatttgaaatgtggctttgagtttaaacctaattttggtattgattattattttgatataactgaaaatatggttttgtgatcatatttttgattgaggaattgttagaattttagctcaggtgtgagcttattttgatggttaagaattgttactttgtatgcttaattgttgttggacaggggttatctttgtgctctaaaatccctattgtgaatgttatactagatgttttcagtttttgagtttgtgcatgcttttgagtgagttttgatgggtttgtgcttgaattcatatagctgaatttggggtttcctgggttagaaacccagaggccgcggcccgcccctattggtgttgggttttgtgccctaaataaaacccatttaatataatcagatttactgattaataaagatcagaaataacattttatgtt

SEQ ID NO: 318498 - DNA, 550 bp, Cannabis indica
tttttttattagattttaaagataaaagaataaattgataattgaacgggacagtaaaataccaaaactagtacctctttagatgacactccaaaagcccactcttattttcttgagagattcttatatttctgcaaagtatttgaaatataaagcaaaattagaaaaaagtcttaatactccaaactttaaaactgttttcttgtagagacaaaacaatgtgcaatttgttttacacttttctatttatagatattcttttgtaatttatcacattgaagaaagaaatccctactaatctactattcaagttaatttctaacattaattttttgatttgaaagaaataagaatgctcttaataccatccagatacatttcctaatctcactttaattttatgattttaatgccttacaatatctccacatttaattatttacattattccagaatttaatcttctacatatattactacttaaaaacaaaaaaacatacaatccctctttatgatttgagaaaaaaaataaaataaattaatttatgag

SEQ ID NO: 318499 - DNA, 577 bp, Cannabis indica
atgaatttgttctttttttcttcaattattttgaacttatggctctaattgtaatatattttacaaaatataaaatctaaaataattttttttaaaaaaaatttagtccaatccgaacaagtaattggctaaaatatgaagttcaaaaatggttttattttttacttttatggcatttggcagaatacttgttactcttagtgtttggtagttgaaattttacctaagaaaataactttttacctttatggcatttgatatgagaatttcaaaattaaaatgatcaaatagaatattaaagtgaaaatataattatctcgaaactcataattttatttggttgtgcaacagaatatttaattgaattatttttttggggttaaaatatacaatgttaattgaattatatatatttatttattttgtcaaaattattgtgaaaagttaatttaaaattattaatatgctaaatctattgtatcatgattggggagagtatttaaaatctatatttttcaaagaatttaatataactttttaaggaataattttgaagagaatataaaaaaaaaaaaaa

SEQ ID NO: 318500 - DNA, 796 bp, Cannabis indica
tttttagtaaattaatttatttattttattttttcagtttaatttttttaattttaaatttatttttaaatatttatttacgtggaccaataatatagtaccatgtgtacacaatatcttatgtacacatggatatctaacttgacagttaacaactgaaaataaatgaagtagctaagtgtttatagaacttgagtttatgaagttttaatgctaaataatgaattttcggggttaattacttgcaaagtgaaagtttttgatattttgccacaaattaccctaataatatcttgtgttttaaaaatttcaaaagcaaacagtttagagagtgcacatttaaatttttcataaaacaaaaaaaaaatcattaatcaaaccaacaaaattaccaaaccaaggacagcccctaactaaattacatttgcctcacatagttttggttaagagcagctatatatcttttagttataatcttcttcctattaattacatgaaaaattgatccatctttaatatttgcttttatatcgatcaattaatacagtctagagttaataacgatttcatctatatataatacacacacatcagtagttgagccaaatactataaaccacccctaccattgttgtgtgtcgttgagatcagattagaaagcaaactcctcttttcctttctgttaatccagccgaggcaaagaataaaactcagtaggccaaagcacacttaattccaagccacttttataactatttttagagaacacacaatcaaagaacgggagcagtgagcc

SEQ ID NO: 318501 - DNA, 909 bp, Cannabis indica
agattagagaagttgttgggagtcctcttccataataattggtgaaaataaatacttttctaatgtctctaaaatgatattcttttaataattatgcgcgatagtaggactcctaattgtcttgataattaagagctattgttttaaatggaaggttatatgaaattcatatggctatgcgagttttattttaaccccatagaaggtaaattctttcaaattgatgtcacttttccactaccaaacgaggaaatttttatactttcttattcacattctaagctaatattacctacctaacggccccaaactattaattcccctagaatcctagataactttttttttttctcttttggctttcatttgattcatttaactatttttgtagattaccaattgacaggttgtgtcttgattgttaattgttgtacttgtattattttatttgtttatgctattatttgatttataaaacatcactttctactttgttttgaaattcactctggtgtgaacgaattttatgctttaatttatttatatccatcagtttttctttttcttttcttacttcttaaatttatggttttgttttttctttcttaagtcttttgaaactcacactaacacgtgggacctattaaaagtttgaaaaatgctgaacacttgttttatattaactttttttcttttattttctctttgtatatttgtaatgtattcttttagttgattatttacttattgggtactccttgttttaacgaaaatatttttgatactttattatgataaatgcttagtgagaaccttttaatttgaaattgtatgtactttggaactctatattatatatagagatttttacactaagtatctaaaatcattttttttttattttatttt

SEQ ID NO: 318502 - DNA, 928 bp, Cannabis indica
aaaaaaaaaagtaaaattttgatgttaatttttatatatacatatagattttacgtataacaatataaaatataattattaaaatgctaattaattcgattggatgtattaaattttttgacaccaccatctaccattcgatacaatccaattagatatttaaaaataacatccaatctgatccaatcacgattagatatccaatgttatacagtcaattgtaatttgatcgaacgattctcaatagtttggatcaatttatacacactccttaatataagtccctaatcttgaaggttggaaacttatatatttttgccaaaattttctcattaaatttaagaattgttactagacatcatcagtagtatatagtatcaccatacttagtaaataaaatgtttaataatattttataataataatagttataagcagttaaacactacatattttttaacatttttcataaattaatgatacactttcttttattttggtatttgagaaagattttgtgttttttatgtacattgtgataaatattctgttgcacatataatattttttttcataaacctatggtaattacaacatgattatagaaaaagaaattaaaatattggagacttatccttctatggggacagtatggttaggtaccaaaactactttatttgcaaggtgtgtttctaataaagacacaacatttttttcctcctatcaatatggttcgttaatgtgttaaaaatttcttaccgcactgaatatattgaaaaaaaaaaaaaagtaattagtttttgtacatgtttttgtttaaaccccattatttcgcatttggatcttacatgagtaatttttaagacactaaaagaatttttttttttttaaaggaaaatttcaacttttattaaccttcaaattcagc

SEQ ID NO: 318503 - DNA, 1091 bp, Cannabis indica
tacttttagtcactgaccttttagtcacaacacaataatgataatttataattagtcataacttttttatctttagtcacaaattttgttgtgactaaaagtaagattttttgtagtaatattatcgttaactaattgtaaagtttaaggtattagtggtgcctaaaactctcttatgtgttaatattactattggtctaactaagtagcagatcctgtataatttaatgtaataacttttaaatcgtaagacgacatatctagaggtgctagacattattagtacttaacaataatgctcaaatagtaataataatagtatagggtagctaattggtccccaccccacacatattcacacatggcatagataataaataataaataataataataatattatatatttattggaaaagtgaagatgattgggattcatgttcaactgtaatgggattgggataaggttaggtatggtagttacagagtcccatttcacactctctttctctctttctgtttttttttcatacttttatttgtacaaggttaggttagctatgctgattataattcttgtcatttacttatttatcaaaaacatataaataataaagctcatataattaaagacaaacaacgtgggttgtattgtatcccttgttttaagctaatatataacataacatgttatatatatatatatatgcgtgtacacatgatgggatgagtacttattaatttctatattactaggttaattaaggtataatataatactacactactccacacaccaaataaaaatgaaagtatacatataatatatataataataagagaaatgttaaaaaggttctgttggtgtctagcattctcatgcgtgttaatattattattgatttaatttagtattgagtcttatatagtttaatgtaataatttttagagagtattaatagccaatcgtaaaacgatacatctaaaagttgctaaacactactgtgtccactgtccaataacaacaccttataataaacctataaaaataatatttgtaaaaaaaaataaataaataaaaggaaaaaaaa

SEQ ID NO: 318504 - DNA, 1083 bp, Cannabis indica
aaaagtttatgtacaaccctagtaacatgaagttaagttagaagtgaggtgatccatttgagttcagtaacaatatttgctagagctctgaactcactttctgtagttgacctgacaacaacatgatgcttctttgtagaccaaaataagatttcctcccaaaaacacaagttaactacttgtagaacgtttgtaatccacacaacttacccaatcagcatcagaatagctctcaagggtcataacaacaactaatttgagtaataaatcatttgaaatagtaccttttagatactataatagtcatttacaagcctcccaatgtgtagttgttgaagcttttatgaatttactcaatttgttgatgataaatgcaacatcaggctttcttaaagtaagatattgtagggctcccaaggtggatctatacaatgttacatcttcaaaaggatccccttcctacaaagaaagttttgtggcaacactagttggatttggacaagattttgcaccttccatgtgaaatttcacaagtaggtcgatatatttagtttgggataagtacatgccaacactagttctatatatctcaacccctagaaagtaatgaacttcccccacattctttagagaaaaggccttgtttagatcatccacaagtttgcaaataagactgtcatcgggacctatcaagagaatatcatccatgtagactaacaagataatcaatatagagccagagccatagacgaagaaagaagaatcagattttgaagcttgaaatccccactaaagtaaactagttttgagcttctcattccaagctcttggagcatgtttgagaccatcaatgaccttttttaaacaacaaacatgagttggttgagtagtatcaatgaaacctagagactcttacatgatgacaattttagtaagctcttcattaaggaaagcactagtgacatcaagctatttaactgaccaatttaaagagacaaccaaggaaataacagttcttacagtaattggtttgacaactggagagaaagtttcttcatagtcaatccaaggtgtttgtgagta

SEQ ID NO: 318505 - DNA, 2480 bp, Cannabis indica
ttcttttcttcaaacattactgggagtctgtgggtgatgatttctgtgaagcagtttcggactttttcaggaacggcaatatgcataaagggataaataccaccaatgtcgttctcatccctaaggtcatgaacccgaagagacctagtcaatttagacctatctccctttgcaacgttatctataaggtcatttctaaaatagttgcaaatagaatcaagcctttgctgccctctataatctgccctactcaaacggcgtttgttcctggtagaaatatacaagataataatgtcatagtccaggagattattcattccttcaaacgaaagaaaggtagagagggttattttgcaatcaaaatcgatcttgttaaagcttatgatagactgagttggaggttcattgaccatgctttggactgttttggcttccctccgaagatacgctcttggatctcgcaatgcatatccactaccaccttaaacatttgtttgaatgggggccaagttggaaagattatgccatcgtgtggcatccgccagggagaccccctatccccttacctgtttatttgtgctgcggaggtgttctcgagactgctggaagagactcttgggcagggcaatattcatggaatcaaactaagtaggggaggtccaactattacccatcttttcttcgctgatgaccttattttggtgggtagggccaatataaatgaagcaaattgtgtctggaattgtttggagagattttgctcttggtctggccagaaagtaaataaactcaaaacgtcaatttcttcagtaaaaacactcctgacggtatgaggagagggattaaggaagctttgggcattaattctccggaaggatctataaattatttagggttgccgctttttagagctagacagattgatgctgattttaagtttgttctggacaacctaacctctaaattgcagggctggaaggcgaagactttgtcgaaagccggacgcgctaccctaattaagtctgtgggcttgtcgatgcctgtttatgccatgcagaccacaaaactctctagtcgcatggtctcgagaatagatggtttagtcagagatttctggtggggctttgaaagaggaaatcatgatattcatctaaaggcttgggataagttgtgcctgcctaagtctttgggtggattaggatttcggaagaccaaggaaatgaatttggctttccttgccaagtggggctggaattttctaaatggatctcaatccctatgttgtaaaattttggaagccaaatatcttaaggggaaggattttctcagatgcagctataaggactcggattcctggttctagaaaaatgttgtcaaggccaaaactatcttaaagaaaggggcttgtaaacttgtgacaaatggaagggtgactaatatttggagggatccctggattcctcatcttaaaggtttcatcccgaaactaaggagcgggattttaaccaatgataactgggtggctgatcttttcctggccaatggagattgggacatcccgaagcttaatatcctttttgataaagaaacggtgtctgcaatcgtcaaaggcggtaatccctcgggccgtggggatgatagatgggtttggacattggagaaaaaaggacaatttacttgcaagtcggcgtatctggctcaagctctggagagagcccatcaaagtgcggttgctccggcactttggaacaagatgtggaatagcaaaattttggagagacataaggtcctctggtggtgcatcctttctaatgcactcccaactagatctgtgattgggaaaagattccacattgagaatattgaatgccctttatgtggtctaggggaggaatcaatggaacaccttttcctgacctgtgatgtggcaatgcatttatggcgttcctcaccttggggcatttatcctatatccaattctgggattcgagtttgggactgggtcaaattcatatggagtcttaatactagggggattcgagtagatgaagtatttctgtatgcttcgatcgttgtggaaaatatctggagaatgcgtaatgactatatttataacaactctcatccggatgttttgaaatgtattgacaaaatttgtaattcttatgcagagtttcatgatgctttctttccttgccctaccccttctttggtggggacctggaggcctcctcctctggattggattaaattaaactgtgatgtcagggtgggtttggacagtatgtgcacagcggtggtagctagaaaccattggggtgcagtggttcggattcacacggctcggttagactatgcagatgctttatgtggagaagctgcagcttgttgttcagctgtctcgttggctcttaagcaaggcttcaagtttgttatggtggagagtgactcgagcatagttatcaatgctctcaatggga

SEQ ID NO: 318506 - DNA, 1191 bp, Cannabis indica
caaggcaacatagataattttttacatttattggagattcatcttttctattcttttacgaaatataataaaataataaggtaataatttttagccaatttgtgaagtaaaatattaaaaatgtgacatggtaaaggcatataacttagtgatatttaacttccaattcctcctatattctaaagaggaagtactaaattcgaattcttctttcttcaatgtgtcaaaaagagaaataaaaataagagtccatttcaaaattaacaaccacaccaatattaattaatttataataataataataggaacgtcactaattaacttaacatttaccaaaataaataaataaataaataaaaggactctaaactatttttagaattggtaaacaaaatatacatcgctgctgcaaagagaagtctaaaatcccaggacgactctaagaatatcaagaagctcacggtgagcagtcaggtgagggaaatgaccgttggctgagctgataatctcgaccgttgaaggtgccttgatcatcttcttctgcatgtagaatccaacggagttggggacgactatatcgctgccggtttggatgatggtgcaggggatctcaaccttctccagtatgtctcgctcgtcactatagaacaccgttttggccaattggagcgcgacatctggattcattctactcaaacatttcgcgaacttgtcagctgagggaggatcggatgcgtccaccaccagggaaacgaagtgtgtggcccagttgtagtagtttgattctatgtttgatatgatgtcttctatgtctgacttctcaaacccaccttcataatcctctgtgtttatatacctacatatacatataaataattacatatatgccatacattttggccaattataataataaaaaaaaggttaaaattatatgtagggttgtgtgaccaacgtgttacagatggcaagtgtgttaatatttatatatatataaatatcatgtagggttaggatatgatcaaatgccataaaaaggtaaatgataaaaataaaataaattagctaaaaaatgcaaaattctagagcataaaagacaatcttggcctttaaaataattacatatcgagctgtttatacggaagagactaacgttttctttttcttaaaaaaaaaataaagtaattttaa

SEQ ID NO: 318507 - DNA, 1006 bp, Cannabis indica
ggaaaaaaaaattggaactttattagactagaaattttgttaagtgttaatttagttatgtaaaaaatgatcacatgtgaatatattagcagcccaactcattttttacttttaaaaatcattaaataatcttaaaataattaacaatagcgaaattgaaatattgaggagaaaaacaatcgaaatatgtttttatttatttatttatttagtttttataattaaatagttactatttagtttatttttcacttttaaaattatttaataaaatttttattgaaaatggaccactatttaattgacacgtattagatagatttaataagatttaacgaaattgtcattaaaaagtgccacaacttaacatataatatttaatctgtcagaaagaaaaaacatattgtatataagtgtaaaaattgaaaagataaaatatttataagacaaatatctctaattaaatcgtcaaatcacaaccataatcatccattaatggtgtacgactaattgactgattaatatatcttgattatattataataataacaacacgccatatatacgaaacaataataagttgcaaatttgacatttgagtttgacagtgctagctacccttgtctgaacctaaaataaagttaattgacttccacccaaaaaatattctatttcttttacatattataatgaactaatttagtagattaatctaaacatgcaacacgactatcactgtactgcatatgttgtcttttaaaagaaaaagttacatttaagatatatatatagattagggacaagattttgtccaagatgtactttcatcgaatgtattccgtggtacattagatgggtctcagggtacattagatgagtgtcagggtacgttatattttttaacctaattactcatagatcaatctcagctatcagatcaaataactctctcatctaacggctacgtacatcatgaatacattccgtgaaagtacaatcacgaaat

SEQ ID NO: 318508 - DNA, 1023 bp, Cannabis indica
atgaccatggagttactgggaaatacccaccgctttgaggaatctaaccaatcacaacctgcgaacatacctcgcatatctgactagtggtgtacctcaagaaacagctgaggagtctcctgtatctcaagggacatgcctttctcgcatgaccatcgggctaacagaaactcctcactgtttcgagaaaacctactagttgaaacacgcagttttacaagaaaagagaaagctggttatacgtcgcgaatagctgggggtatcatggtacctcaaggagcatgcgatcacacgcatgaacattgggatacgatgacacacccaccatttgaaaaacctaaccagcattcccacataaaaatacacagaaaatataaagaaaaaccccaagttctaaacaatgggttggagtgaccaaaccaccagaattcctaaggaagtacacatgcgagtattcaagatgttcatcctaatacttgagtattcaaaatagtagttaaagaaacgcgaatattcaaagtgttcttcctagaattcacggttatacaagttttacgtctattttcacatgagaattacccagttctagcagaaaaataaagctctatgtgtattccttatgaacaacatgcattttctatttctcagaaaattcgaaaaatacaaaatgtctttctcaaaaatcaaaaaccaaaattcgcgaatagtttcggaaaactaaccttgaaattacggttctctctgtgattggtttcaactgcctccaacacccagaagattgaaggaggaaagacagaaatttgggagaaggattttggacctttaaagtttcagatgaaaagagaaaacaaaaatgagagggaaagtgaaggaatcgtttcgtattaggggcttaaatatcaataacccacattaattgggatcgtgacatgtggcaatgagaatgcctatggtcatcccatccaacggttaactatgggcacgcctacacagaaaccaaagagtttcgtgacgtggcaccat

SEQ ID NO: 318509 - DNA, 919 bp, Cannabis indica
ggagaagcttcagattccttgaggacatcggccatagcagtgagaacatcaatgactgatttttcaaagcgacgttgcctgagttgatcacgagcataggaagtggccagatcagtaactgtggtgattaactttctacggtatagacacaattttagtggttattgatcgactcaattaatatgctaatttcatttccttaaagcacccttgatcagcttgaatacccttagagaaaatcatagagaaaagagagaaagaagaagagaatgaataaatggcacatttttttcatttcttcaataagtgtgacttttatacaacaactgaagttagttacaatcctaactaacttaaagtaacacaaagtgactgcctaattttaatatgtaggattattcaatcattaggctttagttatgaaattaagttattaattatgacctacacgtttgtggggatttatttaaatttagtatgtactgattatgttatacatgtgaatttcttgttttccgtacttgtgcttggtagtagtggaacgcgacgttgggccattagagagtcacttttcatatggtttagaattttattagtagcgaggcaacatggttaaatactagaagtgtcaggaaattgtcgggatttggaaatgaccaaactacccttggttatcacttaacatttgaattttgattagggctaaatggtcattttgttaggaaatttattttgtccttttgtgcacattagtaatctgatattaggtttcaattgttaaatgttttaattcatattaatcttagcaataaagtaataagctacaaaaaacttagaactctctctaccattctgtctctctttcgaaccatctagggccaacaagaattgagggtttttgtgttggatatattttacc

SEQ ID NO: 318510 - DNA, 502 bp, Cannabis indica
aggttaaaaatgcaggttttaattgagagaatgagaagtcaactgttaatagaatttggtactatttttcacagcttataataataagtctatacatcaaaactgagtagtatatatatatatatatatgtatattatatataataacatattaataatgaaggggcaattaagaatcttaggagcgacgtggggatagtattccatatagaatgatttgttgcttaagaagcaggcatagtataccccatcaattaagaaatacccaattatacaaagtaattaatatgtcttcagtttacaactcatatacacatatatgtatagatacatatatatatatatgtattatacgcactaactgtatacagcattattattatcttgtttgtgagttgtatagtatcaatatttgttgggttaacctaaccaaaaaataacatgcactagagccatctatatacttataattgtatatatatatatatactagtttatatat

SEQ ID NO: 318511 - DNA, 1266 bp, Cannabis indica
ttatgtttgaattaataagtattaacatatattattatttcacatatgaaaattatgaatggttttgaatgggggttggtgatcaatgaaaatatatataggtccaaaaatttgaaaattaagatgttgttttcgtagtagctagactttgaaaaaaaatcttaaagtcattagaaataaagtgagtcatgctatatatgtataagtaagatcatatatatagagcttcatatgtcaaacttaatcaccggcaccgcctataatctatatacacacattgtcttatccatatccatatatatatgaaacacacagaaagtgaattaatgaggctgaaaaagtgaactatattactcctataaataattaatattttttactagtaataatattgtaggtatatatatagtgtacaattcatatgtattattatttgagtctacttcttattttcctgtgtgataataacaccattaactaaacttcttatcgatcgtaaatactacgtacttataattatttgcaactcaatccaattctatttattaaaaaatttcacaatcaatacataataaaacatctcatattaaaatttaatatctttattaatttttaccaaataattcttttgattacatgaacttctccttttatccttgtttactagaaaagtcaaaagttggaaaattttaattaaaaggtaatttaagtatcttcaaaaattattagtattatttgttataaattagttttgggtccaaattttattatatgatctgtttttaaaaattaaaaatgaaattttccaatatatgtgaaaaaatgatttatttggtatttagccgtactgcactttgaattctatatgaagttgactgaactaattaataactatgggaaaaagaatatttatatgtatacagatacagttgtagtcaactattatatattttaagtcaaaattttgtacgtaccactataccaacataacagtctatctacataataataataataataattaagctgaggtggatttatttaaataaatgaatatatcgaccaaattaaagtcacgtctttattcactaaaagtaaaacaaaatatttatttaaccaacgccttatatatatactagcaaaaactacgtacgggcacgtatattaaattttatattagttttttttatattatttaaagtaatacaattaaaaattaaaaaaaatattattagttattaggtgaaattattattatgtgtatct

SEQ ID NO: 318512 - DNA, 635 bp, Cannabis indica
aaaaaaaactagtatataaaataatttaataacaataattaaaaaatactaaccatttataggatgctatttaatatttgtaatattgctctttttattaaaattaatggtttttaatatccaaatcaatatttaatagttaactttgcaaacatacctaaataaattaaaagagaaaactttgagtggtaatgcagttaagaatagaccgacaccatttcaatttcaacacaaatcaacacaaaacgacatcgttttagattgaacaacaattctcggattccagatccacagaggtacaaaaataaaacctattaataatagaagacaatgacatataatcagtcaattgatattacttttcaatttctttgttctgttttcttatattaatctatgatgtcatgtagttttggcgtgtaaaggtgtaaacgttgttttgtttttgtttcatttgatctttttttacattttgaaaattttcttcccaaaacaccaacctttcaattacaacttataaacccttttcttattgataaaaattcaatctttttgttcgttcctatctgggttttgttttttctggctgtgatttcttcgaaggtacgtgcttttttttaaatttttaaactttg

SEQ ID NO: 318513 - DNA, 1190 bp, Cannabis indica
aaagggaaactaagtataattctcttaacagtgtaaatacccaaaaaaatccttcagattagggttgaactcttgcaatgttttcttaagaaaaatttgagaacttattctcattatattctcaaaggcttttctagctaaaagatacataatagtatcgactcgtctactaaggcttgttaacgccccactacgtaaaaaatttgtgtgttgttctaaattatatctttgaattattcatttctttaattctaatttattattcttagttttttaaaaatattggtaaatattttagtgctttcattgagagttgaaggaagaagtgataccatatgaagattatgctcagtaatcatggtcctcacctgaaacaagtttggtcttcacttcattgatcctaatgccaatgtagggaatacagaagatcagaatgaggtgactagccatcacaaggatcaacttggcaaagacataattttagatgctcctatattcaaaaatgatgaattggaacataatagttctaatgatgttgaagatgatcctcaagacacctcaaaagatgatcctcaagacacattgaaggatgatcaccaggacaagaccactgacaatgatgttggagaaaaggaaaatcttgatgggccagatctcgtggtcattatggctagaaaatttcaattaactgaaagcatgttatcttgataggatcgttcaatgggatactgctaggaaaatgacgagaattgaagtcgtgatgatagccctaaccaaaaggaaccctaatgtaaaaacaactccaacaactgaggctcctggaagagttgatcgtaaagatcctgaaacctctatcctcacaaggataaagagaaatcgagaataggtgaaacttcaaagaaggctccttcgactaaacaacaaaagaggtctaaaagtgtcagccaacctccatagaaaaataaaggaaatcctactttagggcagggtaaccaaactaattcgggaggtagagctgcatagaaagataagactgatgtcgaagtcaagaagtctacttcccagaaggaaaagaattgtcgcaatgactctaatagtcaaagtgatgatgtcgatgaggtatatccaactttagataacaacagtggaagtctctccacaaatgatcttcgcagaagattaaatgaaaa

SEQ ID NO: 318514 - DNA, 955 bp, Cannabis indica
ttaataccacttatagttttacataaaaatattgcataaaatacaatttaatataatacaatacaatacaatacgacctaatacggcgttccaaacgagccctaatggtatatacactcacaacattgaacgaaaattataattttactataaacataagtactttagttaatatttacctattatttaatattgaacaattcactacaataaaaagagttaatgattcatttgagagtcattaaaactcacttatactgatctcgataagttttggatatttctctgttaagagctgacagtagtacaatatctgttttgttagtaacttaactaactacttttctgttagttagttagttagcttctggttacaactaattttgctttagttctgtaatccttgtatatatattgtacaactttattcttaataataatcaagctctttcataatatctttcatcttcttcctttcctctcttttctcgcttttctctgtttttagatttcctttactattccttgttgtttgttcatactcgaccttcaatgtaaaagagattcaactctcctaacatggtatcagtgtcacgacccgagccttaggctgtggcagatgtgtaatatccataacttgggtggtcaaaggtcacactttgacccttgtaggaaaataaagcttataaatgatccttttatttatattacaaaatgctaatttaaaagatatggattaactcctatattaataagaaaatattagtaataaaatcaggaccactcatcaatataaaagaacagtaatatccccacagttatgtaatcaccaaatagatagatttaataagtcaataaaataccaaaataatacctagcatccatcatttctcatttctaactagtacatagctaatttaagtcatccagaccatccatttgttcttaaatacaa

SEQ ID NO: 318515 - DNA, 2144 bp, Cannabis indica
gaaagctcgttctgagctctatgtgcatatcattgttttgaattccaattttatattatgtgaaagtgtaattagggattaaccctatatttgtaaatctcaaaatttatgactaggaataccgaaacttggtgaggagcacccggggatttagaatcttcacgtttgcaggacatcaggtaagacagtagttgcacgtagagttatgcgtggtggcgcttttgttgaaaatgttatatgtgattaattggaaaccaggattagggttattaccctaacatgagcggtttaatggcctagtgttattaccctagtgaattattaatatatattgttatgctaggagattgcaatgtatgtaaagttttagggttatgcgttcaaggtataatcaggttagactcggtaaccaaaaccgagatgaaccattctaaggccttattgtatatagacatgtgagcttaacatgcaggcttgtgtcgtacagacaaatgtgaatggcattaatatttgtatactgtgttaattatgattattgatattttatactgtcttgctgggcttagctcacgggtgctctactgtgccagaaagggtaaatctgtttttgatcagccatgagtgcgagagctggatgatgtatgtacatgttcaggccattctagaccaagcgggttagggtctaccagtgatgaacgtttgtaactctattttgccgcttaggacggctaatggaaaagacttgtaatattttgtaaaatatttttgggatcccgagatatgtaaccttagattgtattattaaattattacaagttttattttcattttgttttagtttaaagtttaaagttcctacacttttccgcttagtaatctcgtttaggggattaggatttcttaatcacctttggtagtgtgcctaattgttagggcgttacaagaaatttctagaaacaaattaagaggagtgacattggttcatcccatacttccattaattgtgtcagttggattagctccatcaccggggagtggaacatgcattgtttcgacattgaaaaatccattatttctgtttgtctggtttgcagccatgttgattttcctcctaaataaaaagttacttcccacaaacggctccaaatgttttcaaagcaagttagacaacaccaaataaaataagaattacataaaaacagcgagtattcaaccgagaatagcgaatactcaaataaagacttcctagacaaatagaaaaagcaatgaaaatgatgaacacaaggaagtatagtggttcagtcagatcacggtctgcttagtccactgttgtaaatatttttgtcttgtcttattcatgttggattactcctttatatagaaagcaagtgtccttttaattacagataacttaattgattatataaccattttacaataaatattaacagtaaattaaaataaacataaatggaaaaaaatgaaaaccagtttaaatctatttaactaattactgcaacatacgcgacttccatagtgcgagttgcctgttcatttacctgcacaagctcgcaggcttagtggtgcgttttaacacaaagggggctaacaggcctcgtacttaggtattcgcgtcctaatcgagtcgtgtatgtggataccttatcagcgtcgataacataggatatgcgatttcttatcgattcatcgagtagtcattcgaccaactcgtgtaaagaaatgatctttactaagttgctggagaagtctatgtagtcatggcatttactttggtatatgcgcgacttgtataatcccttctatgtcctaccttattacgtgaggcataataatgcgactgactctatcacggtcacatcatctcgctgagtttggttcaggagaggtttattctcaagaattcccttcttgacagctcagcaatcctcaaggaatgtgagtccacgtgtcattcttacgggagcctggtctcgagtttctaggcaaaaaattcacactataacagtgtcttatgtaattatcccataaaaataggctcttatatgcatctaagcccaatagcaaacatataggctcacacaggtcaaaagatttggatgggccctatcatgttactaggttta

SEQ ID NO: 318516 - DNA, 944 bp, Cannabis indica
ttataatatataaataattaaatttggttagaccaataaaaatatgccagtgtagttaagtgtacaaaaaattctatttgacttttaatatttaaatttaacggatgatctatacttgcaaacaacactaaatataagggagtattgcgacgaagaaaaatatacgagagttatgtgtatacaaattaacatatggagattttactgccaattaacttttaaatatttagataattacataaaatattattttcataaaaaactaacatttttacgttgaaatattttttctttatatttttacagtattctataaaaacaatacaaaataacaagaaaattatgtaaaagtaacagaaaaataacattcaaataataacaaaaaataacatacaaataataaaaaaaaataacaacaaattaataagagtataacataaaaatacataaaaaaatcgtattttctttaaataaaattataaaaatcgtaaaaaatatttaaaatttcgtataattgtatttttgtaatttttttgttgttttgtatcatttttaaaattaccccttaaatattttatagagatgcaatttattttaatgtttgtgctataaataatattacagtctaaattgagaatgaaagaagagaaattatagtaaatggcccaaaattataggattatgttagtaaatgtcatcatttcaaaatttatagagaaatgacttttgtgttttgtcacataagaaaaaatttataatttttttttcatattttttttagaattaaaagcaaattacttaaagattatgattatttatattagttttgttaaaaaaaaaattatttgaaagttatatcgatttatttaattttttatgaggggttattggtatataattttttgttgtacaatatatttttattttgttgtatgatatattat

SEQ ID NO: 318517 - DNA, 480 bp, Cannabis indica
ttcaattaaatagtatttatttaatttcgacttaaaatctaaataataaattaataattactaaatatataacataataaattttcactaataaaacatcactcttgtacaaataaattaacaattttagtatttataaaaataatacttatatctaaatcaacaattttattatttataaaagtaataaattataaggaattttaatttatacgaaaacagcataaaaaacaacttttataaaaataaaaataatataatttcaaaataaaaattacagaacttcaaaataaaaaaagtttataaaaataaaaataagtataaaaaatgtaaaaaaataataaaaaaataatacttatacattataattcccctaaattaaattagtataaatgggagttggtagtgctaataaaaaaaataataagttgtttaacactcaactccaacacactaataattatctcaaaaaaaaacaaa

SEQ ID NO: 318518 - DNA, 829 bp, Cannabis indica
aaaaaagaaaaataaattgaaaattcagtatggtgtaagaaccccaaattaaatcaaattaaactctatattaagaagcccaggcccaagcccaagcacagttagtcacattgttctttgctctctcctttactcaatctctctctggcttttcttctattctctctgtaaaccctagaaatatcaccaacctcgttctgatcggagatcggaggagagtaggaattccgtttcaatcattggccggttaatacaattacttcaggtactatatatacttacttcactcactacccaaactttcataattttctgatttttatttgtgaatcgatcccatttccatgctatttgtgttgttcttaatatatttataagtttgggatgattatgtatattatttgtatatatatattggtgttgatgatgaagtgtttctagctaagctaggcaatttgaattggaattattttaactacaaatagtgtttctagctaaaatattaaaatagtgtacacgttcattcattacgattttgttattacatgcttcctcttattatggtgcgcctttgaataaagttgttttttcacattaaaattgttgatatttccagaagcattcggaaattgaagtggagaacgaaaaggataaactacttaattagtttacctttcatgaagctcaagcttctaaggataactttcaagacaaatttaaatttttacactcggcgtttggttggaggtaatgaaatggaatggaatagaaaggaaacaattttcattccattcttttatttggttgcattttaaagtattggaatggc

SEQ ID NO: 318519 - DNA, 1407 bp, Cannabis indica
atttgggcccctaataagagtgggccctaggcacggacctagcccgccttagcctagctagggccgactctattgggtaccactttctgagaaggaggccgagatgccgacccgccagcagagacatccaccatcggttgaaaggtggagaaagacgccaccgaacattgcttattgtaaaacaatctaaggtagtcacaagcccaataaacactgagcaaaagagataactcaacattgttatcgacattttttaaaaaatttattactttgtaggtttttttcttttaaaaaattatcagtgttttgcacaaagaaagttactagtgtactagttttattttcctcatgtttatttatataaatttgtattaatgccatacttttgatttttattaatgggaaaattgtagtaaaatttctcaaaaaatttactttgatgcagataagacccttgaaaaacagcagtaatagtctccaagctcaagattcttgtaagtccgttggttctcatttaacggatatgttagttgctctaaaaatgtcacatgttcatattaaattgcgacatatctcaacaaattgaagtaaaagtctctatcaaaaaagtctcctaggcggtcaactggacttggattatgttcttcttcattttttttttgtgccaatgccaattatttaaaatttccaataacttattatcttctcataatcctattagtcttgtgaagctgaatattgaaccacatagagaagtacacattttcaagttgtttattcaaattttgacaatagtaacgtaactaaaataatgacacgtggcacgaggataccgaaactgaattgataaaaaatgtgtaaagtcataaccattggtcatgactggtcgtcatgaccgttggaaaagaagtctgatggtcacatttcccctagattgagtaaggtgactactcctagggggacggtggactaccaccctcataaacgggataaacgatcaccacacacctacgagagtcaaaccagtctagggggtatatactattacccctacctcaaatgtaatgatctacatgtggttagtctagggatacaccccttatgtaacgccctaatgctaaggcacgctacagtgctttttcaattattgtgcaatctttgctaatcaaagaaatttctcaaaaaacgtgtcaaattaaaacttttgctttaaatactaaactttgtaatataatataatatttacaaattccgggatcccgttttcaaactttgtaaaatatacttttcaaactatacatttcaaaatacataatttccaggtcgcacagcgactttcaaaatacaactcccagatgtcccgagaccgaacgctccaggtcgcgctgcttaacatgtacaatctca

SEQ ID NO: 318520 - DNA, 1609 bp, Cannabis indica
aaaaacatatatagagtaattcccttatatttttttattacaaaagataattattattttggactcagttttacaaaagttattgctctatatttttattttattacatgataattaatagcttatgttgtagaaaataaaggataatgttattttgaaccttatattggtcgaaattgttagtgtaaggaaatcagaccaaagtcattaaaaaaaaatatatatgttagacaaaaatttagaattaggattaaaatttttgctttaaaatcgaacttaaaagtatgtttcatttttcaaaacatgtggtcaatcgtaaagaaataaatgactgataaagatagaaattgtaaatcagtggtgattgggaacatcaaatttatttgtcaattttgaaaaagaaaaaaaaaagaaaaaagaaagaaggtgattggccacgccccacatggcctctatgaaagcaaaccagaaaaattggattgatttaatttttagcgaaatactgaacgactagtgatgcttaacacccttctatgtatattgtttcaattaagtatcaggttgcatatagtttaatataatagcttttagggaatatagctcatcaatcgcaacgcgacatgtcgaataagtgctagccttaggaaccactggtacttaataataatgctctaattttgatgtttgatgttgactctttcaggaaagaaacatacattttcctacaattatttacaacatttcattcgataaggatattaagtttttaatgaataattcttaaattttttttaaggatttgaaaatgagtaatacaaaataatcatttaaatgactcatttagtttattcttatgtatgtatatggattcttttgtacacataagagctagcttttgaatttgaggaggaattagaaaatttaatatcaatattcattaaggatgaagacaatagtagaagccatgaataatgacaagggtggaagaagtaataaaaccaataattgaagataaaaagcagaaaattaagccaaatgaacaaggagacatacttatttatggagaagtccactccatttcatttgttcagaaaaccctgcctagttgctgacacttgagccccccaattcatgaattgactctgatttttcacagaatttggcttcattagctccccaatgcctttgagaaaccataactatctacagttggagtgtgacaattaattatggattaagtttttaatatgtgattgtaagttttttttatttattttccacctcaaattaaattatatatgctatctttgattaaataatgatgcctatttgtcaacaaaatggcaagctttcatttcgatttgcatttcatatttttcattggcacaagaaataaataaggctaattatgattttgatctctctaattttgatatataacaaatcttgtctataaatattttcaggccgtttaaaatttggctcaaactattgaaactagtaaatataaccgctctttgcacgattttgtaatagaataaatataattttaaaatatttattttgtaaaagttactggtaattatttttattttgctaaatgttaatt

SEQ ID NO: 318521 - DNA, 884 bp, Cannabis indica
cctttggcttcaattcatcctatggtaataagagctaaggctggaatttttattcctaagacctaaatggtaaaaattatcactgtcaatgaacatgaattgcatagttctattgcagaagccttagctcatgcaggttggaacaatgttatggggtaagaggtctatgccttaaagaaaaataaaacctggattttagttccaaagatgcatggtatgaacattgtaggaaacaagtgggtatatagtatcaagcttaactctgatggatatgtttaaagactcaaaacaaggttggttgctaaagggtttagtcaaacaccttgtatagactatggagagacattcagtcctgttgtaaaagcatgtatagtcagaattatcttaactatagttgtctcaaagtcatgggaggttacacaacttgatataaataatgcttttctaaatggcaatttgatagaagatgtgtatatggctcaacttgctggttttgaagataaggattatcctgattatgtttgtaaactttcaaaatctttgtatggttcgagataagctccaagagcatggtttggcagattgaaataaactttgcttgaggggaaattttacaattccaaggctgattcctcactattctttatagaaatactactaacattgtgtttgtgcttatctgtgttgatgacataattgtcatagggaacaactcagataaacacaagcaatttaccagcaaattgaacagagtttttactttgaaagatcttgattccctacattatttcctagggatcgaagtgcaaagagatgagataggcatgtacttgttacgaaaattataaacactacgcaagtatacgcagtcaagtagtagctca

SEQ ID NO: 318522 - DNA, 1280 bp, Cannabis indica
acgtgtcttatttcgcatgaaatccttcattgtagccgtacaccacatgatagagaagtttttaccaaccaattgttagattgtcatgtcgtagtatcagcccatgcaacatgttaagtatgaaaccctaggtgggtgaagggtatgcccttacccacatgtatgcctgtaaataccttcattttctatgtacaaagggtgaagaaattgatactgtctgaaccaatgctaaaatttctactagctttcctctttaataagagaaatggaaggagtgcagagctagggtttatattgtaaacacttccctataaggccaatataacgactcgtagactagggattattaactcctaaaccatgtaaaaattacctatctattatttattattttatttctttcttaaggtccattttattagtttctacaaattacggtaaatattttggtgctttcattgagagatgaggaaagattgctggtcgctgcaccacctcaaccatggtgtttacttgaaagaacataagcaagaaaacccctctgacactgtcatggaggaggtggactcccctacctctagtctccaaccagatggtgtaaaagaaaagagtgctaccaatgccgaaaaccgaagaaagtatgctgagaacttgtttgattccatcgatgatgaccgaaatcttgaagatagggaagaggaggacgacagcgatagctacgtgaaggacatgcattacaaagattgttagtactatgagcatgacccaaacttgttgcaagggactaaagaactagaggctactaagatgaagttagtagaatagagaaaactcactgagaaaatgaagaaaataattgagcgtgtcaaaataaggttgacgacttggtggagttcgacaatgacccttcggtgaaagtaattgctgaagagcatgctcatgggcaaactgaggctaaaacctcgaatcctcacaaggaggaaggtaaaggcaaggtgggttagcctccatagaagtcttctcctaaacctcctcggagagacatgaatatgatcggttagccctcggggacacagaaggccaccagttcttttgagcctggatgcccttctacttcgagaggcaaaaccatgccaaaatggaaaagtacgaaagtaccgaagtccaaggggcgaagaaaccaatctagtgattctgtcaactaggacgaaaggatgactgatgggcattttgaggataggttgtccaccacaaatgtaacaccctaactaccttaggcg

SEQ ID NO: 318523 - DNA, 623 bp, Cannabis indica
gtacattttacatatttttaaaaaataaaataaaataataataattatgtattatgatatttatttttaaatataattttttttttttttgagatttatccatattagtttagagatttagccgtatattatgtattatgtgatgatatttatgtttataaattatatgttagggtattttttttatttgtttattaattaatataggttggcaaataaataaatagattgaaataattttacataactatgggaaattttttatttgaaatataaattttttttaaaaaaaaaaataaataaatgtatacaaataataaaattctaaaattgctaaaagagttactcctgtttctaccacatgtctatgttttctttctacaataccattttattcattagtatgaggacaagctaacctatgaactacactacattgttcaagaaaatttgtgaaagccctgaactcaccccccccccccccccaactttccgactgtagagttttaattttgttggcgaagctgaagttttatttgtgttttaaacttggtaaatgttggtagggcatcatcccttattcttaacatataaatgttagagattattttaccaggatctta

SEQ ID NO: 318524 - DNA, 919 bp, Cannabis indica
attttgcatttaatgacataattatcattaaatctgttggttcatatccccacaagattgacgcgtgtcattttctaaagtacaaccaaattttgggtataacacattaatttaaacccaatcttttttttttgggtaatacccccttattttcaatttttttgtaattttgatgcatatattaaatttggctgttaaataccatttagaattgccactgtgtacatatgtatagacatgacacgttttcaatcgcccaaactattttaataatttatttgttataaaaataaaaataaaatattttttttgaacttgtgagacaacaaaactaaccctactccctcatctagactcccgcgtcattgcctcccttcactaacaaccaaaatggaggccaccactgtcgtgtttccttctggcaaagccttccagcactagtaaagcccaatttgtagcaataacattctctcactctaacttctctttcatgaaatgacattctccattcactgtcgagccacgtggatcgcaaatttaaaatctctcccccgaaaattgatgactagtattcctctaaccttcttgtattttttcatcattctctttatgttacccctttcattctctctcgctctctcgcatttggttttaaggttgcaaagatggagtcttcttcttcattacccaagaggtcgcgcgtgtctcaggttcgcaaagtctagttttctgtgacgggatgaagagcgcatgaggaagatgagggattaaaggtggtgtgatggagagagagtgagaaaggttgggctcttggggagacgaaaaatgcgatggtcgatcgttggtgacggaggcggcgacagtatgcctgggtttgttcagagaatgtgaaacagcaggtgagagagagagagagaga

SEQ ID NO: 318525 - DNA, 541 bp, Cannabis indica
tgttgttggttttaagcattgtagttgccttgacaatactatagctcatgattttgcaaaatttgctccatctttgaatcatgttatgatttggtggttgagtcttctgaattttttataaatcttaaaatgtcggttgattatctgccatttttaataagaatttcactattctaaaaaaaaaaaaacttaatcaatcagtaaagtatatttttactcaaaaataattataataagtcaatttaatattatttttctgtggcttctaccaaaaaaaaaaaaaatctggcaaaaatattagtaattttttttcttcatgaaaaaaagtttaatttaattttaaagatgacatcatttaaggaaaaaatagaaaggagaaattttacaatacaccccgttaaaatagatatactgatgcaacctccaactgtttcggtatctatcatagttttttagtctaaatttttttatagtcgtatacgttataattatttaagacatcttacaaaattttaaaaattttaaaaaaatttaacacgtc

SEQ ID NO: 318526 - DNA, 969 bp, Cannabis indica
gtggtggtggtgcgagtgagaagcctgtgcttgattataacctcatcatcagcagggccaaatgcatagttcccaccacctatagcctcccctcctcgccccccagaaatcttcctccctttggccaacattataagattaaattcttaaaaaaaaaccttaactccttctctccactctctcaagtctcaactgcaaaaccagattaaattaggagattctcaacttccaatttgggcttaactaaatgggttcattactacagctcaatgagaccactccacacagaccccatctttgctttcagccccagaaattagcacccagaaatcaaaaatcttaaattttaataacaagaactctttcaattcaacaatacagctcactaagtataagattagcttatgcaataaaaatagggtaaaagacgaagagattattggcataaaagctcttatcttgcgaatttcttgtctaccttgataaaaggtagaactttaattcaattggttcaataaatagctaacacagcactttaattcaattttaaacgtttacctgcaacagcgtcggcggcgaggagggaggctgcaatggcggattggaattggaagaccggcaatgtcgtgccctaaggttttaagggaaagagaagaaaaagtacaggaaattacacagcttttcttttatttatttttttgtttatttatttaaatttttatatggtaattttgaattgttagcattgtttttattttattttttctttcctcattattcagttacctcaaagtagggatgcaaatggtggtggttcttattgtgccatttcgcctgatgcgaatggtgtggcacatgtactagttaagtctgttagtagtcttttaggggttcatttgtggacagatgattgtcttagatttattagtcctcttgtaacagctgatttgctttgatttaataacatac

SEQ ID NO: 318527 - DNA, 725 bp, Cannabis indica
atgttaaacaacatacttgttaataaatctaagatccttgtaaaataattccaacactcatttacttgaatattacttgttaaaacgatacatatacttgcgtgttagatttatcacaacacctactaaaaacagctactaaaaaccaatcaaaacttaggaaaactaacaatttaagtattaggtcttatcttagaagtttggaggagctaggggttgaactccttgatgaattccagctaaggagaggcttgaaaatggtggaaattattgggttttgaccttagttcagaagccacgaaggagaggaagaaaaatgaggtaatttggtagtttttacctttttcttttcttttgacttttactttaggcttaggtttcctttttactttgttttaccttttgttttcttcataagcagatgatcaccaataaaatggtgagtcacaaccctagaaacgcttaaaaaaggtgattaatcacttagggcaaaagactaaaatgttcttacttccccgctaagttatctcgtaaccctaggggtaaaatggtccaactccgttatttcgtcaaaccccgatattttaagatatccaacaatattgtcccctaaaatacttgatacaaatttgtatctatgtgactaaaattgtcacccgacccatttctagtattatcaggcataaaaatgtaaaattatgaaaattcacatatagcatgcatat

SEQ ID NO: 318528 - DNA, 1132 bp, Cannabis indica
gaccattggtcgactttaacgaacagaatgaagaacacaaataatacaattgaactagaacctaaccatctcaggattaagatcatttgctctaagatcaactaggtgatattgaattgaatggatattacagtaagtttattatatatctgatccaagttcaatatcggtccctttcaatgcatactccatacatctaactcaagcttactttaaccaatgccctggaaaggacatggcacttattcaaggtgcaagtaaattacattgtagattatcccatcagttaaaccatgtgtattgataaatcataggaatacattttatcacacaatcttgattacttacaactatgctgacaacacaataaccaagaatactaatgcgataagggtttggataaatttataattaaaataaacaaataaatgatgacatgaaccaaataacacattaaataagtaatgaaaacaaatttatttctttattgataattgaatagaaaagattacattgaaatagagtttaatttagggcacaaagtccaactgttctgcaggttgaggtctggtcggccatgctcatgctaagacctggcaggtcatgtgcctaccaagatcatgcaggtcattgtagctctaccaagataaggccatctttagaatgtggaagctagcctttggcaagtggaagataactttgtacactgtttccttgtagaggtcagtttcccttagtcgaacgaaagctcccttagtctgaaagtcaccttttcgctggccagcttgtgcccagatcctagcctgccatacaacctcactcttgacggcctataggcttctcttggctagccagacatgttggtacagccctttgatggctcgcttcactcttttcaattactgctttatagttttgccatgtcttgtatggatgccatgtcttgcctttggcaaggttgtactccacctgtactttgtcatggcttatgtggacatgaggagaataggtatgccttacccacatgtctgctataaatacctccattttttatgtagagggggtgaacaatttttacttacaaaagctctgctgaaatgttgaaaatattttaccaggatctaggtttact

SEQ ID NO: 318529 - DNA, 625 bp, Cannabis indica
tttttgtggaagtgtgtctttgaatcacatgagcttcttaagtctggggttcgttgggcaataggttctggtgggaaggttggtatgttgcatcagccatgcttctgaatgatgcgtgtccttttgttacttctgatacccaagctttggtgggccatgcagtgagctcgttgatgtgtactgataagagggaatgagatttagatattattaaagaacttcttaatgagtgtgatcaacaacatatttcagcggttccattggtccaaatgtagttaaggatcgttttttctggtgtaaggagcatcatggtttctacttggtgcgtagcgcatacgagttaatacaagctcatatagaaagttggattgcagccgagtcttctgggttctagcacaagctcaagaaattgaaggtactaccaaaagttctcaatttggtatggcagaatgcttcaaattgtttgcccaccttgactcaattaagtggtaagagggtcctaattcaaattatgtgtccaatttgtcaaaagggtgagcaactatttttcatgcgcttatttcctgttcgttcgctgctcaatgctggcagaggcttttggctggggttaggccgattgttgctg

SEQ ID NO: 318530 - DNA, 1060 bp, Cannabis indica
aatgccatatttttctaactttgttatgaaatcccatatttcatgtaattttcacttttttttaagctacatgtaattctcttgtaataatataaagtttatttcataatagaaacatactatttcaatttagtgagatatatttttttagttatagttatttaaagtattaccgttaattaatttataataaataattagtagaatacaaaaataatataattgttaagattcaataaactaatttaataataaagtgaatattctatttactagagaatatactctctctttactcttttttttttcctttttttttttttgtgttagtgtatatccaatagagccatataagaatatctccaatgagatattaaaatagttgtatagtgttatattttagtactttttaaaaaaaattagttcttcaataatgtgataaatcttgtgaaaacattagtatatttgaaaattgtgctaaatttaaataaaatataaaagtgtgttaaatttgacacacaacaaatgcaattttttattacaaattttccattaataattaataataggttttgattcacatttttaattataatattgtcattaattatttcttaaaaatttaatttagtaatgatcattaaaatatttaatttttttttttactaatttgcatcttagaatgttattgtgtattgaaccacactagcaatcataatatttatttaaaattttgtgtaaaattaagtactatatattatattcatatttcgagcagcaagttatggatctaaatagatgacacgtatgcaaaaaaaaaaaaaaagaaataaatataaagttgttgcaaccttgttgaaaaaatatatctctcatgtaattagaaaaaaaggtattgggaatgtgtcaaaaatattttgggtgacatgatttgagtagcttatggtatagtaaagcctaaatggccatttcaactacctttaccctaagcctaacattagaagcctagaaagaccttctgatttttagttgtgcattaatctatattagtggagaatag

SEQ ID NO: 318531 - DNA, 1421 bp, Cannabis indica
aaaaaaaaagaaaaaaaaagatatagtgacacttttttgtgtgtagctggtactttttcagtctgacaaaatttgactttaaacgcctatagtgacccgcagtgagtgactgtaaaagggttaagtgacacgcatgaagtgtcactaaaaattgtctttccagtcaccctcattagtgacgcgcggtgaagtgtcactaaataattttagagtcactcaatgtgtatcactaaaacccacttttctagtagtggttgcctcacaaaattttatagtttcggtacccccaaagtttgcaatcaaattttgtattaagcattagtccatcaccgatactcccaaagtctgcaattgaaatcttatagttttggtgtttcggtacctcattaatcataaaggattcctaatatttatttattttgaacatttaacgttagcattctgtctacttttaaattaataaaaaaaagaatcattacaaaaattgttaatctaacaaatgacattaaatagccacattttatatataaagatattaagaattaaatttttaccttattactgtaatttggcgatcaatgctgacaaaaattcagccaatcatgcacataaacaacaacataattttaataatatagaaaaatccacaaaaaaatttacaaaaataaaaataaagcaatgtacattactaagataaatagaaatcatatttataccttaatgaacgttgagattcaacgttttctccactaaaatcggtggcccaagttataatcccctcattacttcttgacatcagtttacactaaaaacaaggaaaaaattgaagtttttcaggtgtataagtttaagtatagaaaatggaagtttttttttttttttggaaaaaaatgggttaaatggtgtaaaaatggtggagatatgtgaaattttggtggtcgttggcgagggttttcattgtgggttatgtgtgcttgtgatgttggtggtttcgtgatgaagaaaaggcaaagaatgggaagacgaagctaaaaggattatttatataaccctatcatgtcagttattagaaaataaccgatgacataaggctcacgtgtcagttattttgtgtaccctctgtcgtcagttattgtttaataactaataatgggatagggttaataaataacccttcatcatttctattccccaactgactccgtaggtgtagtctacctacggtttttataaaataatcgcttctaaatgttaattttaaacagccgtgtatctttacactctttagcttacccttttataaaacttgtggaaagaaaaaaaactttctaaaggttgttttgtagtagtggaagaagacactacaacaattaataccggcggagccaaaccgccagtattaattggttattaccggcgga

SEQ ID NO: 318532 - DNA, 1136 bp, Cannabis indica
ggcaaagcatgctctacggttagacgatgagctatccgtggtacgaggacgttccagcgccggtggcggacgtctgcgtcgtaaattcatgagtgattctaatcactttgtaacaaaaaaaaaaaaaaaaaaaaaaaaaaaaatagtttggggtagtattgcatcaaatatcccttattattatgtattatctcttataatattccttatctagtattaatgttcaaaaatattaagcacttcattttccttaacttttatcatcacacttaatcaattttcacaatggtgtggtgtagtgtttggttcatccatttactttcttttgtactaaatgacaaacttcattgacagcccattttcttttcaacagcccttttttatttcttcaaaaaaaaaaatatatatatcttcttattaatcactctcaataatctcatgataaaagaagatccatcaacactactaataattttgttaaataattaaaacaaggttgggtaatgggtgaagtataatagagacatcgaatgtagtgagagagagagaggaaaagaggcacaattagcaacgaaggaggtgtcggaggacgcagcatacgatgaagcaaagtgtgggaaatggtgttattgactgtcgtgtctctattccttgccaaacctcatacttcttccccacgtatcttctgttaggatttataaaacacttaagaaatatataaatcacagatccaaacatattcctaaaagtgctttaatatagaaaaccctaaatcataaatctataaagcctttgctaaattaaagaagatgataaaatataagcggaagcactaacctgaagccattgttggagattacagagaaggttttgatcttccaagaatacactattttctagagtattttctctgatggggaaggagagaatacagaaaccctagtgtttcttggggaccactacctatttatagagtcatcttagaataactcttgggtatttataatttggcccctcaacaaattataaattaacttatggtatctacacattaattccatgacactttaatacccttttgatacccataacataattggtcacttaattttgtatcacactttataatagcatat

SEQ ID NO: 318533 - DNA, 847 bp, Cannabis indica
tcaatcgcattcaattgcggaaattcccaacatttcgatcgtagaattttttatcttcctccctcaatggcgttcaattgatgaaattgggattaacatttcaatcgtaggaatttttctccccttctcctaatcgactaaaaaaaaaaaagaaaggctattttatatttttgttttcaaaaatttcaatcgtatgaattttttttgtcttcctcagtcgattgaagattacatactgaaaataaaaatgatgtagactttgtgggtaccaaaactataaacactgtaattttcagatttgagattttgcattcagattggagtttgggaacgctttaatacatctccatgtgattgcaaacgaaattgataaagcttgggaggaacaaacaaagtttccattccaataccatctataattgtactcacgacttttgcttttcttcatagttgatttttgggaaggaaaaattccatgagtttgcatgctataaactgtgtttgagatttggaaaaaggaaattatagataaaaataaattgggtatttaaccccgttaaactcagccaaaaaaaaactgttatttttgaatagaaaaccaaaaaaaaagtcatccaataatttctcataaaccaaatattctgttatatagctacattttatatctatttctatctatatctatataaagtgtgcctatataactaaattctttctttttgagaaattaatgggtggctttttatatatatatttaataaaataataaaatattatttatatatataaaataataaaataaaaataaacaaatctcattaatatttgaactgatatttgatgctaa

SEQ ID NO: 318534 - DNA, 1564 bp, Cannabis indica
ttaggggcgacttttgtcgcccctaattagaggcgactgtttttgtcgcccctaataatacttttaggggcgaattattagaggcgaccttttaggggcgacttgtcgctcctaataactattaggggcgatttctagtactattagaggcgacaattgtcgcgcctaaagcccaaatttattgtagtgtcctattcatagtagttggtatttgaagaaaatagtggctattaaaaatgaagtaagaactctcaaggattatcaacaaatgcaaaatgaagagaagatctcaaaggggtacaaattgttgatcactccttgggagaaagtaaaatgggacaaataggtatggggaggtttaatgtacccaaacacagttttattttgtggatggcgatccaggacaaattgaaaacaaaagctagactccacaaggtgattgatgaagaggtatgtggattttgtaatatttacaaagagactgtgtagcatttgtcatttaatgctcttttagccatgcttgtctttagaacttgaaagcttggctcgggtggacatttttgtctgttgaccttcaaaatttggtcaggtggattgaaagatcaaaatattctaagttcaggaaggcagtgcttgcagcaaccctgacatcactagtttatcaactatggcgtgctcggaataaggaagtcatgaaagttggttccagtagccaagaaatgatcttaagaagggcaaaagaggcaataaggacttgaataacatgtacaatgcctacgaagattaatcaagaggacatgaattgatttattgatttgtaattaaaaagtattgatttgtatagaattgttttatatcttaagttcttttaaagatgttattaggttgtaaatgatatttagagtaatgaatataatgctgattaataataataataaaaaaaagagtatgatattgttcttaattgatatccttcaagtttgaaagtcctttttttatgtctctaattctcattgtaatcgagctagtaatacttttgcttattctctagcaaaactgattatttcattagaaacttttcaagtaacttttcatgtttggtggccgaatctttctctcaattttctttaaataatgtatgcttgtattgattttaagatttcttttgttttgtgcatttcttaataaatatatttatatttaaaatgataataatgtaataatgcagtgcgtctgtatattataatatcatacttcagataaaaaaataatgataggaatactttgggcttacattaattttattagtttttattaaaacttagattgattggatagttctatgctgtattagcttatattgttggtgatcaatagttaataagcttagcatcagtgtgtaaagtataagtgaagcaaaagtgtgggcttttctagttaactgaagcatttgatgagcatgccaattgtagctaagtccctctcgaactaaccctataaatacatattgtctcatcataattgtatgctttttgataatcagataaataaactacttctgatt

SEQ ID NO: 318535 - DNA, 631 bp, Cannabis indica
aaaaaaaaattaaacttaaaaatatattttcttttttataaaaaaaattgtaacttatgtaattatctcttaaataattaattacatgcataaatatataaataaatatgcatacaattaaatatttaaatattattattttcaataatataaacaattttaaattctttgtaaatatatagaaaatctactataactatatagtaattagataatgttatgtttagtgtaaaaaagaaaaaaggatgtgtgtgttcacattattagtaagtaatttatagtgtttatattatatttatatagtagctatcaacaggggcacacccaaaaactttgttaaggggaggacaaaaaaaaattaggagaaagtaaacataaatatattaagacacgataaaaattaatttaacaaaaatataatataaaagaaactacaataaatataaaaatatttacaaaaataaagtataaatgtaaaataaaattataaagagttaaattgtaaataaaaaattttaatattcaaatgttaggattggcatatgtcactgctagtcctgtattggtgtgatttataaaaaaaaaaataataataataaataaatagcggaaattttataatgcacctcct

SEQ ID NO: 318536 - DNA, 1355 bp, Cannabis indica
tctcattgtgtgcaagaggaagaaaggttgaaaaatgacaaaattgaaagtgctgacttggccactgcccctaaggataagggaaagaaaagaaaatttgagaatgaagctgctaagggtctagttcaaaagaaacaacaatagaattctaagggctgtttcttttgtagctaacttggatatgtgaagaaagattgtgccaaatatcaggcatgacataaagaaaggtattaatctttctttgttctgttttgaggtcaatttaccttcagtacctagaaacacttggtggatagattctgatgctactactcacataagtgtttctatgaagggttgcctgagctaccgaaagccaagtgatggtgaaagaaccatctttgtgggcgatgaacaatcggtagaaaaagaagaattgggcattttagtttgttaatgggaactggttcttatttggatttgaaagatacttttgttgtgccgtattttagagggaatttagtttctgttattttgttggacaaatttagatattgttgttcatttgaaaacaattaatttacttttttctttaaattcaaatgttattggagctagttatttgaatgcttatgataatttttattcactagaaacaagtgcattctataatgaaatcttgtatgtggaatcacgaggtactaaatgcaaattaaataaagaaaatttagcatcattatggcataaacacttaggtcatatctcagaaggtagaattgaacatcttgtgtctgatgacattttagagttttgtgactttaaagattttaatgtctgtgtagattgtatcaagggaaaacaaaccaaaattaagagattaggtgttaatagagcttcaaaggtcttaaaattatttcatacagatatttgtggaccattccctacggtatcttggaatgatcaacaatatcttatgtcatcattcatagacaattactcacattatgggtacatctcattcattaaaaatttctgttgtgggtatgttcaaagcttacaaagctgagctgagaatcaactcaacaaaaggtttaaaaaaagtcaaatctgatcatggtggtgagtactatggtagatatgacagctcaagtgaacaacttccaggactgtttgctaaattcctacaggaatgtagtactatcctgcagtacaccatgtctggatcacctagcatgaatgattttcctaaaaaataatataggactcttaaggatatggtaaggaggatgattgctcattatagctaacctaagtctttctagggagaagcattaaagacaataacttacattttaaatagagtaccaactaaagca

SEQ ID NO: 318537 - DNA, 1624 bp, Cannabis indica
gaccccgaaccctagacctagacccaaaccttagaccctagattagacccagacccggacccatgaccctgaacctcggaccctaaccctggactcgggctcgaactcgaacttgaatccaaaactcgaggctaggtccgaggtccttggtcgggtccgtattcggtatgggtgttcatcaaactgctcacatcgcacaaacctcccgcactgcaccacatcacataaaaagtggagtttaaaatcttttgcggtgcggttgcggttttgaatttaataattgcggttcaaaccgtagtgtactatatattagaaagttataaatttttatagtttgagttttattcttttttcatataagaacaaatatatgtatacattacaatattttttagaggcaatttaatataataactaatgattagtatatatgttatgatgttaaaactttaataagattttttttgtattgttaaatttttatagattgatttttaaatttttattataatgttcgataatgatgatagtgtaaatcaatcaaactgcaccacaccacactatattttcgcggtgtggttttttgcagttttaaaatttcgctgtgcggttgcagttagataaatttgaaaaactgcatatgcggtttggtttgaaaaaaagttacaacccacaccacccacattgcgaacacccttagtgttggggtttggggtccgggtctgggattcgggtcgaggtctgagatctgggtctagggtttggatccgggatttaggtctaggtccaaggtccaggcttcgggtccaggtctaggtttaggtcctgcgagatcgaggtccgggtctggggttcggggtccaacatctaggtataggtttgagtttggcgtctaatttcgggttcgggtctggggttgaggtccaggtatgggtccagtatccgagatccgagtccaggtttgggtcctagtccgggttgggatttgggtcagggtttgggatctgggtccgtgtcgaggttggggtcgaggtccaggtctggggtttagggtctgcgtgagtgtccagagtcggtgttcagatccaagttcaagtctgattctgggtttaggctccgtatatgtgagcataaatattaaatataatatgttagacaaaaaaaattattttttaaaattgaaaataatattttgaagttttttgtttctagttttttttaaactgtttttcttttataaaactaaaaatcaatacaaatgttaaggattagagacaaaaaccaagccaccaaacaggagtaattagagtgtaataatgtaattggaggtaattgagggttccaattacactttccaacttgtatagcccctcacgtggattgagtattgtaattactaaaaatattccgttttaaaagaattattttattatgtaagtgtcaactattttgccaaacaaaacattaagaattcatatgtatcttatatacatacacaccttgtaatttaaaatagagtaatcactactactagttaagtgtaattatactctataattactaaaaaatttctattataaatatcaactactatttttttttttttataattactaattatttt

SEQ ID NO: 318538 - DNA, 995 bp, Cannabis indica
tcagagtttaaatcttcaatgattgatttcaaatgttttgagtttctctttttcagagaatgaacaattgatttcattttcgaagctatagaagatgtagggttatgaaagttttctttaaaatatttcttatctattgctaattgactaataaaaataagagaaacaaaaaagaagaagaagaagaaactgaaacaaaaatggaagatataaagggagaaaaataaaaactaacactagaaatgtgtggatttttatacaaaaaaaataattaaaaagaaaagaaaaaaggaagaaaaagattaataagaaagagagaatggcaatatgaatgaaaaataaataaataaaaaactattataactacaaataaaaaaaaagaccatttaaaaaaaaaactaacaaataaaaaaaactaattggtggtggttcttatagtgccattccacgtgttgcgaatggtgtggcccacgcactagcaaagtctgttactagttccgttgggattgatttgtggacaggtgcttgtcctaaatttattagtactcctagctgatttaatttaatgtgagatatcctttcttaaaaaaaaaaaaaactacaaataaaaaaccaaaacttgtaatagagagttttgatcaacttttcatcattattttcaataataaagaaagggaaatttcattaattgaccctaataaaataccccatttcaaaatatataccctccactaatttatacaaattaattccactattactcatttgtacccaaaatacccctcaaatttaattttcctattctttctctctctttccgtctttccctctttcactctctctttctctctctgtcgtttgctattccctctctttccctctcttgttctctctctgtcgtttacatctttcgaacgttactccacgacgacgacccaacgacccaacgacccaacaacgcagtccacgaacacgaccccagtccggccacccac

SEQ ID NO: 318539 - DNA, 1658 bp, Cannabis indica
acatgtaaacataaataatttctaatcttctattgatagcagataagattatattgaagtagattttatttatagcataaaatcccaacaaaatatgcttagcagaatattatcagaagaatttagacaacaccaaaactacaagtattcaagctaagcaagaactcacttatagaacttgagtatttgcctaggtttacaaatactcagaataacaatatgattaatcaaattaatagcgaataaacaaatgagcacaattatagtggttaagttagagctcggtctgcttagtccacttttgaaagagaattgcgattagtttcattcggattggatcactctttcatatagaaagcaagtgatccctcagtttacataaccgatcaaacatgaccattacaacattaattacatttaattaagattaaaaaatatctataaaataaatataagagcagttttgaccgttcttatttaatattcaaacgagtggaactaatgaagtcacacattggtcgttcacattcttaagtaacacgaaaactcgtggggctctctggtgctactcgcatataaggtcttttgaccctttaaaacacataaaaatctcttggatttttatcgatgcgtgaacctctttgggtttataaaatagaatgcttgcaactatatcgatcacatattgggcatttatgaatcgacagcatagagctcacaggttctagacaagttgtcgcttacattagttggtcaaacctgatgcttgtaaagatgcagtctttacgtaaggcgcaagagagttacatttggtcaccgtatataattgatatatgtgcgactatgctaacttctctttgtatcatgcttttactctactataatatgtatagtgtgcgattagaccctgtctcaatcacaccttctcgcaaattttgatcaagcgaggatagccctacaagggctgttattgacacttcatcctttttcaacttggaattggatccgcgtatcaactataaacaaaattgtacttgtatttctaggtgaaaaattcatcctataacacaaaatattttctaagaacatgtttagcaaaattatttttataattttaccatttctcactagtgttgtaaatgcgggtcagactttttgacacaacatgatatcggtgcgagctcagaaagcacgagcataacaaggcacgaaaaaatacgggcttgggcacaacacgatgctacaaattggtatgacaccatgacacgccacgaaaaaatgtccttaagcacgacacgacacgagaagcacaaaagacacaacatgtaagcacgtatagactagctcgaaagcacaaaacacgacaaacccaaaaagcatggcacgatatattaaaaaactttctaatttattaataataataataataataataatatatgaatctatcaattataaataagttaaaataataatagaacttaaatattatactgagtattataattttataattaaaaccattaaaacataataaattaaaattatatattagtttatttaataagatgtgatataaaaatttgagtatcgataagtaaatattcaaattctaatgatgttaataattttttttatataattatttataaaatatt

SEQ ID NO: 318540 - DNA, 1896 bp, Cannabis indica
ttttttattcattaattaaaaatacctttatattatattttattaaaatgtgcctactcttttaaatgtgttgtcaaatatattctacttaaatgtagcatataatttacattaatttaagggatctaactggatatatcttaaagaatacaaaaatagaggtgaaaattaaaataaataaagtaaaatgggtatacaatataatttcctctatgaattttgagttagcaatatggtaactggttttacacctcattttgggggaacgcaagataaaatatcttaaatttttatttatttatatatattaaatattaagttttgtgaagtattttaaatattttattttttaaattatttataattgtaacttatacatttttttaaattattattaatgaataaaatatttaaaaaatttaaaatgataaaataaaaatttaaaacttcaaattttaaagtatttatattactaagaatatttaaaattaggtaaaaattgttaaatattttcagttgatatttattataaaattaaaattatataccataaatattttaaataatataatatatatattaaatctagttaattcaaataattttttattttctttatgtaaattataaaaaaaaacaaactcaatcaaacaaattaaaacaaacaattatttagttgattgatccaataaactatttatttagtttgtatttaaaattaaaaaaaaattataactaacgcaaatagaaaaaaaaaaatcatgatttttggatgtattttttaaaaatgcgttaaaaactataaattacaaaattttatctcatgtgataagttacaacatatttgaagaaaaaaatatattttagttgtgtaaattgaaacattaaaaaaaaagttaaagttattgtcgttaccgtatctaacttgtaaccactactatattcaaagttgttttaatcaccatatctcacttgtagcgctactgcattcaaatttattattattaatatcgtatctcacatatagtccttcaaacttgttgtcaatgtatttcacttctaatcgacactgcattcaaaacttttatcatcaccggtatcaaagatattagcattattaaagttaataaaactattttaactaattctttttaatatatataaatattataataaataagatttctttcctacaaattataattgttgtacctttaacttcgatcaaataaaaagaatatataaaactcattattaaaagtagaaaaattacacaatatatgaaaaaattataaaagtttacttttttatggcataaataaataatgctatgagattatagatattttatttttatttttttacatttatatgtgtttttttatgccatatttttgtaaaaaagatagaaatcacatatttgtaaaacaataataaatttctccagaaaagtcaccggtaccggaaaagctgctagaaaaattaccgtcgccgaaaaagtcaccagaagtaaatgtctcagatataaacaaaaatagaaccggttctattacataattaataaaaataaataatataaaataactcaaaccggttataattgaaatataaccggttctgtaacacaatgaataaaaataaatagcacaaaataactcaaactagttataattaaaatggaactgattctataacagtgttataatgaataaaaataaataatacgaaataactcaaaccggttattactaaaatagaaccggttatataacataatgaatgggtattttgggggtaaatatggtatgagtgttattattcatgaatggatgcttttgtttgattattttatttaattgatttttgtgtgtgagtttttatcttagttgctttacg

SEQ ID NO: 318541 - DNA, 646 bp, Cannabis indica
taataaaatcaaaattaagaaaacgaataaaaaaaaatctcacgtatgagattatttatcccacctgctagatgggataaataatcacaaacagatgagattagctgcattatttagacttctaacatgtccaaacattggattagacaaattaacatgtctaatccaatcgagtcctgcgtactaaataggctagtaatagaaaaagaatccgtaaaaaaccttggacatgccaattgtttcaaagggattgtaaacttatccatttcacacacattccctaaagaaacatctttactccaaccaacacttacgctcccatgagaaccgcagccgctatatttttcatggccaataaacgaagagttgtggccagcaaaatggtgcggcgtattcaatggaatatcagcaagaggaactctattgatattactgaaacccctgattaaataattatttaattatttgtttttatttgtccctttaaatttcttttttgaattcaaagaagcgaataatttaaagaaatttttacaccaaaaatacaaattacacactttattacatataaacctacacacggttaaagcaacttttttaccttttctctatattttattacacatataccacatacacatcacat

SEQ ID NO: 318542 - DNA, 1174 bp, Cannabis indica
ttaacaaacaacatcaactttaaaatttttcttatatacttgtagtttctttaattttttttttacatttgaataaatataataaaaaaatactataaattatttttattaaatatacatataaatttatatttaaaaaaatatatataaaaaaaatattatattaaataagtttttacatatttgtgattataataaactagattataatattatcattatcattataatagatcttaacaactcacagtactttaaaatttataatttaccaaatattcagcacagttttatttccactgctacaactgttttttctcacagctcttctttttcccacagcacaattatgtcaaactgaccctaaatatataattgatatataataatgtattatgtaattattaaacaaatacaacatctaattttataatttattcctgcatgccgcacatatataagtacaattgtaagtttgttcaaataaaaaataaaactccaaatggaatcaatagccacaaaattacaagtactatgtatataatttattaatagagtactttaaattattcaaaaaatatatataatttttattattgtagttgatgttgattagtttgtcaaattagtataagtagttaaacatagagacgagatgtgtaatttaatttatttatctatattatattattttttcaatagatatatattatattaattaatattattagaagggacacatatatagatgcatatttgtgtaattaattacttctaatttaactcattgatatatctttttggtcaagtatctaagaagaagattaatttgtcataataaaaaaaatgttacctctttcaattatatatttatggtgactattaaatgattaaaatgtgtaattatgataattatatttttttataatttgttataacatattattaagtgataaaattttatttttagatttaaattaattataatttactatataattaaaataaattgatttttaattaaaatatttaatttgttataattaattttttattttttatttattaaggaaataaaataaaatacacaccttaatattaggttacaagtaatttattaattattttatttaattttatttaactaataattcaatgactatataaataaatg

SEQ ID NO: 318543 - DNA, 586 bp, Cannabis indica
caataaaaacgtgacaaattccaaagatgacattaaagaggattgaaatttcgtagaaacattattcattagatattaataatcatttttggtcagccaatataaaatatgatggtaaaaaagttgaacacatcacaagtttacattatattgaaaaatcatctacaaaaatatttaacaattgtactcatcataacttttcttagtgaaaaaaaaaccatgactaatcaactatataattaaaaaagataattaagagaattgaaatttcgtcaaagcatgattatctctattacatggtcataagatgtaaaaaagaattgttatattaattaagctaattatccatataaatatataaatatatttatataattaagttagccacctttgaaaaagtttgtgaattacaacttttttgccgcccattatatatattattggaaattgcatggtttaaggtcaacataagaacacttagatattagatttagacatcatcttattttttttttttattatatatatataagtagcataatagatcacttgttttgtgttgtttgttttttttttttttatgaaa

SEQ ID NO: 318544 - DNA, 1153 bp, Cannabis indica
ttagtaaagaatgaaatcaaaatgcaacactctaataaaaatacattaccaattatactcggggtcaccaccaatgaaaataataagtgacaactcactattgttctactttgaacttagaaagaacaaaatgcagttagtgagtcaacactgttgatctcatctttcaagcctttgacgaaattgccttctaaaatgtgcttagggatgctggagacacgggaagcgagagattcccagtagatcagataatccttcaccaaagcctcttgggtcccaaataaaaattcctctgttgtggtccccaaccagaatggccttaaactgcataagcaaaagatgtttaaaagcggtccatgatggaatggcacatcgttggtgttccatctagaactatgtgagagcgtcgccatccaatgctatcatcatcgcctctaacatgtggacatcggagagatgattgagcaacaaatagcgtttgagcttgaagatccaaccctctagattatccttaatgaagataaggagctccacttgagggagacgatagcccgaatggaacaggggttccaaaaaatgagtgggatcgtcgatctgagcagacgggtggaaagggcagcggaaatggtggagcttagaaatcacgtggaggaccgaaagtcaatggggagggaaaggaggtcaacaatggctcaccgtctatgggtttcttctgtcgatcaacgctagtcaccatagttttagaaggagggtgaaggtcggtaagggcttgtagaaccatcgctagttggccagacacgaactcaaatttctggtcaaaggtcgagcacagttcacccaattgcctattgaccacagtttggaaaacaccaaagtgattatccataccgttgagaacatccttctttggacccatggccaaagatcggtgtctctaataccaattgataggtcacaaataatatagtagcagagttcatagaagaaatttgaagaaatagggagcaaaaccccttttgtattaataattgctaagagattcaagagtttggtctctccttacaatatggaagaaaataaaggaattacataaatcattcacacccccactattataaatatttccttatttatattagcctagtgtgcactg

SEQ ID NO: 318545 - DNA, 1788 bp, Cannabis indica
ctccacttgagggagacgatagcccgaatggaacaggggttccaaaaaatgagtgggatcgtcgatctgagcagacgggtggaaagggcagcggaaatggtggagcttagaaatcacgtggaggaccgaaagtcaatggggagggaaaggaggtcaacaatggctcaccgtctatgggtttcttctgtcgatcaacgctagtcaccatagttttagaaggagggtgaaggtcggtaagggcttgtagaaccatcgctagttggccagacacgaactcaaatttctggtcaaaggtcgagcacagttcacccaattgcctattgaccacagtttggaaaacaccaaagtgattatccataccgttgagaacatccttctttggacccatggccaaaagatcggtgtctctaataccaattgataggtcacaaataatatagtagcagagttcatagaagaaatttgaagaaaatagggagcaaaaccccttttgtattaataattgctaagagattcaagagtttggtctctccttacaatatggaaagaaaataaaaggaattacataaaatcattcacacccccatattataaatattccttattatattagcctagtgtgcactgaagaagatgcaccttcccaatctcaaaaattcctcacataactaacatgccacatcacttttcttcgctctcctagagtaaatcaatgtgagaggaggcctatcaaactcccacatttatgtcataaaatggtattatcataacaggatgaaagaggataaataaattgcaaaatatgggaaagttcttgctccatctatgaaaaaattgtggtgtagtttctctaaatattaagatcttcaaaagtttttcttgttgtgtaaagttaaaagccatctggaagggcgttcttagaagtctaacttgtccatgtagaagaagtctagtggaatgatagatgttgtccggaaggaagtttccgaaagtctatcttatccactctggaaggagtctccaaggaaagcctgccctccttcagaaagaagttccagatggctaattgttccctcctggaatggtgttctggatcgtcgactccagctattactattcctatctgggaagaccctttaatgtgtgctttggtttttagtccccattcttcacatataatttcaacaaatttcatcaaagaactaatatattcaaaatttatacaaaaagaaaaccaaatagattgaaaaatttaccaaaagatcttcactagcagaaatgtagtgaataggtttatgcttctcgttaaaaggaaagcttatctgtaagaaggccattcttgtgcatccaagatttcaaatcctccacctcctctttcttgctggcaacatcacgatacttcccgtccttctccttttgcgacctgacggccaatgtatccaaattcgatgccgaacatagatttctccagcaaaaaatgatcgagaagaagaagaagaggtggaaagagtagggttcttccaaagtgaaattgatacggtggaatgaagcaagagagggccattgggggaggaataccaaaaaaaaggtccgagaagagaaaatagagtgagggaggttgggctttgggatttgggaatagggttcgcttgaggtgagggggcccgaagatgatgactccttggttttgccgtcgcatgaggtaaaccagagagagatagagaggtattgggagaggaggagagagagagagagagattagggttttttgagttataattttttttt

SEQ ID NO: 318546 - DNA, 641 bp, Cannabis indica
gatacatgataacaaaatggagtctagtacacactatttctggtaattacatatcatatatgctaatcatttctaacttttatttatatttcatgcatttttatgtctctcctcttgtttgttttttaagtaatcatattcatataaaaaaaaatttgttggcactgtcaaaaataaaacctaccattatcaacattatcatgttcttcataaatataaaatctggacattcctctctaaatatttaatttctgaattcccaaaccccactatgatacccaaatcacatacctactcaaactattaattaaaactttttctgacaaactcattactcttttcatgaataacattcccaactcatcaaatcatcaaaaaaataaataaacaccctcaaatccttcattcgaaaaaagcaccatgaagacccatcttcttctttgagtctgtgaccgttcgtcttgtcctgtcctccttcccattgttcgtacttgttatcaaattgcagattcgttgcaaaagcacagaagaggaagaagaagaagagaggaaaaataaaaggatctactgattgtattttgtatttttgtttcttaattaatttttaatattagtttattcaatacattcaagtatatatt

SEQ ID NO: 318547 - DNA, 1056 bp, Cannabis indica
tatatatatataataatattgatccaacatgcatgtaatgtttttctatttttcattaagagaaaatcgtaagtatttttgtccaaattaactacaaacttcatataactctcaataaattaacatatttcatgcaataacaacagctaaaactccaaacgtatataataagaaaacatcattgttgagccaaactaaaacttgctcaacatatctgaaacaaccactaaaaaaacctatataagtcttaaaagaaagcttagaaaaaacaccctaagaagctaaggtttggacaaaacctaatctcaaaatctgcatgaacaaaaccaacacctttacttcaaaaatcacaaagaacaatagtttagggtttacttttactaattctttccaattgctattgaattatcttagggtttgtttagcacgttgtattacatcgcattatattgtatagtattatactgaattgtattttatacaatatttttatataaaactatatatggtattgaattttataggttcctaatactttataatattttagtgtaaattaaaatttaacatagtattatataaaaatatgctatacaatccaatataatacaatacaatacaatacaatacaatacgacttaatacaacgtaccaaacgagcccttaattttccccccgctaggatgactgaaattcaaaggaaaatccttggtttccttgggttcagaagggccaagagagagacttaaaagagatgagttttgacttcttgatttttcttctaacttatctttatttcctttattttgttttataccaaataattataattaatagaggttttttgcagttaaaccctctcaactatcactctacttgtacttaaccatctaagctcaaattttgacggtgaactactggtagcaaattgaaggtgccttcaattttctaatgccaatatagactacttatgtgtacacttttgtacatgtatcacatttatattggtacacctaatattattatttaaaaaatataaaaattatttcaaaattt

SEQ ID NO: 318548 - DNA, 848 bp, Cannabis indica
agtggaaccactatacaagttggctagtgagagcagttaccgagatgttctccattcctgtattttggtagaagagccaactctaagttcttattgtactagccacgcttgtatgcaccttttctttctatcttgtaactcagtgcggacctttaagttgagtctatctatgttgaccttaaatttgcccaactgacaggaaagtcgtatttattactgatgcttacctcgcgtacataatcagaacaaaaaagtaaatgagacagaatatttttaaagaggtttagcccgctaacttaacggataatgacctactccccttttggttgtattaatactagagataacaccacttagatcacaagggttacggaatctaaagtggctctcttaagattacaatatgataataaagtaggaaaatttaaagtgagagagaagccttgagcgcataagagtgaagggaagagagagttagggttccagaatcagagcttgagagctttaggaagattagagaattagaacttagataaattagggttaggctcatgctctttatataggagagcttacatcaagataaaaagctaatatctctaaaagaaataggaattataaggtattctttacatgataaaaaataaatagtaaataggttaattatctctcaagaataggggaataaattttcccctattttcgtgggttgttgaagcccaaatcgtagcttggcttgttgtctcgactgaagacagcgcaccgagggcctgccaggtacaagctggggtctggctggccatgtttttgctagggtctagccggccatgatcctgctagggtctggc

SEQ ID NO: 318549 - DNA, 823 bp, Cannabis indica
tatatttttatctcgcatttagactgtttcagttaaccgagtttataaacatactctgttaattatgttgttaacaagttattccacgtcaagtataattatgattgcgtgtttgagctctccattctttccaactcgacacgtgttttcttcttatgtgctcaccgaatttcgagtataatagttttcactctgcttttgctttcacgtaaagaatccaccgatcacgcataacatttatctcgttatttgtgtacgaagtggagaagctatcctgtaaaacaaagatatatattaattagtaaagactaatattaattatcatatgctatttaataaagaataataattactataatacttattaatttttttaccgattgtgtcaatacgtgtattggatcttctacagtcatgaaatttttcgttgaatttcatgacgtagtatccacattgtttgtcctcaggttgttcaggacatataggatactaatacccataaaatatttaaaatattaaattaaaaatttacacgaacatcacactaatacttaaacataattaaaattgacaatgcaaaacacttcaattttttccttaactatactaaactaataccaaaatattttttacctaaatttatgcaattatataattttattaataaaaatttataattttacctaaactaaattaaaataactaattaatttttataataacaattgaaataaataaattttttacacctaaacttaaattttttctattttaaatttttttaaaaaaaatattttacacattaaatcttttacaataataa

SEQ ID NO: 318550 - DNA, 781 bp, Cannabis indica
tctcatataacttaaaaaaaatagcttttaagcaatatcactaactaattgtgaagtgtcacttatgaaagatgtcgaacactacttgtttcttattaataataagaaaaatgttaaaagagataatcgatgcttagcatctcttacgtgttaatattgttattgatctaattatgtagcgcatcacatgtaattttatgtaataatttttttaaagaatataattagctaatcacaatgcaaaaatagtcaactcattaatttattaactcatattttttggacataatgtatagtacgtatgccaacatgtgataaatttgtcattttttttagtgcacagtgttgagtgttctaacattttcccgttcagttctgttacaaactagtaactagttattattttgattgttttttttaaacagaaaaataaaataaaattgggaaccatttattgtgtcatatttttttagattttggtatatttaattaataattgcttactactttgaaactttaaaaaataaataaagtaataatcttactttccgtttgcacttacttttatagattcctaatttgtgtatatataaataataaagtcatacttttatttcttgttgcggtctttaattaatattgcttttattttttcttcttgaaattataacttttatccatcttatataaactcgatatatatatagggacatgattttgtcctattattatactttcacggattgtaatccgtgatgtacggcagccgttagatgagaga

SEQ ID NO: 318551 - DNA, 1255 bp, Cannabis indica
ctccagaattgagaaattataactctaatatttattactacatattggggtccacaattaaataaattcataaataattataaagtaacagaaattagtgctaattgcctttactaatccaaattagtaagcggtgattacagaatggaactattagtttcagaggcatctgcgaaagggaaaaaggtcagccacataatcaaaaaaaatatcgacaatattattattcctgaaaaatcaaaacacatacaaaaaatcgataaatcattgataacaatcgagaaaatatcgacaatatgtcaatattctatcgacaatttgaaaatatccaaaaaatataaagcacaagcaactttatcaagaaacatcgacaaaatgtcgatatcctatcgatattcaataaaagaaatgaaaaaaatagacaaggtaacactatcgactgctcaattgatagtttattgatatcctatcgatatcatatggataattcatcgacatgaaagtaaaaaaaataagcaataggcaaactagaaaaaattgataaaccattgatagcagttgagaaaatatcgataatatgtcaatattttattgacaatttaaaaattatccaaaaaaatataaagcataagcaactttattgacaaacatcgacaaaatgtcgatattctatcaatattcaataaaagaaatggaaaaaaaacaagctaacaactcaattgatattttagcgatatcctatcgatataattcattgacatgacaataaaaaaacacaagccattggaaaactagaaaccatcgataaacaaatagagaaactgtcgataaactattgacataatataaatcctaaaaagctccaagcctaaaaaaattgtcgaaaaaccatagacaaaatgtcaatatcctatcgacagagagttaaaaatttgaaaaaaaaaaagtagaaagtcacaatcctaaccaaaccatcaacaaacaatagatatcctatcgataacctatcgacaaacattaaaaaaatttgaaaaacagttaagctaaactatcaacagccccttggttccataattgatattctgataaattatcgatatcactgtgaaaatacatagaccaccatcaacaaaacacaaactccacaaaaatctacaaaaatccataaaaattcaagtaatctccacagcatacacaaatccacaatttaatctatgaaaaatttacatttttttaaagaaaaacttacaattcg

SEQ ID NO: 318552 - DNA, 631 bp, Cannabis indica
tagctaaatatagagataactatacattgagctaaacacatttttaatattattttctttaactttttatatatgtgtgtaatattatatgaattattaatataaaatgaataaaatatattaaaaatatactatttaaatgatatagagaaaaaatagagaaactaatgtatgatataatgtaaaagtttgaggtaaaatagataaaatagagttttggtaatgtattttaaagaatagagtagagaaactgttgttagtgctcttctcaagaaattagtttaaaatccaataatgttactagtgaaagaagtagtattctcgttgatttattgttaggactttattagtgttatttttaagtaggtttttaaagtatttttagtgagttttgtataaatttacgcttttagttgttagtatttttagttatataattttacaattttacaattttgattgttaatgtttaaagtcgagaaaaaatgtataaaaaggatggattaagttaagtcttgtcgctagagcacaaagagatgaatttaagaaaaaaatccagaaaatttgatgtgattggagctttcgaaattgaagaactgaaaaattttgaaatagtgccacgacataaaaa

SEQ ID NO: 318553 - DNA, 535 bp, Cannabis indica
atttaataaaacaaatcacaaaaaaaaatatatattatgtgatcttcttcctttactccctatcatctcaatttttcatatttaataattataagttttttaatctatttttctgatgtataatttctttcattagattaattttttctcatttaattagctttaagttattatttatgaaactttttctctgttttctatatcccttcgatctgctcataatttcacccactttctcatttaattaatttttcatatctttaattttaactttttaatagtaaattatatttctagctatttttaaatttatgttattaaaatatctcttttaatatatataatcatatctttaaattatttataatttcttaattttaattttttatatatattctataactttatataatattgatgctaagagagatgatgttgcttgctatcttttcaatattatattatatatatttatttttgtcatttttttttattatttattactttttatttttatatatctctatttacctat

SEQ ID NO: 318554 - DNA, 1256 bp, Cannabis indica
tggctaagatgatttttttaatttaaaaatagattattaatattttaaaagattgtttaactttttgggtttaattattaagtttatttgttaacgggagattaaacctacccattaaatttaacagaatattcttttatttttaagtatattctgttaaaccaagaaataccgttagataggcacttttaatatataaagatattggataatatttaagtagagtcacaataaatatttgtacatacaaatattttttattattatacgtcactctattatttttactaataattaattaatatctttcatattaattttatttgtgtttttttttcaataatttcatgatatcaataaaaaaagttactaatttaatatataatacacccctaataactctaaaagaatttttttttttaaaaaaataaaataattatatttgccaaaaaaaagttaccataataaggaaaagtattatatataaatatcatttttgggagattttggtgtcagaattttaaaaaaaaaaaaaaaatacttagtgatagactttatttgtttagtgactttcattcatgaagttaaaaggtttttttttcattagatgatttacgattaaagtttagaaggaacacaattttatgataaatttttattataagagactagtttcagcaagaagatagactatctcgctgcaagctgtaatgtatatctattaatataattgtgcattgtaatttatctttacttttttattttattattaaaattttcattttagagttttttctttagttaaatttttgcgacatggctcttttttttttcttcaattgtcgatttgtaaagttattgtgacatgaatcataatttatggtacatttttgctaagcgtaaaatgtgaaagatttgtgtataattttaaaagaattgctttatgagaattgaatatgaaaaacttaaaaaatttaaaataaaggctttgcttagaattttgataactaggaataagattttgattactaggaatttatacctctacattgctctcctaaactttagtttacatagtgctttaacatatatttagtaatttatcaatttattagtattttttttttttgtttatttttgagtagattatttttgatcttgataattatctctcttttttctgatttgtttcagtaatgttaataccttcggaagaatctcacaacatgaaaatgatatttatatataaatatata

SEQ ID NO: 318555 - DNA, 617 bp, Cannabis indica
tatttttattttaatttaagttttttaaaagaaaataaataaaatagtccagtttattcttaaaccaaatacaggattactttcaacataatccaatctcgttcagtccagtccaatcatgtgtaccaaacggacccgaagtgtattgcgtaaaagaataaacaaacacaaattagtactttggcaatagttaagatagttcaagagagatattacctagagtatacgttgagcgatcgatttatactacattttattcagcccaatgtaagaagggaattacaaaaaattaagtataacctgcccaattaaataaaaaaataacttgtccaatgggttggttggtggcaccaaaccggccaacatatgttttttttttgtcaaaattaattttatgttttaattaattgtgataatgagataaatatagtttaaatctaaagctcaaatcaactactatgaggtaaatatagggatgtaaacggggcagggcggggcggggcgggtgcggggattgctctcccacctccatactcgcttcttaaattcaccccatacccgccccaatacacgtttaaattaaagcgggggcggggcggggattacccgacggggga

SEQ ID NO: 318556 - DNA, 1184 bp, Cannabis indica
gaaagagtgggagaccgagtacagtatcacaaggcagcagaatttattgattttgttgagaaatcccagcttgaaaatgtgaaaatgagtggccaattctttacatggaataataaacaacctggaggagataggatctatttgaaaattgatagagtccttgctaatccaaattgcatgggcaaatattcaaatgctgaagctctattcctaaacgaaggaatctttgatcactccccgggggtgttaacttatcattctgaaatatccaatggtaaaaaaccatttaaatctgttagaatgtggagttcacactcagaatatgaagagaaagttagagaagtatgggcagaacaagtcaatgggacaaagatgtatcaagtagtcacgaagcttaaagctctgaagggtgtgttaaaggaggtcaacaagcaaggtttttctgaactttatgttgatgaagtgaaggccaaagaagcactggctgtgtgtcaaaataagctacaaatggaaccccaaaaccagctgttgcaccaggaggaattagaggctcgacaacaatatttaaaagttcacagttacttattatccatgctacaacagaaagccaaggtctcctgggtgaagaatggggatgataacactttgatattccattcaagccttcgggattgaagaagacagaataaaatctagtctattgaacagcaagatgaaacctgaactgatcagcctgaacaggtaactgatgcatttctttcctattacaagaacttattgggaagctccatggacaacaagaaaaaagtcattcgtagtgttgttaatgtgggaccaaaagtcacaactcagcaagctaaaattctaatggagaagttttcgaaagaggaggttaaagctgccttatttgcaatccctagaattaaagctccaggtccagatggatactcttgtaacttttttcaagataattgggagttgattggaaatgatttatatgaaaccgtggagtctttttgtcatcaggaagaattttgaaagagataaactccacaatacttaccctcataccaaaagttaagtgcccgaacacagtgaaagtgtaacgccctaatgctaaggcacgctacagtggtttttcaattattgtgcaatctttgctaatcaaagaaatttctcaaaaa

SEQ ID NO: 318557 - DNA, 838 bp, Cannabis indica
aaagagagtagctttagcaatgttaattgctaattacaattttttaattaatatttgtgtttaaaattatatgttgaaatattttttatagcaatatttattatagctataatatcatttttataattctttttaagagttccgaatagtttatagtaccgaaaaatagaattattaatatttcaatttactatatatattcaaaaaattataacttatttttgagagtaccgactattcaaaattttttaaaaatttagaaaaataatgatataactataataaatactaccataaaaaaatgaaaaaaaaaaaatatttgaagtacattttttgacacaaaaattgactaaaaaatttatagtaacaatatataataataagcacctaacactagaatatttatatgtattatttgagtttaaaatgaccacttgtagcttagattcccccacaaactccctttttctatctagatgaattactaggtctatatatctattattggtagagttgaaaatttaaaggttatactatcaaaaactgattaacaaacttattgcacacacccttatcaaaatttcttaaaatatatatttagaacatctccaataaaatgttaaattagtaatgtagtgtgttataatttagcagtttttaaaaaattagctatatatgcaaaatgttgtaggtaaaggtatatatatgcattttggaggtccagcgtcaggactacgtaccaaatcatttaaaaactctttctctaccaaactaacaatctcataagacaaccacttgaggctagttcaagtggccatagggggtgcgtttgtgttgg

SEQ ID NO: 318558 - DNA, 1013 bp, Cannabis indica
aaaaatatagagtttaaattagtcaattgtatatatattaaaagaaaaaaaaaagtacaaaagtgggactggctatttaaaatttatttttaacgatataaattattaaatttttttaaaaaactggtaaattatatgctatagcaatacacttgaaaataagttttttcgctaaagttagaataaaataaaataaataaaattctattataatcacgtatgcaatcaatataataaaacatttaaactataatttatttatatatgtcaaaaataaaaaatccttaattaatatacgtcataacacgtgagcatgtatatgtcttactatttgtttggatgaaaaaaattgaatgttttctaatcaaatttattattattaaacaatgtaaattttgtatgttaaaaaaaatataaattttgactctcttatttttttctctttcttagtaaattatacttgtcaatacttttttgtagttaaataatttttttcgcatattcatgccataactatactttaatgcatacctaaattttttttttccaacataattactattcaaatatatttacttgtttttttttttttatgattgatatatgtacacatacttagtggaggaagttgtagaaaaatggattaaagacgaatctggacatgcctattttactatttccggagaagctggagttggaaaaacacatgtggctagaaagatattcaacaatgaaagaagaaacatactgatgaaacctgatgatgatcataactccttcgctgtcactctttggctatctctcaacaaaagatatgatcatcatcaacaggagcaggagcgatcccttatagaagacctcgcacgacaattgtctgttcttgaccctatcgaaggaggtttcgaaggagattataatgacagtaatggcgtcaacaacgactctatagaagatggaaagaaaaagacgaaggagtcttatgaggataaattaaaaacaaacataaagaagaa

SEQ ID NO: 318559 - DNA, 1352 bp, Cannabis indica
acgaggagttagggtaacatggtcgagaccaaaggcggtcagagaggtcaaaatcccctatatcccaatggacactgtagaggctatggaagatttcaaggtggtagacatgagaatccacccaagctcctcctgattgggaacaaagggttgtggaaatgaaagctcaaatcctctagcaagacgaagaaattcaaaggctgagatagcagagtccccctacagtgcctctacagcaagcgtcaatcgttttggttccagcggtgccagtagaacaacctgttgctggcaaccgtatggagccagtatatgagaggtttcgcaagcaggtgcctccagtcgttctaggaggcccgaatgttatgaaggtcgagcagtagctcactgtaatagaaagaattctaaatttcatgggagtcgtcgaaaatgatcgggtgacatgcactgcatttcagtttcaggaggacgctctagtgttgtgggagttggtatccctcacccgagacatcactacaatgacctgggaagagttttaggaattgttcaatgccaagtattataatgaggcggtccgcagtgctaagcagaaagagttcactgaattggttcaggatgaaggcatgttagtaacggaatatacaacaaagtttgaccgtttagccaagttaactttgggtatagtacccacaaacttcaataagaaaaagaagtatctggctgatttaaatgcaaaaataaaacatgatctggtgattaccacaagtgacacaacaacctatgttgagatggtggtgaaggctctgcgagccgagggtgccgtgaaatttcttaaggagccccgagagactccaagtgttagtgggaccaccactcttcctacttctcgatatgatagggctggtggtgattccattgttgatcagaagaagaagactttgccaacatttggtggttaaggatagaataaaaggtcctgagcgaaccaaagtagaggtggacgccaaggttattcttaccttgagtgccctcgttgtaagaaacactatctcgaagagtgcaatcaaaaaacatgcttctagtgtagcatggttgggcattttaagaaagatttccctgagataaaaaaagaagagcagaagcaagaggcaaagcccgtacctactcaggtgtttgctattactcaagttgatgctgtagccagcccctctatggtgataggtcagcttcttatcaagaactcctattttactgtattgtttgactctggggctacagattcatatgtggcatcaatattaatttatcaattgggcaggccttatgatttcattgaaagagggtttagaacccta

SEQ ID NO: 318560 - DNA, 767 bp, Cannabis indica
acaattaattctatttttaactttttgagtatttttacattaaaagtactaaatttgttatttttttttatatttttatttattttttttaacaggaattttacttgtatttttttctttagaaaacaacgttatttttatgtagtagcaacgtagaaaataaaattgttttagaaaaaagaaaataattgtaggagtttttagtaaaaaaaataattaattaaaatttgtaaaaatgttgaaaaattatggatttgtatttttgtaattttttttatctttttagtatttataaaaaaaattaaaaaaaaatctctaatttaattatagagaattagaacaatataatgataggcacttgttattcgtgttttcgaatggaggcctaatagacatcgggtccatcattaggcctaagaagattcgcctagcaattttcaccaactgtaagggtaaatttggacggcatgttcgaattagatctaggactaattctatagttcacgagtcaatattatttcgctagaaaaatctttcagtattacacaagtatttgtccactgtttatgaaccttatttctttccttagcttgtaagaaatgaattttaagccatttacatgaaggattatagttatatttatagacttagggtttttatgtaaatgtggcccactaataggataaatacaaataatataggggaaatttacacagtttactgtgttttcctattttcttttacactccaaaaataacttttgtact

SEQ ID NO: 318561 - DNA, 1074 bp, Cannabis indica
aaacaattttttttttcttaattaatattttgaactccaactccaacttgaatattgggacttggatttcggctccagtcccagtttcacactcggaccacggccccagccccagccccaaacccaaacctaacttaaataaaatcaaaaaataaaaataaaaataaaagttatagaacacccttatactttctacttttaaaattaaaaaataaaagtagttaaagaagatattttcattttttaaaaatacaagtcttactttcatttttattattaaaatattaaaaaaaaataaaaagattaccaaacacgctgtaaatttatattagacacatgaattcagtctaaaattcaaataatttttccctttgtgtcatctatctcactcaatcctttctccctactaaagtccttagaaatagtttgactatccagttatgggcttcgattgggtcttaatcgtaaaaggctaaccaggcccaaactaagcttcactatatttcttctaaggttttcatatatattataaaaaagaaagagaaaagaaaagagtattgactttcgtaaaacattgtatgtttggtagtgttgtaaaataattcaagatttattgcacataattagatttacatttgggaaattatagtaaatggcccgaaattataggagtatgttagtttatgttctcaaaaaaaatatagcaaatgaccctaaatcataagactatgttagtaaatgtcctcatttcaatttttttttttattttttttattttttttagaattagaagcaaattatttaaacattatggtatatctatattagttttgttaaaatcttttttattttaaagttatgtcaatttttttaattttttatgagttgttttaggttgttggtatatagattttgttgtacggtatatttctattttattgtatggtatattattatttttagatgatatttattttttattatgatatgtataatagtggtatataattttattagcataataaaaatattttaatgtatgtatataattttattgccatgctaaatatattt

SEQ ID NO: 318562 - DNA, 1508 bp, Cannabis indica
agagagagagagagtgtggagaaggaagtggataggtgagattctttttgtggtattattccttaaacttctaactaagattcagttagttaattagttgttcattaattaacttaattgtcaaatatgacagcaagtattttaggtcctttggtgtatataaagaggactactcctctcatttcatagagagcaaaaataagaagacacaacacaatagaaagaagttatagtgagaaattgagagagatatctaacagagagttgggattgagaaattgttgagcaacattgtcgattatgttggctcgggttagtgagttaatgagtgttgaaggattacaccatggatgacttactgtgattattttcttgtagctcttgagaatgatatctctaattctaattatcaataaagattagtggcagtactttcaaattggagtatgaccattcacattgaatttatgatcaaaaccagtataattctcgtgtgttattgtgtctggaagctatctagattcatttgtgtctatctttctggtttgatatgtgtttgctgatttcggttcttgatttatttgtcttgatttaacatttgtttgtttaagtatgatcttgaagctagaattacagaaatttattcctatgtatcggagctgaatttcctacaaatcagagcttggttcttcgatcattaagggaaattcaaagatcacttgcttttgcaccaagaactcattaattcataaatgaattctataaaaacacagattgaaggagaatgtcgatggctagatttgaactagagaaatttgatggatcaattgattttgcactatggcgagagaatttgaagggtatacttgtgcaccaaaaggtggcaaagtgtaacgcccaaatttgaaagccacttgaatttaaactataatcatattactaaagtataaatatatatatatatatgaatatagatttacaagacgagatcccgtattcaaaatcgattttgaaaacgcagcatatatttactttttttgtttttacatgtcacatagtgactacaaaagttaatcccaaaatgttttaagtttaaaaccctccaggttgtactgccgcgatatacacaatcattgccaagctttaaactcactgttcctccgccttagccttttctttatctacacatggtagcgcactggtgagtcaacatactcagtaagatatgcatataatataccatgaaatattgacttgtactttggccctcatgagccaacatacagggctcactaaatggttaagaacgttcttaacagaagtatgacctttataccacatacactaaagtattgctcccgtactagtgttggtagggttgaaccatactctcagtaccactaggtgctgtaccacatgcaccacgtactcacctcgtaccggtgttggtaactgttgggttttatgccctaaataaaactccaattcaatgtaatctgtattattca

SEQ ID NO: 318563 - DNA, 916 bp, Cannabis indica
cataaaacccaacaatatatacacacacatatatacttttacatacaatcacatatacacacatatatatacatacatatatactttttcatatatatacatatacacacatatatatacatttacttatacacatatatatatatttacacatatatatacacacatatatactttacatacagttgcatacacttatatacctttacgggcaccgattcagtcaagctcggtacggagggggaatttcttccacgcaattttatcttaatggttcattttagagtatttagtatagtaagtcatctaatggtgtgggatgttatataagttttggattttgtgcatttattgtcctatttgatgatgggtgtaggctgggtaggggtagaaaatgcaacatatttatactttcttaaaaatttaaaaatatcataaaatagtactacttatttatagaaaagaaggtgaataatactatctattcaaatttattttgcaaccatggctaataaattaaaattgatacaattttcttaaataataattgatacgaaaaattttactattaaaaataatttcttttgaactacataaaatgagcttaaatatatcttatgaaaattaataaaacattataaaatgcaagaaatttaaagatatttaaaaatatgaaaatataaaaaatgtattaataaatattaaaaaaaatttattgaacattactaatattttaggagacagtactaactataatctcttagtcatttttatactcgaaatcaaatgtcggaatatttttttcaattttttttttataacggtatccgttatagttatagtatcatccatgtaaatttttgtaaaaatctgaatagtttacaatgctgaagatagagttcctgatattctagtt

SEQ ID NO: 318564 - DNA, 1353 bp, Cannabis indica
tatatatatatatataaagagcaatgttaaaagacactagtactagtggtacctagtacttttctatatatatcgctattggtctaactaattaatatcgtaccttatatagtttaatgtaataacttttagaaaatatcgctagctaatcacaaaacaacacgtctaataataacctcctttattattatttgttcaaattaataattaaggccttgtcataattttagggtctaccccctgcagagacgggccaatggccaaatcttaacaaaatcgactgttgaaattattataaccaccaaacaatatataagaacacatcatcaaaataatatatattgaattgttgattgatgatcatggaagacctagctaggacccatgagatgataattattaacagaaattaatggttgaaaataatatatacaaaattttcaatagttttttcaaattatttatttttcaattttttctgtataaaatagtttttccattgctatatccaattctagtttggatgtcattaattatcttataaaaaaaattaggaaactaagtcgcgtttcgcgcagttttatatccaattttcataatctttttaattttatattttttgtacttatattcgatgatataatctaaaatataacattttaatatgtgtattacaaacaaagtaataatattaaaattagaaatataattttctgtttttaaaatatatagaataacaattttgcaacaaagattaaaaactgtggaactaaaaaagtaattgcattgttttttctaataaaaaaataatatttataaatttaataaattggatttgtgattgatgatatagttttttttaaaaaactatttagacttttttttctttataaaaaaaataatttaattaatattatgaaagttttcacattttatttattttattttgtagagtcagtggaatatcatctccccaacggtgaatttagcatgccacctaatttattttgtgggactattaaagcatataatgaaaatagaatgaaaagaactgtaaaaatagaataaaattaaattatataaaatgtcacctaatttattttgtgctttactttctataaatatataaataattagatatatattaattttttcttagtgttttacactcttttcttattttgacaaaataataaataaaaaattataactaattaattaagattgaattaaataataaatatattttattcagccactatatatgaaagttaaaaaaactaattttattacaataaaagtgaagataaatgaattttatttatactatatagtataacactcaaaatgatt

SEQ ID NO: 318565 - DNA, 1231 bp, Cannabis indica
tataaaaacactagcccaatgaaaaatataaaaaattacaggaaaaaaagatagctaaaaatgaagatactcaatggaaaataaaatttgaacgtgaaaagaacgatgctaaaatgaaggttgtgcgaggctctcgtcataacataatttcggaggcaaaaaccaacgttgaaaaacgatactaaggctatacaattcggtaatttcttggaaatgaagtgaacattattcaagaatagtttcatgaaaacattttagatgcaaaagatgcaaagaataaaaccatataaaaataagcttaatgatagtgcatgactatttttagacaaaaaatgttgataagtgatgtttaatgattgtctatcaacgttgctatggaaaattgttttgtgaggaaaagcaatgcaagacaatagtttcacgatggtttgcgattaaatttgataaaaaaaaatggcgaggtatactttttcacatgaatgtttctttaagatgatttacttattttttcttgctatggtttagatatacacatttagaatttgtataaccttaaacttgagtgaagaaactttttgtaagattgatgtcgtctaatttgttacactgcggttgtgttagtaaatatctacaagaaataaaataacacttgaaaggacacttagtgagttctagaaaaataaaacaagaagcttgaatgtgatgaaaatattaagaaaataattttgaaaaattaaagatgtaattaaaatgaaaagtaattagaaaatagatatgaaagacacaagtttcgtacatgtaattatattttcctaataaaattaattctctaaacacaactataattctacaccattaattatagttgaaaaatgtgtatgataaagctcacttgaaaaatatcttctttaactaacttaacactactcctaaaaatgttatcatattatataatttaaatcgacaaaatactaccagtaaactgcagtacaaatcatataatataataaacaccctataattaatagtaattgtgttgtgatggtagtggtgactagggttgtacataaacttttgtaaaccacccaaatcaaaccgagataacccgacgaaaaatgcaaaccgaaaaacccgacgaaaatataacccgcccaatctttatatttttcaacctgcacaatcaacccgaactaacccgaccaacccgattaagagtagttttttttttttt

SEQ ID NO: 318566 - DNA, 752 bp, Cannabis indica
tgagtattttaatcttgtctctataacattattttgagcattttaatcttgtatgtgtgacataaatttgattgtacctatatatgacatgttagttcttctttgttattcaatggttcaccatcaaattgctgttagtagttgagaataacaagttttttacaattgaaggggttgttagcagtgcaattatatatgtacctcacacaatagttgagtgcttaaactatgaggttgaacctactgcaatagtttctacttttatcttctgagcggtggataaaatagaatataagtgttcttctaattaattgcgatgttgcaattattttcatctaattttattttaataatttagtcaaataatctaagaattaggcgactgattatttgttttatttttttaattctaattctaatcgtgtccggggagatatcccaaatagattacaattattttagctaatcactattaataaaattcatgatttattcaattaaaaaaatcaattatttattaaattaaatataactatataaatacatgatgaaccaaaactgtttttcaaaaaataaaataaaaaactatatatatatcattatatcttattgagaggtatacatattataacatttaattaaggtggttattaggcatgcatgcatgcatgtccgacagaaagggacgttggtatgggtccctctccctcgtccatgactagctagggtttagtcccatcgaagtgggccgc

SEQ ID NO: 318567 - DNA, 672 bp, Cannabis indica
ttttaattggatatctagttacacacctaaatttcaatattaactctgctagatgttcgtgtgatctagaaatggtggttcgtagttcagatgggggacatagtcgcgtcggcagcttggaaggtcgacggttttcttccgccggagtgggctgaaacctttgctattcaatatgtggcatctcaatgtctcacttttggcatccacactgttcagttcgaatctgattgcaaaagcttggttcataaacttaataattctttagtgttagatacatctttgggtttaattctagatgacattagagctttatgtaaatatttaatattgtgtgttttagtcattgccctagaattgttaatgttagtagctgattgtcttgttaaatttgtttcaacagctattgctagcatagtctaatggtctggatatcctatttgtattaaaaaatttgtcttgactgaagctatttattaatgattctctctagctccccgttgagtttcatgttcattgatagtgttctttgaaactattttattaaaaaaaaaattaaaatatttccttctaagcttaagacatttaagttttaaattaatcccatcaaaagcaacacaaattactttttttttttacaataaaaaaaggccaaactagtcataaattcacagt

SEQ ID NO: 318568 - DNA, 579 bp, Cannabis indica
aaatgattgacaaagtgattcacaacttcctaaaagtcgtcaacgatagagtcatcctttaagtaggttgtaattctgttttcaaatttccttttcctcatggccgcatgaaaatagctagagttctcatcattaaactttatccatcttagcttactttgctgtctaataaactgagtatagctattctgggcaataagatactcctgctacttaagatcagcaacatattgcaagcttatatcagttggcttagtagcagcttctccttgtaattctacaatactcttccttaacctgcttgtactccttagaaatatcaccgatttcatgtttgctcaacttttttagagtgtgtttgaccctgaacaacttcttcactaacctgtccaggctgctacctactgctggtttattccagcaagcagaaataatctttttaaagttaggatatgaagcccaatgattacagtatctaaaaggcttgtatccaactttgttcgcctcatgattccgaattaaacacaagctatgtaaagcccgcttagttaatttgaaaattagcagttaattatgatt

SEQ ID NO: 318569 - DNA, 1497 bp, Cannabis indica
tgatagtcaatttatttaattcccattagtcaatgcacatgtgcaaggatctgtctttcttcttaacaaataacacaggagctccgtagggtgacacactaggttgtgaaaaccctaggtcaagcatcccctgaagctgaatcttcaattctttaagctctactggggccgttctataaagtgctttagaaactggttctgctctaggtgctaaataaataacgatatctatttctcgttacggtggtaaacttggaagttcatcgggaaatacatcaaaaaattcttgaaccactctgatgtcctctggtcgaatcaattaaggttgtgtggtatccaataccactgcgaaaaaccctagacatccatcttgttacaaatctctagctttcaataccgagatcactgaaattcaggatccctaaactgatcccacaaatacaaatggtttctcgccctcgggttggaagatcaccatcttccacttacagtcaatactagcagagtacttagacaagaaatccattccgagtaagatatcgaaatttgctaaacttaattctactaaatcagcactcaactctctatcctcaattctgatcggcataggcctaatcttccttttggagataactaattctctgctatgcattagagttccaaagccattatcataactatcaaatagtttacccaatttatcaaaaattttggccgccacatatgaatgagtggccccagagtcaaacaatacagagaaataagagttgttgaccaagagctgacatgtaacaactgaggggctagcttctacatcagcctgagttagaacaaacacccttaatggagcaggctttactactgtcttctgctcttctttcttaagttgcacacaatctctcttgtagtgtccaggcaaaccacactgaaacatcctcgccctttacactaacctagatgatgcttcttatagttgggacattctgggtaagtatatcaggtttcggaaccacctaacggttgcctcgacccttgttcctcatactctcttgttctgatttgacccaccaggtgcggatggtgcctttctgttttgatcagcagtcgagtcactaccacccctaccataaccaaaggtaggaggagtagtggccccaccaacaacccgagtccctccggactcctgaatgcactcaactgcaccctcaactcaaagtgcttttcgcaccatatcatcataggaggtgttatcatcgatggtgatcataaggttgtgtttaaccttagggttcaacccatccagatattttctttcttactaaagtcagttggcacaattctcgaggccaacctggccaacctatcaaactgggatgtatacttagtgacggtcatattatctttctgagtcaactaagtaaattcttttctctttgcgctacaaactacttcattatattactttgcattgaataattcctggaactcttcccaggt

SEQ ID NO: 318570 - DNA, 760 bp, Cannabis indica
aaacctcggtcaacaacattaaaagttttttgtcagttctcctaaccaacgtgtatactgtagatggaaaaatatctgtatttgcattagttatcaatcgtcgtttcaaattattttcgtcggttctcaacactcgcaaaaaattataaaaaataatttttacacttatcccgtcagtttataacagacacactaaacaattacacacaaaaaacctcacatcccaacccatatgaacccagatctaagcacaatcaaaaataaaaataaacacaaatctcatatttttgtaaacaatgataataataataaaaaaaataaaaattaatcctcaccaacattaattattacgaaaatttgaaggcacaacaaaaaaaatatcgagagaaactatgaagacgaaagaggattagattattaacaacgtagagatacaatccaacacgatttcataaactaaaattacatataaaaaattgtgtaaaagaagaagagagagaagtacaatttcttggcttgttcaagggagcgagcgtggccaaaatgaaagagatcgtagatcccatcggcgtagactcaaacaggacggtcttggggaggaggcattagatcgggttttggcttggagtgagcgttgatgggggcgttagaagtatcgttgagcatgacctccgccattggagctctcaatcaaaaccaccgccatctctctctctctctctctctctctctctctctctcctcctctctctctctctct

SEQ ID NO: 318571 - DNA, 712 bp, Cannabis indica
tgtactctcgaataagaaacctgtaactttcagtatattctatttttgcttttattttttttcctttttgtatttaaacatttagttagctcttaatttagggcgtggtgtgatttgcaaatctaaagagttcggtattagaggttcttttccaccgatgaaggatttgcacatatttgtcaaatggcttaaagttgttcaacttcagaggaagaagagaatccttaagcagcagttgaaggttccaccttagttcaactaattcaccaagactttggataaaaacttttgtataaaattatagtcgacgacaattttaaaccatagtctctaatatagccgacaattttacaccatgcatggcttatagtttatactataggtgacagttttagtccgtcggcaaaaaattttactgatgattttttttcgtcgcctatactactagttttgcacggttgaatagacgactattttagataccaatgacaatacattaattaactatttcaatgtaggaaaaacctaattttttaattgtggtgatgtcaatttatgtgttaaagaagcttcatactaaaaagtggtgattgtagtgatcttctcgttgtaaattttttagtatactctgtttgttctttgaatgactagagagaacactacaagaaatgtcacttttgccatcacatttttgtactggcaaaagttggta

SEQ ID NO: 318572 - DNA, 701 bp, Cannabis indica
tgttgttagttgttggttgcatgattgattgaattgaagtgtttgttgatgataaatttttatttgagcttgtaatgttatgacagatttatctagagttggttagtaagtttttggagttgtgatttagatttgaattctattttaaactttaattttctggatattcttgtgggttgcatagaagtttagatgttcaagcatttgtaaaggggattatgttagttttggtgtaaacttatgttgcttgctttaattcttgtggagcttgtaatagttgcatatactgctgtaggttaaagcttgaattagtgtttttaattccctattgatgatggctataatctttgagtaatgaatttgagtttgagcacttttttgttgagtttgatgtgtttttgggcttgaattcgagttgttgaatggtaatttctaggtttgaaacccaagcaccgtgacatactctgtgagcgccgcgacccatatgctttaagacctgggttttcaacccaggcgtcgcatcatgcctggggagtgtcgcggccgacctagggatttcttgggcagtttgcatattgaacttgtttagctcataacttttcgattcggactccatttggagtgttccgaatatcgttgaaaagctcattccgagctctatatgtttatttgtattttaatgccaattgtatgattatgtg

SEQ ID NO: 318573 - DNA, 2359 bp, Cannabis indica
tgagaaaagagaaagtcacaaagcttcaaaagtaaaatcaagatacaaatcacaatctgataaccagaagaatgttagatgctagatttgcaagaaaatagggcatctaagaagggcgtgtctggagaggcataagatgagtgattcaagatctgaaggagatgcagtagtgagtagtgacggttatgactcaactagtgctttgttggtaaccttcgagaatttagattctaaatggatcttggattctgggtgttcgttccatatgacaccgaataaatcttgcttcaaagaatttatatctggaaattatgggactatgtatcttgttgataacaagtcttgtaagatgatgggaattggaaccttaaggttgaaacttcatgatggtgttgaaagggtgctgaagaatgtctagtacctgatcttaaaagaaatttgatctctgttgatatgttagatgatcaaggatttcttattaaaattgagaaaggaatcatgaaagtttgtagaggttccaatgtggtgatgagaggaagaaaataaaatgggatttatcctatggaaggtaccacagtgaaaacacgaaggtgtgtgtttcaagcaagcacataaatgaaactgaagtatggcataagagacttggccatgttagtgaaagaaggttccatgaactgaataagcagggattacttggaaaagtaaagcttgagcaattagacttctgtgaatattgtgtacttggtaaagcttatagagtcaattttggaactggcaaaagggataccaagggaacactggcttatgtttacaatgatttatggggagcctcaaggacaccatcacactccgggagcacatattttgtttcaatagttgatgattactcaagaaagttataggtgtttattttgaagaataagacggaagttcttgagagatttaagcactggaagataatgattgagaatcaaactagaaggaaagtaaaatgactaagaaacaataatggtccagagtactgcttggatgagtttgatgtgttctgtaagcaagaaggaatatcaaggaacaagaccgtgaggaagactcctcagcaaaatggactcgcagagaggtccaacagaaccatcttagaaagagtgaggtgcatgctattaagtgctggattgcccaaagtgttttgggcgaaaggtgtgtccacttcagcttacttaataaacaaatgtccatcaacaacactggatttcaagacgccaaatgaggtgtggttagggaagccaatgagttatgaacacttgaaggtattcagatgtgtctgttatgcacagttaggcaagacaaacttatggtaagttccttaaagtctattttcttagggcatcttgaaggagtcaaaggatacaggatgtggtgtttggagcccggaatgagaaatatataattagtaaggatgtgacatttaatgaatctgtaatgaaatttattgacaaacctgctggaagttaagccaatactaaccgagaagaaattgaagctccaagaactgagcttgaggtggagcctccgagaagggtagagactgaaatacctatagatcataaaagagatgactcaaaagatgatttcggaagtgataagctaaagagttataaactggatagagacagaacatggagagaagtaaaggttctaaaaagatatggacatgctaatttaatcgcatttgcatttcatgttgctattcaaactgtacatgaagagcctaccagctatgcacaagcaatgaaaaccgaaaatcggaagaaatggaatagagctatgttaaaagagatgatgcactccctaaagaagaactggacttggaatgtaataccgatgccagaagacggtaaagtcatcagatgaaaataggtgtacacatggaaagaagccattccaagtatgaaagaattctaatgaaacaacctgaaggatttgaagaggctggaaaggaacactggtgtgcttgttgcggaagtctctatatggtttgaaacaatctctaagatagtggaacaagagtgtaataccctggaattaaggaaatggattagcaaagccctaactagttaattgagtattattgtagaattatattatattataatttattatatgcgaattaatatgagaaatgacatgttaagaccccgttggtgagccaggggcattttagtaattttgacccgagaagggtaaaactgtgaatttaatttatttatgtgcttatgaactatattattatatagtatatatggtgtgtcctttttcaggtgtgttctgacaagttggtgcggtatagtcacaatcgggtatt

SEQ ID NO: 318574 - DNA, 1175 bp, Cannabis indica
aattatataaaataaaataaaaagaaattcgtaagtgaagtcactacgaaaaagtttctagcagcgaaaattcttactggaattgcagttagaatattgtctagcagcaacatttttcacacactagatctttccagttgcgccttaatttgttttttgcgaattaatttgagataaaactctatacacactcatcttcattttaaattttataacaaattaataaatgtgaatttgatgactaattaatataattaaaaccaagaagcttaattataatatagctaggtggaattgaagacattattattatcaagatcagtgcaagtactatagtactatatatgtgtaattatttcattaagtggttggaagttcattatcaaatattgtcccagtacgacgtaagttactatttcattattaagaggtacttggtggttagatccatatatattatatacatatatacgagagaatttaatatttattattgtttttactatgtatatatgatttaccagtttcatcatgcatgctaatacaaaactatatatttttttaaaattagatatactaattaattactatctagctagtttaatatatttttatgattataacaaattaatttattatttaattttgcatatatatatatataataatatgaatgtgtgttttattttaagaaaaatcattatttatttttaatgtaatactcaatagtttggtgagtggttttacatattatttattaattaaataaaaacgtaaaacttatattaaaatacatcaataataattacctcttgacaacatttccttcacaattttcatgtgatcaactgtgtatgcaatgaccaaaatcacataggatactagttgtagttaaatttataaatcttatatatttaaattaatttttaagaaattattctatatattattttttaatttttttttttttaattacgtttggattgttctgtatagttgcttcgataatttttgtatgagtccttatataaatttaatgggaaacttacgaaaaatatattagattttgggttaacttttacaaaaatactgtcacacggaaatcttttcaaaaatactgtgtttttataaaacactagtaaaacacaaaacgaaacaactcaaaacaacactag

SEQ ID NO: 318575 - DNA, 514 bp, Cannabis indica
ctaactcagctgctaccagttggagtttgttgtattttcttactgtataaatactcctttgattattaataaagattcaattctctgcatcaaaactttctcctctatttttgttttctttctttcttctctgtttttctttttctgccattgataatcaccatggttagaactcgagctattagatctagaaattttggccaaactcctctgtcagatacttcttccacacttccagatgttccatcaatgatccatcgatcattcctctactttctgtaggattttttcttgtcttccaagaataccccctacaccaactcaatgtcaatcaaaacgacatggacaaaactgtccaagaaaaattaaacacaaaattaaactaaacgaccaagaaaccaagtcgtttcctcctgttctgccttgaacaaaatcatgccaaatgagctaaccctagctcagaattgccaaagaaccttcgagagtttgaaccaaactctctctctctctctct

SEQ ID NO: 318576 - DNA, 5303 bp, Cannabis indica
aaaataaagaaaaaaaaaaaacttgtgtcctgctcaattggattgacagatcaatcataaggaacaaaatacatttgagaaaatttgaagaacaggtgacttatctcaataatttaatttattatttttgtcatttgatttctataaatagagagcaagggaattattttggggaccttggattcattatgggatttttacaaaaatatatatatttttgttgttctcacgttgtttctgtcatactttattttttacatttttataaaattaaatttcaaaaatattatcttaaagtttcaaaattataaaaatattgtatttctgtaaaacaaaaaacaactaaagcaacaaaaaaaaactacctataaaacacatagacaacaacaagagaacaattataaaacaataaaaaagacaactttaaaacaataagacatcaacattattgtaatatgcaaatcaatattgtggaaaaattacaactaaaatgcagaatcaaatcaactaaaactaaatcaacaaataattagtaatgactaatgacaagattaacaattcacacactataatcggagattaaaacagtgatgaacagagtattaaaaccaaaaatgattaaggtaataaaacaataaaaataacaccaagatatatattggttcaaggctcatagattgatatgatctatggctctactctagttttagaataccaccaaatcttctttattgattaagcaagaacgaagtacaatacagtcgagatcgattctctgttggattctctcaaagtgtttatctctcacactcttgccctataattttcttcatctatagaagattcttcatacaaatccaaacccaatctctttcttttctttgtacctctctctctctacctctcaatctttctctctcaagaccacctctcgaaactcatctgataatcactctactaaaagataagagttatcagtatttatagataagggatatggatcctaaagtcagtagctgcaaatgcttagttgttaagttagttaagacataacaaacttaacaaactcctcgtaacagaatctccacttcagcttaagttatagtgctcctggatgaagtgaatgcttctaggactatgaactgaagcacacgttgaagattcttcccagatagaaaaagcgacagctaaagtcgactatctgggactcccttccagaagggaatagctagccatctgaaactcattagaaagatttgctttcttgaagactctttccggatggacacaaaggccttccgagaaagctcttctgggagacaactaactttccggaaagacaaaaaaacttatggagacctttttatttagaggaactataccacaaatttcacctaatttcttcaaattaaaaatacgatgatgatgaagaaagaatgtagccatcatggttggtgttccaaatatctgagtatactaacttttgagattgatcaagtccaggcaatgcttgaacttgtttactgtaagaccttagtcccaccatctgcaagattatcttctgttctgaccttctctaattcaactagtccctcctctttcttctccctaatagagagtcttatatctatatgtttgctctttcatgataaatcagattcttgcaaagatgtatggatggctggctatccaagtacatagtcaccccaccttttatttgtttcaatttaaacataatgccccaaaaccataacgcttccttgaatgcttctatagtagccataaattcagcttccgtggtagaaagtgcaaccacagactctaattgggccttccagcatatacagttccgatttgtcatgaaaatgtaagaagttgttgattttctcgtatctctatttgaagcataatcagtatccaaaaaccctttcaccttcagttctccttgtgctttctcataggtcaaaccataatcccaagtgtcatttaagtaccttaataaccatttgagggccttccaatgttcaatacccggattggacatgaacccgcttaagaggcttagagcatgagttatgtctagtatggtgctcaccatcacatacattaaacatcccaaaaccactgcatagggtacatccttcattcctctttctcttttgcactattcagacactgttcttttgacaaaataaattgtctgcctaacagaacggatgtactctttcatcttccatgttaaacttctgaataactttcttgatgtactcagactgctttaagttgattgtctcttccttcatgttccttgaaacttcaataccaagtatcttttgaactggtccaaactccttcttctcaaattctctcttaagcttgactttgatacttttgatcacaaatttttctttgctcatgatgaacatatcgtccacatagagcaataaaaatacgattgtagattgcttgagattctcgaaatacaaacagtgatcatatgtggatcgtttgaacctaatttactgcatataagtatccaatttttattccattgtcttagggactgttttaaaccatataaggacatgttaagcttgcaaactaacacagctcatttcccttccacctgaaacccaagtggttacttcatgtagatctcttcatccaagaatctatttagaaaaccagtctcaacatcatgttgttcaacttcaaactccatttgagttgtcaaatacaacatcaatcttgtcatcttgtactttaccacaggtcaaaaaaatttagtgcagtatattccttctacctaggtaaaacccttacccactaacctagctttgaaatgaactggttcattctcattgattccctctttcacatttaaaatccaattgcattcacgatctttttgttcttcggcttcggtacaactacctaagtcttgttcttctggagtgaatccatctctttatccatggcctggagtcattttgacttgtttccacctgatattgcctcttcatagctttcaggctcttcaatttcagttttttatactaccgcctgtgcaaatgcaattaggtctgccttaggaaaccttttcagagggtgaatctcccttctagttctatcacatgccaactaataaccttccacacccacctgtccggatccctctagaacctctgtttggccttcgttatcttctgggtctccatcagcttctgcttgtgcattattttttggttccatagtagcttctagctgtgaactctctttcggatattttgttttgtaatccattccatgcgtgtagtattcttgttttctatttttaatgcatcacacaaagacacactaccttttctggatgtcaagtgaggatgttctaactcattgaaaataatatttctagcaatcaaaacatttgttctatccttcttagaaatgcatattctataccccttggtacctaaggcatatcctaggaaagtttccttaattgatctaggttctaacttatcaatagattagtgtacataagttgtacacctaaaggttctaagatgcattaggtttggggtcctgttataccttatttcataaggggtttttaatccaataactttgttcgaacttctattcataaggtaggttgcagtagccagagcttccccccaaaatggtttctctaatctagaattgaacaacagacatctaactttgttcaatagagttcggttcatccttttagcaacaccattttgctttggggtctttacaacagttctatgcctagtgatcccatactcttgacacaacatgtcaagtttagagttaacaactctaacccattgtctgtcctaaggttcttaacttttacatcaatttggttttccacttgagttttctaaattctaaattgttccatgcactcattcttatttgctagcaaataggtacaaacacacctactataatcatcaatgatagaaataaaatattgtctaccagagtgagtaggcactttgtatgacccccaaagatcagcatgcacatattcgagtatctttttagttgtatgtcttggtggagtgaacttcagcttatgttatttctctaaaacacaagcttcacataatggtagggcacaaggatttaaattttcaagtataccttatttgtgtaattctttgagaccttgttcattgatatgcccaactctatgatgccacagctgcatatctgattttatttctttcaccaaacctgcctctcctactggaatagtttctccttggagaacatacaaagcattgatcttttcacctttcatcactatcagcaaacctttgatgatcctcaagcttttgtgcatggacttgtatctgtaacactcatcttcaagtgcacccagggacatgaggtttcatcttaactccagaatgtgtcttaagtttgtcaacaccttgattccactatcatattgtttgatggcaaccttttcagtttatgaccctacatgaatgatcattttccattagaactttacctcagtcaattaatttataattaaaaaatgattctccattcagacacatgtgatacttgcatctggagttaagaatccactccatgttcattgaagattttaagatggagaacaattctccatccattgagcagttgtcactatctttcacgactgcaactgaatcctaacacttttgattttctttcactttggaattcgatctttattgagagtgatggtgtttactcatcgaacttactttcttgggtgatctccctctttccaattacacttctcctttcttggattcattttccaatggcaattcaaaatcctttgacttaagtgtggcaagaacatcttccaatgcaatcacatctctgccatacttgatgatatccttaacttcttggcatgcgattgggagaaatctcaacaaagtggtgacattgctttcttcatcaacttcatgatttatgttgacgtttttttctgatctaagaaaatcgtaaaaaataaaaggattgcgatgaattaatttggctaaataaaactacagtaaataaaatagacaccagagatttatagtagttcagccccatgtcaagccactaaggctagcttagtggtgagggggggaagggaaaaagggagaggtcatgggttccaacctaggacttgaagctattaagctattaactgattgtaaaataccattacgctacactaaaaaaaaaagttcaccccatgtcacgatggtaatgaggct

SEQ ID NO: 318577 - DNA, 1194 bp, Cannabis indica
aaacttatatgtgaaggaaatagtacgttgcatggggctctgaagtccatcgtatcggatagagaatcctcagatagatggtcagtccgagaggacgattcaaatattagaagatatgctgcgagcctgtgtaatggattttgaaggctcctagagtaagtatttaccactgatagagtgttcatgcaataataactatcaaagtactatagggatgactccctgtgagatgttgtatggtaggaagtggagatctctaattcactaggatgaaattggagaaagaaaatacttaggtttagaatcagtacaacggaccaatgaggcaatagagaagatcaaggccaaaatgcttgtctctcaaagtaggcaaaagagctatggagatccgaaatggagaaatgttgagtttcaggtgggacatcatgttttcctaagagtgtctctaatgaaggggattaaacgtttcagaaagaaaggaatgttatgccctaggtttaccaggccttttgagattctgaaaaaggttagattggtagcttaccgcctagctttgcctctagcactataagtagttcataacatattttatgtttctatgttacagaaatacattttggatcccactcatgtgctgagtaaaaacttagaactctagccagacttattttatgaagagcaaccggtgtaaatccttgataaaaaggataaggtccttcagaataagaccatagctttggtcaaggtactctggaggaacggtaaggtggaagaagccacaatggagttggagtccaatatgagggctcaatatccaaaattgttcaagttagattttgaggataaaatccttttaaaggggggataattataataactacttattttatctctgagaattagtagataattagggtctaattttaaaagtagaattttaattactatttttatgattatatagatatatttgaattctagatgtgctaattatgttgtatgtaaaattttatattatttttcatattttatgtccggtaacagtgtaatgcgacgtatcgcctataaagtcactatgttgtggttagtattctagaaatagtagggcatcttagataaacatttagtatgtcgagattgtttagggtgatgaatttggaccataatacccctaggtttcaaggttacttctta

SEQ ID NO: 318578 - DNA, 2734 bp, Cannabis indica
ttacattgatatttttatattttaattttttttttctggtataactctatttagttataacctctcaattagaatataatttgcttggtcccaagtctattcttgaatagaggttctactgaatatatataaagaaaattaattaataatagtagatatattataccatcacagaggcagggatgcgactgagaactacacaaacgtcaaaagaagagtgtttcagaggcagggatgcgactccgccggtgaagagaaccagccgccgtcaccggtcttggagaagaagaagctttggtttgaatcgtctaatgcgtggtaatggtttaagggtaaggtgcctgtgggtgacaactcgagtcgactggtggtgtgggtgagtcggatgagtcgagtcagtcgagtgtgatgtgggtgggacggtgaagtgaatactaatagttaatagtgaatacgaataggtagcaggctgagtttgaaattgaaaatagaagaatacgaatatcaatagtaattactaattagtgaatacgaataggcagcagtaattagtaattaattatttaaagtattaattttttaataattaaaatgatatatttcgggttatgggttataacccgatcagaaaaaaaatcaattacgctgacccgaacccaaaacccgtttacagtccttttcgggttgaacccgacccgactataccggtttttaggtggtgggtttttttggcagcgggtcggggcgggggtttggattttttgggtttgcgggtctaaatgggcagccctattcatgagtgagcatggtgatgtatattatgtgatttactattttatatgatagtaatatatatgatatatgtgagttatatatttgtagcatatatataatcatgtgtttatatcaaattaataatgatatctaatatgatatttgaatttatatcatgttattatacatatatatgtgagatatataatatatagtatgcatacaaaaatggagggatataatatatagcatgtatacaaaagtggagggaggattcaattttaaggggccaattattaaaaatttatattttaaataaaacatttttacatatatttcaagttacaaaaattatttataattaaatttgtcgtaaattttttaaatatattttttcacagcaattagttagtcaaaactcaacctctacaaatattagtaaaaggcatcatctattattgttattcgttttatgaataagaggtatattattactcaaaaacatctattattattattttgaaaagaaaaatacatattttattacaaagtgtatgaaccattaattcaaaaagattttatagttattgtagagaaaatagaaattacagaacaactattataattttcataaaaaagaagaagaaaatattatgtactgatccattttgatttagtgaatttcaatatttaattacatatctcattaaatgttgacaactattccgtatttataattatatttcaaccaattttttttttttttttttgtaaaaggggtaaaaatttattcatcttgaaaagctatcatcccttacaatagaaagcaaatctgatggagcaaaaaactcatcaaacatacaatttgacataaaacaagactgtcttgcaatgcaatgagcagccctattagcatatcgtttaacaaaagaaataaagacattttgtaattcagaaagaagcaaacgacaatcttgaacaagtaacccaaactgagatggcatttgaactgagccattaatagcctgaacagctactaaagaatcggtttcaatttccacttcagttaggtgcttcgtcttgatccaactcaaagcctctttcatacccataacttcaacaatctcaggggaaaccacaccagttttactgcttgagaccgcttcgccaagcttaccatccttgtctctaactatgaagccaaatccaaatcgattctcagcttcaaagagggccccgtcgacattgatcttgaacttagtaaaaactggtttcgtccaatgctctcttccattactaaaattaacatttagtaatggaatggaaccatttgattgagcattttgccaattgtcaagattagtcttagccgaccgaatcacctctgaaactttggtcgatttattactccataatagattattgcgagccatccaaatacgccacataattatagcagcctcctctgctacagacttacgattgtgcatcagaatgtcacaaaaccagctgctaaactccctttcatcgacaccagcagcattagcagatgaaagattccagcatgagtgcgcaaaattgcaactgatgtcaaccaatatgttttttaattacatgtcaaaagttaaagctaattgtgtatataatcctaacacttgatgttcatatatataaagagtatttatcagtaaatataaaggcaatattaatttactttttttctttagataactacacatatcatacaactattttgtgataaattgagggggagccagggccacctgaatgcataatgtatctctgcatatatatatgagtaatatatattatatacatgtagaacatgtgatataataaatattagtgtgattaaatttgtagaaataattatttttatatatttatatgagacatactgaaaaaccgtgtttttgcaaatgtcagttgtatataagaa

SEQ ID NO: 318579 - DNA, 937 bp, Cannabis indica
aaaagcataggcaaggcagccaaatgctttgagataggaagagacgggggtttattttgtcagatttcaaaaggtgattttcgtgctagattaagagtcgggtcatgtttgtacaacacaaattctttagtagcatatagtaatgtgaaactaaaagagtaacattgttgcaacatttagtacatgttgattctttctgttaaactattgaattttgtcatgggcgattcaacatattaatggaaaatattgaacagctagagaagtaaataatacaaggcattgtaatttcatagcactatcttatctaacccctttcatttggataacaaactcagttttagtgtagttgaaaaaatttggaatcacttcttgtgcctcaaatttatgttttataaggaaaatctaaatgttctttgagcaatcatttactgtaataatgaaatatctatggcctactactgtcattgtttgaaaaggaccctaaatgtccacatgaattaaataaaaacaagaactaagaatatgatgatttgaaatgaagggtaatctttttttcttggcaaggtaaagaatagaacaatgaaattcaatagaaatacgagtgtcaaaattaaaatattaattcaaagaatgttgttaaatacatgcgccaaacctattaacgcaacgggtggaatgcgaatcttctcgtgctaaaatatcaacaaaccaagagtgtcctattacgttatgtttctccaaggcctggatcttctcctcctcttggatattcaaagcatatacatccctaacaaaggataattctacttgggggttggtccatctccccccacaagtttattacccctcaatgtgctggtaaagcttatgcattgcaaagttttgaataggtgaagtaaccactcttttgatatgttgtgttggaaattatttt

SEQ ID NO: 318580 - DNA, 1270 bp, Cannabis indica
gatgttgcaataagtattgctaaagttccaggagattgtggcagggccaagcgtttggaatttcagacactttatcaaagaaagagtgatgaagggctaatttaattacttcatagttctacaagtctttgatcatcaatattctcacaaagccttaccattttactaattttaattcattgattatcaagttgggcatgttcaacgtatgtgctccaaattgaggggagtacataaattcaatgtggcagtcagtgattgagtgtgccagctgggattgctcattataagtgaagaaaattatttccctccacttgtattctagagtaattaggaatttggtacctcttttgttaagaataatggtaaatctttttccattccctctactacaaattttctttgattcaaccgatttgatctcatgcaatgaattcgaaaagaactaactattttcctccatttacaccatatagcaagcttgatcattctttacttatactagataacatattatatattgaaataggcaacatgggaaacttacttgaaaggtcgattttcagcagcaagaagttcagcatattttccccttgataagatctccttgttaaagccaattttctcataaaggtttccaaggttaaatttccctacaagaaaagagaaaacaaagttaaagagtccagcaatcaatgttaatatagatactcttttctcatcacatcagtaagacaactagtataaaaaaataatttttcaaacaaacaaataatcattttttagtcaatagaataaacaaggaaaaaaagtgatcagatattccatactttttccaggataatagcaatcatactcttttgtctactaattagagttggaacaaaaatggcattcacctgtcacaactccaattgaaccagttaaggttaaattttctgcaacaatggtatttgctgccattgccatgtaatagcctccacttgcagccaaatcagacatggatgcaactacaggttttgattcagccaatagtctgatctctctccacattctgcacattataaacagtaagcacaaaagccaaaaggaaagccagttacaaaaaagaagcatagttttttcttttctcagcagaagtaacaaagcaatcttcatgctatcaacaaaatgtaaaatacatgtgaattttttttatatatttatttatttattacagaattacgtacctaaaccaagaagctgtttattccaaaaaaaaaaaaaaaca

SEQ ID NO: 318581 - DNA, 2208 bp, Cannabis indica
atgagcttgatgatacatctattgtgagtaggatatcatcgaaagaaaatccatcgcgggacaaaaaagaggatccattggtaaatctcataattattagtaatgtcaatgcttttaggcttgttattctgggtaatttttcctccatttgaatgaggttacattgtctacacttatgatttcgcattggcagagtcaagctagcctcagcttgatggcttttgaaatttgaacaagaagaggctgttcaaaatcgcgtacacgagtaagtggatcgagtgccttttcttatttgttgttgatcaaatgcttgttgatgcgatcagtttttgtcatttaatcttaagtgattgttttggtgagcttgctagatactacattttccaatatttctttaatattatttatgctgtatggcttaatgctctactcttgtgtccattgggaatttagaatctgcaattagcttattgctttcaactaatcctgagagcaaatacttttatgtgaacgctctttcttctgctgtgtcatgctctcttcttgaacttgcagtaaaggtatcaagaagcttgttctcaggtcagctctgttatgtttttatatatactagatggattttaatttaggttctaatgtaattttagatcaactctgtaatttattataaattatattattaatacttgtttcattttgttacatatgttttttcttttttttgcttaattttttgtctttacgtgtaacccaataaatattttattgtaaatatatttgtcatccaaaaaaactcaaggaatatatagtaaccaacttttgatattgaaggaagctctattataaattatattattaaaaaaattattttaatctaagatatttttactatcataatgtaaatttatttttaaattctgatatttatactttaagttcggatttctattttttttttcactgacctcttacacattattttactagcctttcatttcattttctatgcaatttttaatacgatttgtgaccactgtctctgcattttcaacgtcaattgctattgttctacttgattcgaaatcaggtattttttatccactcatattgatataaattctcttattttttttttcattgacctttcacacattatgttatcagccttttcgttttattttatatataattttcaatacgatttgtagccactgtctctgcattttcaccgttaaatgatattattctacttgattcgaaatcaagtattttttatccccctcatattgatctaaatattagaatgtacttactgcgtgtttgcaccttctatcattaattaaatcatgggtcaaaattaaatctaaaattacaagaaatatagcataggaaaaagtagggcacagaatagtcacttaaatatctataattagtactttacctttatccaataataagccacttagattatggttagtcttttcttttaaaatttttttttaatagtttcaacaaaaatttaaaagcataagcaatattgcttaagcaatataaataggaaaaatctaaaaaaaattaaaatcttaaataaaattaataatacatgtttacaaataatcatgtttttatggttctatttctaatgctagaatgatacctcataacattaatgataatgattagcattgatcaggttattataaggtctcatcctaggtatataatttattttttgtggtttaaaataaataaaattaaaatcaggataaaaataatacttgtaatgtatatgtaagtcctatttgaaattcaaaacataagtaaaagaactttcattaattctttttactaatgtgacaattcttttttccaaaagatgcttttcactgtgtgtttgtacctcctatcattaattaaattatgggtcaaaattaaattaaaattacaagaaatataacataggaaaaagtaaggcacagaaacaaatagccacttaaatatctatagttagtctttaccttcatccaataatgagccacttagattatggttagtcttttatttttaaaagttttttaataggcttaagttcaacaaaaattcagatgcataagcaataaaaatagggcaaaatctaaaaaaaaaaaataaaaatcttaaaataaaattaataatacgtgtaatacaaataatctatgttttttatgg

SEQ ID NO: 318582 - DNA, 2183 bp, Cannabis indica
tgttaattatgttcaaaagtttcgagaaaagctcttgactgtgtcgtaaccatagctgaaaaatatctagtcaaaatgtgtatcaaaggtatgcttgatgaatatcgcttacatatcgaaaaccatgctatatacaatttttcagagctcatcgcgaaatcaaggaatactgaagctactgtctgtcggctgaccaagccatctaaccaaaatgatcaaaattggccatgaaaaggttcaaaacgtggtgttgacatagtgattgcgcaagaaaaaaaaaattgaagttcataaaaaaggtggacaaaatgataaaccggcagagttcccttataacaaagaaagaatttgtaacctattggaggcatggatcagggatggagaggtaatactaccatttgtcactaaactacctactttagaggaaaagcaacatgaactctattgtcacttccaccataagattaaccacccaatcacgggatgctacactcttaggaagatttttcatgagcgattagcaaaaggggaaattatcttggattgaaatggagtgccgttatctaacaaaatcattttcgggataccaaagcgaaaaataatgtgttctagaataaaagtggccacaacttctgtagaggctttttttcaaaggaattgcttctaaccattttgcgaaacattctgttgtagccaaaattcaaattcttccttgaaaaggtgagtttgtagcaccttgcttttttttttaatagctgcaaagaaatgttatgaacttactctatcttagtaatatgttacttatatatatataatataatataatataactgtttacgagaataggtatactgctttatgtcaggctagatggaagaagctactactcgtgataagactatattcagagcctatatatcatcataataattcatgacatatttccttatatttctttaacaccttcctattttttttctataaataagagtacttgcttggttcatttatcatactctgtgttctattatctgcttatttctcttctaaatacgtcgtcctccacatctggcaaacatactttgaaggacacaactatcattcttgttcctaacaaaaaacaacgttcgtgtttccatgatactggcacaaaaactatggaggagcttcgtgctgagctcttaaggataatcgaggagctgtcctcatctaaagaaacagtggaatatttatgttctttagttaccctacttcagggtgatgtttcgagttggttgggtaagcttgtcgccgttgagaaacggagagacaatcgtatttttgatgaactcagaaacatcctctctcatttgaatgaaggttgttgagaaacttggctcatcctctctttgttcttaatcccaaagttttcactataaccatagaataaatcacgaatggtagatacatgtttgggatttttttttgtaatgagaattttatttttgttctttcctttttttttttttttttaatttttaatagtatttagaaacaccgtaagtaccccttttttcgtaactgctgtttataagaagaatacgagactctagctcgtttttattaagcttttgttttaagtactttaaattaaattaaaaaacaatatacacgaaaaaaaaatatatttatatgtatgttttaatgtaattaatattttcttataactctaattatttatttaattttcatcgggagtactcaaattaaaatttatgacatataaaacttgattatactaataacgttgtagtaccacactgtcgttgtcaagctaaagagtatgtataagtgacatggtttgataatagaaattaattcatatatgtttatgtttgtttgtttttaataaataaataaattaattaaataagatgaatgatatgatcactctcttaatttattacttttcatttttatcacccttccttttttttttagtaaagttttaaattcaactcctttattttagaaaagttgtgcatatctaataattctataggtcacatatacacatgatgcattgggcctatattatcagcccaaaaaagaggcccagcataaacataaaaccaaagtttattatagggaaatttacaaaaatactgaaatttaagttaatttttacagaaatactgtcacac

SEQ ID NO: 318583 - DNA, 709 bp, Cannabis indica
ggacaaaagtacatcacaggacaacatacattataaactccaattttttactgttttactttcaaagcatttttttgcatttttacgatatttataaaaataacacaaaaataataaaaataatatttaaacaacaataaaaaataacatacaaataataaaaaaataaacgacaaataaataaaagtacaatataaaaatatattaaaaaactatattttctgtgaataaaatcataaatattatgaaaaaatttaaaattctatataaccatatttttgaataatggtgaaatggttatatagtgaaataatattccatataaccattttatttattattattattgttattattattatgataactctagttgaattgatttaagatttttattatataggattgctctcttatttttcaataaaatggtttaattatgcataagtttagaatgtttaaaaacttgttgaagaattattagaaactgaaaattgtatttttacaaatgtaaatatatatttttttaataatagtaataaaattgtagggatatgattttgtcctgtgatgtacttttgtcccgttattgtacttttacagaattgtaattcgtgatgtacattagatggtctcaggatatatttatactttttaatcctaattaccccagatcaatctcaaccgtcagatcaaataactcccttat

SEQ ID NO: 318584 - DNA, 665 bp, Cannabis indica
tttggagtcttagatctccaagaattgggtgtatagagaaaactatagtaaattttgactttaaattgatatgagaagtcagtgagatagaagtacatatagtagtagtagaaggatttgaaatcttactgttgtcacaagtaaagtagaaagtgattcctctgatttttacaggaagagatgaaagtggtagtagtgatgatgatagtgaaaatgtttctctggtgtgagtgttaatgatagaagtcaattatggagactaagtgatgaagaacacataaagatgtcaaggagaatttgatgatacataggtcatcaaaaaattatacaatttactagtataaataattttgaattaagattcattataaatagtttctaattttatagagatttttactagaaattatatgaaatttgttaaattagctgcatattgttgagtttaggaaggaattagttgttgagttttgaattcaagcaaattaaaagagataatttatcataaaaaaaagaaagaaagaaaaagagataaaataatgtatcaaacgtatccattttttgtgttaaaaacataaaataaaagtaaatagatcagatgttttgttttacttttatatttaaaaaactatatatatatatatatatatataaaaaactaaata

SEQ ID NO: 318585 - DNA, 859 bp, Cannabis indica
aaagtaaaaaaaaaaatgtaagacatgctcatcttttatggataataaaaatttaaaaatcttaaaagaatcattttttattgatactaaagttaagtaaatattgaatttgaagcatatggcgttttattatatttataattaaggtagcttaattatcatcatcaaaacaaagttaactgtttgttcctttatatgtatgggtctgcttatatattacttatatattaaattaaaatacgtaaaatttaatactgaatagtgcatgtgacatgatcacttgtagtattacaaataaaaacaacaaaataacattaattaaatataaaattaatatagaataatatatgagaaagaaaaagagtgattgtggtttctagtggtgtgatgatttagagtcctatatatatgttaggtagtgtgggcatatatatatgattccataattaaatataattaataatctattattatattactttctcaatatgatcaaagttatacttttgttgttgctagccacactcactaatcaagtatggagtagtagtaattgcatagagaaggagagacaagctcttctcgacttgaagaaaggctttgtcgatgatgacaatcttctatcctcatggacaagtagtagcccagattgttgtgcatggagaggtgtcaggtgtcacaacttaactcatcatatcatcacccttgatcttcattctgatcttgaccaaccaacattattgggtggtgaaattggtccttctttgcttgaattacaatatttgaggtacctcaattttagtaacaatcaatttactaaaattcctgagtttatcggttctttaagtagactcacata

SEQ ID NO: 318586 - DNA, 2882 bp, Cannabis indica
gccttagtcagattagtggtctttatccaaataaaatattttcgtaaagtatctgatgaatttattttagtttcaattgaatataattattttgttttaactatgaaaagttaacttaaacttactcaatatacagttggaccacgtcagtattttacaacacaagttggtgtgcttcttcacgatcaactcggcttacaccacaaagagaagcacccttactccctctacttatttcactatcgactcgagtagggcgagagccaatggtggtaacctctgacaagtagtctgagcagattttaatcatctctttaatgatttatgattcaacaatacaaccctcatgcctacttctatttttgacaaaacctttcaagattttcatgtatcattcaaatgggtacttctatctcaagtacacaagtccacactacttctcctctctcaccaagtgcattgttaggggaaccattatgttaaaaaaggaaggtgagaaaaattattccaaataacacaaaacttctacaatttctaactagatattctctaacttagccacatcaactactttacaacaaagagatttgaagaataaacacaacctcataattgcatatctaactttcttatgcaacatagaatggataataactagttaaatgtgctgaatcaatagatgatgatcgtgagatttcaaaccactcaaaattaatatgtacccaatctgagacatttgaagagtacccttcaggtaccttcacctaggagatagaatcacacaaagattgcttctcttgtttagttaaagcatgacaagctggtggtaagaatgttcatcgaccaacaacttgtgggtttaaattggctcaaatccctaactctttcaaatctaggaaagtttgattccatctttgctccactcaggattattgaacaaggtattaacgaagcttgctaacacatttttctcaatgtgcatcacatccagattatgacgtaatatccaatgcttctaatactcgagctcaaaaaatattgacttctttttccatggcccctgaggtttatttgtaataacgtcacttttctcacggtgaccttttttttttccttagagtaacttttttgttttccaaggtcgaattgaactttattcaactattctaacacttgttccccttacaaaggtggcggtggcaattcaaatttttgcttaccgtcaaatgcttttttccaagtctaaaacacatgttcgtttggcaaaaacattcggtgtcgcatacaacaaattttcttcgaaagttttaaatacatagatcatgttttctcctcaccaataggatatgttttgtaccctttcacactgtatctagaaatatttccaaatgttggaaaatcattagttgtccacggtaatatggccttaagattgaattcttctttcctaaaggaatcatatgcaagaacaccctcatgccacaattgactcatattatcaactagaggggctaagtacacatcaatttcattaccaagctttaaagggcctgatatcaatagtgtaggcatagtgaacttcctcttcattacaaacaaaggtcgcaagttatacatcacaaccaaaactagccaacaaccatacttactgctaagggtggtatgtagattgattccatctgatgaaaaacaaagacggatattcctaagttcattgccaaatttaggccacctagcattaattgtgtagacctcaaaaagtgatcaaccgacagcgaggttgtatagatctaatgctttccacgtgttccataaacaagaataaaaagtaataaatacatagattttttatagaggtttggcccccttgtgatagtaggtaatgactggctcgccttttagttgtattaatactgagggttaatactatccaaatcaataaagattggatctgctgtatatcccccttaggaatataatgtatgaaccaagaatggcaaaactcaagtgatagtgcttgtataggcgtgtgaagaagagagagaagttgttaaacttaggcttagagcttggaggcaagtattaggcttaacagagcttaggttttttaggttaaagttaaggcctttatataggaggcctaaaccctagattacaacttgaaaccctatatatttatatattttattattaaattataaaagacaaaaatgccattgaatctagatattattcagctattttgttgggcttttagggcccaattcgcagcccagaggatgttgtccacgtgtagaagtgaacaaagaatcctgtagaaccctttttggccagccaagcacctgtagcgagcaggctggccggccatggcattgtccagaggctggccggccaagggtgggcggccaacttatgtgaggaagctggtcttgtgttcgatgctcgtttgagtggcggggtctctgttttctcagttactgactttgtcttcataccagtgagttgtattgccatgtggcactaattctgtccatgtaagcactaccacgttaggaggacaaaacatgggataccagttaccacccaagtccctgtgcggacgtttgtatggatagggactttccctgctatgttggtgtggtcagggctacagtagcctttgctgaataaaatttcttacgttcttagtcctttaaaacattttaccttgactgtcttatcttgttgctgttcaaaaataactattttagttgtatttttgttgtgtaggtgaagtaattgaagaaaggagcccacatgcactacataagtgctttttggagggaaaacctttttcacttctcactttttatttttcattttctctcactagaaatttgcat

SEQ ID NO: 318587 - DNA, 996 bp, Cannabis indica
tgtcgttcacccattcattgggatgaagccggtgaatggagataccttggacttgaggcagtccaaagaatgagtgaggccattgagaagatttgagctcctatgcttgcctcacagagtagataaaagagctatgttgatctaaagcgtagagatattgaatttcaaattgaggattttgtcctccttttggtgttcccaatgaagggaattcagaggtttaaagtgaagggaaaattgagtcccagattcattggcccattggaaatttcggaaaaggtaggtgaggtatacaccatgttttatatggagtttataacatgtatttcaatgttttagaagtacgaggtacgtacgatccatatacagagttatgagaatattaaatttcaaatagacttgtcgtatgaggaacagtcagtacaaaaaatttgaacagaaaagagaaggtgctatggaagaacagcaagattgaaatgcgatttgggagttagagttgcagttgcgagagttgtatcccgaattatttagataaatttcgaggacgaaatttctacaaagaggggatagttgtaatattctaaaaaatataatgatatttaattagacatattttattaaatatgtgattaagtggatatcagagtagaattattatcttacttaagctaattacgagttaattagtgaaatacgagtaaaggaataaataaagtgtaatttattaattacgaagaatttattggattatgggggtattgtagagataccattttcaaaataaaaaattttcaggttcggcactgtggaaactcgacagattggttagaaatatcacggcaactaaagttgcattatattaaagttatatcagactattttagaatgttgagaagtaggtttgatcagggaaattagaaatgatcaaaatagccctaggttgtgtttagtttaagtttagtgggaggggtaaaatagtcattttaccaagtatta

SEQ ID NO: 318588 - DNA, 923 bp, Cannabis indica
aaaaaattaataataaaaaattaataataatactcctgaataataataataaataataactagtaataataatataattattcacttttagtatttttttgacttggggttgtaatgcctattttttttcttcgttatttaacaagtagatgcctaaattttggtacatgaattaattaaaagaattttgttattgagtatattagtgtctaacactatcattataaaatgacgtccggtaaatagttaattatattatataataattattaaattaaattaagtaagatctgatatttaattttattaataacgatatgacatctcaagtggtgtttggtgctttttagtttttttattaattaaaaatttgttgttgtattcagaggcggatccacatataaccgaggcggggcagtcgccgccttgaaaaaaaaaatcgggaaaaaaatatatatgcaatttaattagttacaacatgtatttctaataaaagatgatatttataaatataatattaactttggtataatagactacttagcatataggttggaggactagggttttaatcctattaaatgcattttttttcttttcaagtttatttttttgtcccctcacttacaaagaaaaatacggcctcctcactttgaatcctaagtccaccactggttgtatttgagaaattagagagctatttttggacaaactcttattgaatctatgaattataggtttctaacattctatggattttttaaaaataaaaataataaatgtatgtagtagtgcatattctaataatattaaaagtattttcaaaaatatattattaagtaaaaaatttagttgataaatatcaatttaaaaatttagaggtctaagaaaaatactaaatttatattttttttcaccaaaca

SEQ ID NO: 318589 - DNA, 1353 bp, Cannabis indica
agatggatgcctcgctatccgttacttaagctcttccagctgttgtacttagtttgtatgatgtacattatatgccaagtgttctgactaccaacacatctcgtcaatatctttttatgtataatgaggttgatgcctttttatgcattattgaggtcatccttatgtcttcagacacaaaataatttctcgtcaatacatgagttaatagtttgtatatttttgtcttgcttaagaccatacagtcagcgaattatatatatgtgttatcaactctgcatttaatgagttattccattttaatatcctttaatataattgttattatatttgttgattcgtattctccaagattgacacgtgtcattctctgaagtgccagtcgaattttaggtataacagcattgggtgcggatggatcataactcccaagagcatggaacgctgaccatattcgctgatactatcagtaaactgagggtggtctaattccatttcttttatttacattttattttttttttttccatgattacctaagggaaggaatcagttaaataaaaacaagaagggatttccatgtcatattgtaatttttccaagtcttgaaataagtgaccaagagccaagactcttaatcacttgggggtagcatattttatacctttccaaaaattattaacattaagtatgggactagaaagtactactttaaatcgtagccttaaggatctagaagtaaacaaccatcttaccataattcctaagttaataaattcaataagtcaattcaggttgactatcaaaagtttaggcttcaaacttaattaataccaagtatggaagtaagtagtaatgcctaaaatggagccttatggatctaggattaaacaactacttcaccatatttgcaaaacaatttttttaaaaaaattaacttaggtaattaaaattgaaagaagttcaagcttcaaaatcagttaactcaggttaatggtaatttaaactttaggtctctaaagtacttgataaattttcttataataaattgcttaatttcaaggtctaggacattggaaccatgttccaagaaatctataaaaatgatttgtcaaaagaaaaaataaagataattgtcaaagaaaatttcttaagtttcatgtcattggaaccaaaatctcaaggaactagaagcaaagctaaacttagcaaagtaaaaattcattagatatgcatcaaatatctagtgagtataaagtcaaagtatgcaaattagaaatgttcaaaaaaaatgcatgcttaaattaccacccctagtccccttactaaaattaccaccagcactaggaattg

SEQ ID NO: 318590 - DNA, 815 bp, Cannabis indica
attttctattattctattttttttttcaaattagaaaattctccattattaagttcaaacatttgctattccaaaagatctgaaggttggattcataggggatttcaacaatttatagtcgaaacaaattgtcaaaaggcgatacacttgatcaatgaacaagaagattgctgcatagaggtggatggactggtttattgagatgaaaagtctagtgcaacatgtccaagtttgtggtttgttttttatttttagggaagccaatcatgtggcgtacatgttagccaatcaagcattgttatttgaagctagtgctatgtagattggggtttcattccatgtgttcgtcaagctcttcggcttgacgaaccatttcctttgtaatttttcgaattaatgaattaaaaaaaaacaaaactttaaacattttgctaaaataaataagggatgttgattttcatataatatactaaactaatcaaacatattcatagcacctagaagaaagcattaaatatacaataattaaaaatcatatatatataaaaattcccgccacagccaaaggacaatctaatcacccaataaaactcaagaataacgcatccaacggttcacaagcaaaagtaaatacagacgcggatcgctatctaatccaacggtcaatttctcacatccccacatacataaatattccccaaaccactcgactctgcaataccaactctcacttcaaacgaagaagaagaagaagacaaccaagatcatttgaaaatgtcaggaagaggcaaaggaggaaagggtttgggaaaggg

SEQ ID NO: 318591 - DNA, 991 bp, Cannabis indica
cccgcaggtggaaaaccctttggcatctccctatccccccaaaaattaaacatttcatatggcgtgcttatcatcacattcttcctacttcctccaacctcttctccaggaaaataattccctccccccactgctctttctgctctcacggccaagatactgtcactcactctctcctaggatgttccagagctaggaaaatttgggaaaaaacaacccttgcagacttcttcattgctcaccgttctcaggacattaaggacttcctcctcactggttttgaaattcttccaaaggaccagctgtccctctgtgttgccctgctgtggtccatttggaataagcgtaatcaaactctctttcaatcaaagtctccacctctcctatgatattgaagattctgttgtcgattatttgaaggagtactcaaatagccagcaacattctgctgcctccattccaattcctcctgctactggaacccagcctccacttccacctgcgggcatgtacaccttatactcggatgcagcaatttcaactcctcgctcaactatgggattcggtgctgccattcaagactccactggacagaccattgcagccatcagttctcctcatactggtgctctctccccaatcttggcagaggcacacgctcttctccaagcaattcagtggtgttccatagttcacttgccactccattcaatttacacagactgtttggatttagtgaaaaagatccacaagcgatctaaagatagatctcccacttcagatgcagttcggaaaatcattgcttctttatcaacttttcctggtgccaatatctctcacgtctctcgtaaccacaatgcaaccgctcacgctttagctcataaggccctggaaacggatacagatcttatttggaattgtcatagtttcaattccttcttctcctgattttgtaacttcactctcttctatattcttttgttacaaatca

SEQ ID NO: 318592 - DNA, 1374 bp, Cannabis indica
aagagatgcatttgcaggagtatccaacccaaatttcgagggtccttatgtgatcgaggcaatagttggaactagggtttataaattagctcaggttaacggctcgttaatgaagaaccattggaacgtggagcatttgcgaccctactaccagtaaaccaatgatgtaatatcttttttggatgtaatattttgaacttcaattattaataaagttgaattattttccaagtaattacaaagttttactcttcaaaattacttgactggcatatatatatatgtgtatgattaactggaaattatctagaaatacataatatattgcaaaccctccatttttaaaaatttccaaagtttttaagtggatgactgaagtcatctatgaacgatgcaaagttaaaaatactagttgtaaatgagatttaactcataaaaacaacgataagctacatacgaagctgaatgtttaacgactcgcattttataggaatgtattaaaatgaggcaccaagattccttgaaaaaatacttagcctaaggtgtgaatagaaggcttaactattcatataggcaatcaaaaatatacaaagtgattcacgagatgaataatttaaagtatgtttaagtttgacaaaaatagattacaactgtttatgcaaagcaaaactgataactgctcacaattcgaaagcttagcagataataactgctcgcgcacgtagtagattactaactacttaaaaaaaatattaaaggaaaataagagccactgaaagccttaaagtattttaaatttgattaaagtataattgtttaaattgtgagtaaaaacacaagcaagcaagaaaattaagttcgaatgcaaaaatatgaggcaataaataaaagataaaataaaagcaatgttagccatccaactttgcaacgggcaaaccattgtctcggctatatggcaattttcctaaagtaaaaataataataataataaactaagcctacatagtaagagactaggatggttcttcttcttcttctcccgctacctcagcctcctcctctaccttcttggcttgctcgtagtaggcaaggacttcctccatgccctttccaaggaaactcaaatccatttctggatttgacatccaagctcgatagatggagcgcttggcaatggcgttgcatcattccttggtgttggcctcggcctcctcaagttttgcagtggctacactgagctcttcctagagtttttaatacaacttgaatttgtccttggcctcttttgttgggttttgtgccctaaataaaacccattttaatatagtcagatttacttattaataaagatcataaataacattttatgttgca

SEQ ID NO: 318593 - DNA, 752 bp, Cannabis indica
tgcagcgagaatattgcgtggcttaagacttgctgctcgactaggtttttctttttcaagtgacacagcaactgcaattcgtagtttttcttcatccttattgacattatcgaaggtacgctttactaatgtcctttgttgccccagattttgttgaccttttacttttcctattttgaaatggaaaaaaaaagctttactactctagtaatttgtggtatgtgtaaacatgtattcagctttagtgacattctttggttattcagtccagaataatgatggagttcaactatatgctctcgtatggtgccgctgagccttcactctgtttgcttcagaggttcaatctgctgagattttttcttccctttcatgtgtgtgccactcctccgcctttgttgagattcaatatcattcactgggttttactttctatttgaatttgtagcttaataatactatcctgtttcgatttcaggcagcatatcttgagcagcaggctagcacgaaatctgatcagaactctacaatgttgatggtaagtaagccagtgaaaacttattgagggaacttatgggtttgcttaggggaacatttaagaagaaattaccgagtagggaagagtcatcggttttaataaagctaagttattactttttacaaagtttgggttggtgaattggtctgtaatgacttgtgtagaaaatagtgattcgaattgtatgttgatttcatagaataatacatattta

SEQ ID NO: 318594 - DNA, 598 bp, Cannabis indica
catttggattttattttatgagagtcaactaattaaagaattataagttgggtccattatcttaagttttgaaaataataaatagcagaaatgaaccgaccaatataatttgtttgtttgctattaatgtttttgtttgactttatacgttaatccattgactacattttgctatgggactttactcttacacatgacacatgaggtgttttgttttgttttcttatgtaaatgttgttcaaaaatagtattctaaattgagaagaaggtcacctaaaatctagtatacatccaagtgtttagccttttagggaaaatcaatgtgtcaaatgccaatcatataaatatggtatatatatatatttgtgtctataattagaattcctttttgtctatgtatgaaaattgaatactatagtatagatgtacagggagccttgtgcacctaattgaagttaagagagaaactgaaaattgaaagttcagagagaaactgaaaattgaaatctattctatggtattggaagtaaggatgcatatttttctcatgggaatggctttgtgggaccctcttttcagtggcggaactagacaaaga

SEQ ID NO: 318595 - DNA, 1141 bp, Cannabis indica
acataatgtatttattgaatgatatggttgattttgactaccactgacattgggatccttcacttcaaagttggagtcacaaataccctttatcttgcccgtactcatcccaactaattgaagaggatgaccatacaccataactttcagaaaaaataatacaattagtatggtaagatctctaactgataatttaatggttcataatgtggagtgctttaagaaaaatgactcaaataactaaggttatgagagttgtttgaataaagtagaagcacaactagttgagtcaaaagaggggcaaatattatcctaattttttcccacttgatgtggcatgtctacgtggacaacatcagtgccacgtggtagtacaacttgtcaacaagaaggacaagtcatctacacaacacttcaaccaacgaggagtctgagtactcaagtgggacgaagaatgatgtaccaaccacctcaagggggttggccggtcacccctagttggccttatggccagcataggtcggtcagcctctggccaccctatggccggccagcatacatcctgcaggtgcatggccggccaacctttggcctaataggatttcagtgtaaaacttcatatgtagacagcaagctagaccacggattgggccttaacagcccacgaaattataaggaaaatatctatttttaaggggcattttaatcatttatattttattaatttaatatgtaactaatagcttattttacctatttctaagggatttgaagagtgtaagctctcctatataaagagccttaattaaacctaaaaccctagtctctaagttctaagttttagttgattaagtctgaaaccttagctctaagtttgataactcatctctctctcacacgcccactgctactcatacttgagatttaccaactctaattcttacattgtaacctttagagaggtacttcagatcccatcactatagtgatctgagtagtattatctcttagtatcaatgcaactaaaagaagagtaggtcattacctgctaactaagggagtaaaacctctataaatcatgtgatcatttactttattgctttaattgtgtaaaacgcggcaagcatcagtattacattca

SEQ ID NO: 318596 - DNA, 1742 bp, Cannabis indica
aaatattttcacttttctacttttaaaaacagaaaactgattaaaaaagtgttaccaaacgccaccatatataaacaatattttaatttaaaaactaagaaaataaaaccgtacgtcatgggaacatcagagaaaaaatgctttccgtacaaggttttttttatgtcgtggttttacttttcaacaccaagaatatttgttgatccttttgcagtgatctagggtttttacccgtgtgttctgatacactagtttcgtggttttctctttcggtgcatctttagtcatggagtctgcacatgtgtcaacaatggatagaaaagaaaacaaagagttggagcaacatgagattgttgttatggaaactctaatcctatctcttgataaagaggtagggaaggagtttgtggaacaatcggtgatgggaagaatcatttccaggagatgtatcttcaatggtcttcttcgatcggttctagtacgaaaatggagattatctgaggggtggagtattaaagaagaggctaacaatatatataccctgtattttttgaataagagcgaagcatattttgtgtggctcggagcccttggtctgtgtgcaatagacatttgatgctcaagccaatgtcaacgaacagaaggtggagctctgcggctatggatataatgcctttttgggtaagattctatgatgtccctcctcatttttttactaacaaaaatgctactggtattgctaataagataggaaccgtggttagtattgatcgtatgtggagaaatggattcatgacagtggattacatcagggtctgggtggaaattcatttatcaaggcttcttctgatgggtctcttccttctgatggaggaagaagttagcctctggtgctacttcaagtatgagaatcttccatgcatctttttcaaatgtggttagtgggtcattctaaacagagttgcaaatgaaggagacaccacatcacagacgagttcaatagaacggtgttgatgtatggaccatgggtgagatttggtactcaaataaaacattgcttaaaaaatccgaataaagaagatgttgaatgccagtttcaagctttgaaccttgagcaggaggttgctaacaatgaggttgttgcagaggaattagcgagagctccaataccgattgagatggcggaagaattagagcctttgggccaaggtcttgactttgaaccggctcttgttaggataaagatacatgtagattatcaaaggaacaacaaagaattaggacggaggtggaggtcgatccatcagaaaacttggtgttgggcacgaggctgaggaatattatgggagaggatgagaacggtagtaatattaccatttattggcaaaaggaacatgtattttatataactaatgataggtttaaatattacaatactttaaagtctacaaattaaagttaaaatttaaaaattaataattatattttaaattattatttctctaattattaagatttgtaaactaattattgctgagtaaatatattatttacttattgttgtgttaaaattagatacgcaagtgcacgtagtcacaaacaagtaatacagtgataagtaatgagtatcgtctccacaaggactgtgaaaataaaatttctattgcaaaaattaattaccaagcaacaagcctaaaaactaaaattaaatgattaatgaatcaactaaaggagtaagaaaa

SEQ ID NO: 318597 - DNA, 1189 bp, Cannabis indica
aataaaaagacaatataaaaagagtataaaatctaatttcttcgataaaataatagcttgagatcaagggcgaagctacatgtaaaatgagtggggaggtctccccacctaaaaataggactgagtgtagctgtaaaaattatatattattttacatttgattatatgtaattgcttaagttttattaaaactttaaatcttcacgtaatataaaaatatgtaattgtcttagcgtaattttaattttaactttacctttgtttggaataattttatccaatccctctaaacttaaaaaagtttacattagtttggattatattatccaaccccatactcttatcctttaaataaaacatgaatttagtgactattgtcatacttttttttttatatatatatatagcaatgtttgatttcatagaatgaaattagaagcactaaggttggtcattataaagcacagcaaaagggaacacattgaaagtgtacatcctcattttttttcgtaatgttagtccatcaagcaggattgtcagctaaataattaaattttctttgcatcaatattatccaaaaaattacacaattctttgggttgcaattccctcttgaacacctctttcaattggtgcctttagaaatggatatggacaaagcaaacaaagttgtctttgcctcactcacaagcatattaggagtaatggtggtaacttaggtcacaacgtgaattcaatacgaattattacagattggtatcatgaaaagtaggcgagagtcaaaattaggtcaaactcgaatgataagtgtgggctaatacttaaaacacaaagatttgatcttttgtttctatgtgagctaaaaccagagagagagagggagaatatgtgtggcgtgtgccactttagagagagagagagactttggtggctttcaaaaacttttaaattgtgtgcataatggtctctcttttcttcttttctatggccaaaatctatggttttagtttccctttttcaaataaaaacttccattagtttgattaaataaataaagtgaaaattacatgaaatatgggatttcataacaaagttagaaaaatatggcatttttaggtttgccacttttctatggcattttttcacatttaagttttttatggtatttgatatgccatatttttataaa

SEQ ID NO: 318598 - DNA, 1127 bp, Cannabis indica
cctataattgtgcgactgtgaaaattcgtgcggacgcattaactgtacgcacattacaattgaagagaattggagatctcatctataatattattatgtatatatactaggacacctttgaatatcaacacaaattaacactcccatttcacatatagattactttctcaatatacaatttcctttctattcattaaaatttcatgtaaaatacttatttactaggttaattagaatattcataaggtattttatcgaattttttgaggtcctttatattttttcaagcaaagctcttcgtattaatgcctattgtatggtcctggctaaataatccacaccatattatgttgctgaaaaatataaaacaaaaataatgaacactagtactcgattcatatttttcatattactagtgtagtttcgcgtgctaagcacgaaatatatgaattatatgcatattaaattaaatttactcttaaatattttaataatttcaaaaaagatcttttaaaaaacttaaaatctaaataagttaataattttctttatttttaaaatataatgtatgtatttatattttatgggcaataaacataattctcgtttaaacttaatttattacttaatttttttttctttgcataagttaagagtctatattattcctcaaaaaaatatatatattattatatcatgctaatttttggcataatatctcatatagctccacttatattaattagtatataattctttggtaataggatttgatatgtaagattatttatttaatacaatatatattttgtttcaaatatttaaatatataatgttaataaatctataatatatattatatttttctggctacaattgttataataatattttttaaatattaaaatcaaatttatttgagtttacttgatttttactctctatttaatttcaattatttgaattatactaaatagtaccttttaaatatatgatatattaatatttaaatatgatggaaaagatgttacatctatataagcttaatataatatatgagtaatttattgaaggagaaaaaaaaaacaaccttttaaatatatgatatattaatatttaaatatgat

SEQ ID NO: 318599 - DNA, 2596 bp, Cannabis indica
tctttgttctacttattagcagttgataattagctcgtggtcaatattgtagtctgagttataattggggtcctcctaaaatgggtgccaacctgatggttcatcatcttcatcacttccagttggtggacatgcatcatatttagaataaacaatctcccactctagtccattgtattgaaaaagatagggatcctagttgatttctcggtccatgtatgggtcttgttaatccctaaaaatgcttgccttacggagtaggacccctacaatgttttttttctttgaatagtgatgaatttttcttctttgctttagggtcttggacctgattgtgactattttttagaaatttggaattttttctagagcctttgctatgcattgtgaataatcagagggaaacattgcccataaggcatcatcttatatttttagtcaaattctggtttttctcaaaaataaccttttggagatctttgtactctgaactttctctaaaaggtgcttcttgggagtcgtatagttcaaagctgggattgcaaactattttcttattctcgtctaattttgcattaagactaataaggaagacagtgtagcaatccatcatgttggctacatgtgttcctaatggataaacaaagacgtgcctattattgcgaaccttttcccattcatcccaaagtatttttgttactcctctagaggagcataccaagacaaaatttccatttggatttggtaggttggtttattttttcttgttcgaggaaagactgtatagatgtgtgaagagccatagtttaaacttcaacaacaatcgtacaaatgcatgttaggtaccaaaaaagatgagctatgaattttggagtgaaaagtgcagtccgaaaggggaccaaattagcaaaaggatactttgggcgaattagaaactcatgttgaaaataaggtccaagtttagggagaaattagttgtgagtataaacaaccctgtgagaggccttttcttttgcccaaatttttaaattttggaaaggatgagctttgcatctcaaggaaatgagcagggaaatgagaaattcttttgtgatgatgataatgccattatatatatgtatgtaatggtaagggaagagttgtggttgactaaggggatagttttgagtggatgtgaagagaccatatttaatagatgtaggtttagatagaaggtcggccaaaatattcttccaggaaggtgttttatttcaaaagagtaatgatcaaaccatgttgccagtctcaaaagttgagcattggttgtcttgttctttctcaggtttatcattctttttgatgcaacaatatcagtttctactaagaaatgatggcctatgaggtggaactcaaattttgtgattctcatcttgattgtaatcagctctttaagtgttgaatgataatagagctgggaatctttaaagtgtccactcttatatccacatatttgtttttcccctactcatcttgctctagaaggacaacaccctaatgttggttattagtgtctgattgaagaacatgctttccgtcagagggaatctataaaggtggtagattctgcatgatttccttcagctatctgattgccacaatttggtcatgtgaccattctggagtattcttcttaagcatattcctgagtggccttggcagtatagacaattggggaacaaagtctcacaaataattgatgatgcctaagaattattacacctgaactttcgtgagatttttatatgggaatttgagtagtttatgggctgtatgtggttggacttcatattgtcctttggataatttcatcctaagaaattctatttgcgtctgtccaataatcattttctttacaaacaacatgataccatgggctttagtgatagaagcaaactgggccaataacgattgataggcttttgcattagaagaaaaaagcaaaatatcatcaatatagattccaatatcaggccatatatcttggtcatagccttttggaataaggaaggggtagttttgagcctaaaaggtaggacggtccattagaaatgatttagaatgcaaaaggttattttgggccggtcatctggtttgatgcctaattgccaaaatcccacttttaggtcgaatttcaaaaaaaatataggctttggataatttagcaaacaatgatttcttatttggtattgggaatttatcatctgctaagaactcatttaggagcttatagttgatgaccaacttttgcttttcttgagcttgctctgatcaattattgacataaaattcatgacatgcccatggagaggaagttgactctattaaatcctgatgttgtaactctttacattcattggacgtcatttgttgatgttctaaattcatgcctgggtgactagtctttctatggtttatatcttcattaagcttaaaaggaaagcttatgaagaactgttgattttccataaaggatggacacatttctttaggagctctgcatgattattggcacatgagacttcgatgagctcttcttgatttgatgaaatgggtcatg

SEQ ID NO: 318600 - DNA, 815 bp, Cannabis indica
aattttacttcgagcaacaaactcttaccgattttgagtttcttggtcgagatatttggataaacttccaattcttccagttcttccactggccctacatttgtttttgatttcgcaagtcggggatccatatctttgtctccgccttgggcgacttcctattgagcaatgctctttcccttgcccaaactctagccagagatatttttcttcttgaccttagttagagcaagtttgtagcgttcccacgcaattatttggttttccctgagacacctcaccccattttttgtgggaacttgacgcacaggtaaaaaactgatctaaaagcttttaagtcatataaggttggtcggcctaacatgacattaaaagctgattgaacatcaattatcaagaattgttccatcagaattatgctcatccgtgcttctccaacaatgaggggtagggagatttgtcccagaggtgcgacgctctagctagagaaatcacatacgagctgagtgcaggggatcagttctttacgctggagtcccatcttctcgtaagatgttttaaataggatgtttgaggaaactctattgtctatcatagtctgtgccactatcttatttgtaattttcacttctataaccagggggtcattgtgcgagaaatggacgtaactggcatcttcttcagtgaacgttattgttggctttttctttcttccacagccaagactgattcattttatttgtactataaggctcgggctattgaactttgattcagatatattaaacttaccgtaatatctgttcaattcaata

SEQ ID NO: 318601 - DNA, 1544 bp, Cannabis indica
gaaactctaaaatctcgtctattttttacattccaactgtctaactattgtcccgctatactaaaaatactaagatgtgattcaagaagccatacaccgctttccaatgttgtcaggcaccaaaatatgcaaaattatgaaatttctatatgtgacataaaaatgcattccgaattcaaataaatcatcataaataattaattcactattaataattaactttcataacaaagccctaattatctgctaatttcgaaattaaagctaagcggtctttacaattattttctaaaatatagagtttctttcgctttaaaattacaacttctaagcattgaatgtgaaataatttaatgtagatacagaaaattaaagaatattatttttaataaaatatagaacaaagcattaataatttctaactataaaaaatacgtgatattaaagatgaaagaaattattttaagaagcaaaaatcaggaatatattatacagagaatcaaaataaaaataaatacttaattaaatacactagctttcattgtccgccttaataataagggaacttagaacccataagaaaattaactaagaaaagaggtaaactaactctgagcgctttaagtgttttgtctggattattctgtctaaaactgaactgaattctaaaatcctaagcttttatttgtaagaagataaaaatactaatgtgcaattaaacttattagaaattgcagaaggtagtttttgcaattaaaataacttaattcggagttgccacatgtcactatctgattggttgcatgtggacacgtggcgcatgaggagaggatgtgttggctacctgtcctccccgggtaaaggaaggtctatcttggttctcggagaacctgtttggtcagcttgctgatagaccctccctgatctatcaactagtcttccttggagtggatctctgacgagatcctgacctcttccactggttctctgattgaaccaccttatcaagccactggcttctctgttgcggcaatccagctccgcctggtgagatcgaaggatgtactcttggtcatccatccatcttaggaatttacgtctctactgagcgaatacattacaattagtagcacatggttcttcaattaggctggcttgatagacgacctctcttagtctggctaactcgagatcttctcccaagtccacatggggctcaccaatagcaagctcaccaattattggtcctgtcactttagcatagtatcggagacgagatctagttgttgttcctaggagttgttccccaagggtccttcctttagtgggaggcgccactggagggtcttccctcagagggaagggcctgctgtttagatccactgagatgttcgtgtcactctggccagttgtagtgactagattcgaggtgcctaccgtggtggcaagattgaccacatctgcattgctcatcagaattccaatagtgtctggaacatggatatcagtgttagaaattattttgccaggatcttagatctact

SEQ ID NO: 318602 - DNA, 1814 bp, Cannabis indica
ggtaaaatatttccaacaaggcaaccttacaatgatccatgtgttgtttcggatgagggctttaaactcatgtgtcatggcaccattccattgtggcatttgaagagcagctttaactgttcttggttcacagtgggctaaaaaagccttgggttttcgaatacctgccttaagtcttgtgaccataggatgagttgaggcagcagtagctggttctatgttatgagtagtacctgcagcaacaacattagtaggaataggtgcaacagtgagagtaacattggtagtagaatctaatgggggtaagtttgttgtggaaaggatggggacatcaacaagatgtccaggatggatattgggagcagcagatttgctgatagaggcaacagcagggtgagttgagtggggagaaagagagtatgactctcttgtgtttgatgagtgaggagtgggaggagtagattgatggaaagatgataggggtggtaagccattgattgggacagagacatttggtgctttagattgattttgagattaagtatatggaaaacaaaattcattacaaataacatctctagagatgtaaactcttttatcctttgacatgcacttgtagcctttgtgagacatgctataacctagaaacacacaaggtgtggatcggtaattgagtttatttttgttgtatggtctaaggttgggatagcataagcacccaaagactttgaggatagtgtagtcaagtggtgatgtaaagagtttttccataggagattcattttttaaagtggcagtgggcattctattaattaaaaaagtggttgttctaaaggcttcatcccaaaaggatagaggtagagatgcttgagctaatagagttaagcaggtttccacaacatgcctatgttttctttccacaaccccattttgttcataagtatgtggacaagcaagcctatgaataaccccacattgttctaataaattggtgaaggccctaaactcaccccccatcagattgaagtgtttttattttgtggccaagttggagttcaatttgagttttgaacttggtgaatgtgggtaagcctcatcccttgtcctgaacatgtatatccatgtatatcgagagtaagcatcaacaaagctaatataatacgtatatccatttaaagagtttatgggagcagggcccataaatctgaatgaataagttgcaggggttcatgataaactgtagtagagaaaggaaatggcaatttgtgatgtttacaaagacaacaagctgagaaaaaatcaagatcagttttattattaacagggatattacattattgtaaggcctgtcttacaatcttggcagtagggtggccaagcctactatgccacaatgaaaaattagaatcagaagtagagacatcatttgtaaaacagtaggagttactggacagagaaggaagaattggttgctgtaaatgagtgagttgagttgatgaaaacttgtagaggccattctcaagcttcccaaccaatagagtcttcttggtttcctattctttgacatagcaaacagtgggatgaaattcaaagaacacagaattatcatttgcaaatttagaaacactaagaagattttttgtgatagaaggaacatgaagaagattggttagggacaaagatttggaagtgaaaggagaaatgagagaagaattaccaatgttttcaatgttaagaccgatattgaacttgaactagatatgataaacttaccgtaatatctattaaattcaatatcacctagttgattttag

SEQ ID NO: 318603 - DNA, 681 bp, Cannabis indica
aattctcttgtaattcttgtgagaaataaaaactcgaagtagacgtaactctattaccatcgcgacatggggagtgaactagtagaatttatgtgtgtcactctttagtatttacttaactcttatttcatatctctaatctagtgggtcagtcttggctatttcctaacatcaacattttggtattttcattgagagccaaaatttaagttcccgattacagttctatttctttgctaggagctttgttccgaaaggaattcataagttaaagcaagcaattatccatgaacacgcaaagaaatagtcccactcttggtagccatgacactacttagtgagcagcgggcaatgagtgttgggttttatgccctaaataaaactccatttcagtgtaatccagattattcaatatcaataaagaaatagaagtatttttctttcatttgtgtatgttttggtttaccttatcaattatttgtctatttgatttataaattcatccaaacccttttcacatacttgatcatgtttattgtgttgcaaacacagtggaaagtaaacatgactatgtgattaaagattcctagatttatcagaacactggggttttactgatatgacaatctacaatagagtttacttgcatttggagaaatgatatgttctttccagagcatt

SEQ ID NO: 318604 - DNA, 1867 bp, Cannabis indica
acactagaggcacattctataactcattgtgttggaaattaatttattaggatctagatttactaacatgtatgttgattataattttataatctaacatcctaaatatgaaattcctaaaaaagataaataaacacataggagattaagaaatccttacagtgatggcagcataataatatgacttattccctttagatctctaacccttgattcctatctgtagcagagtattatcaaaattttaactgggatcttcttctccttcgattgtgtacatcacggtcttccacaaaggcctgagtatcaccttgaatagtgtgggttgatactcaaacacctttagaataatatttttaagagagaaacttagtggttttgaaaaataatgaagatagaagagaagagagttgcctggcattgaaactcacaccgtattccaaatcaatccaccacatacaaataatagtgtgggctataaggataaagtgtattataatgtgttcttgtttaattctcaacacattagtaagaactatttgagcgagaaaatgagttttatttttctcccgtcaattttgaaaattgcattatgaaaagcatcttctaatttctcaaatcaagtttctatttataataagttaaattcttattaattaaatcatatttaattatttaaataaatatctataactgaatttggttactgtaatttatgaggaaatctaacaactactttaaaatatttttaaccactttttaaattcaaatatctatctaattaaattaatataataattaattaactcaaaaagacaaaaccaaaagggacaccctacactgggggtgggcacctaccttgtttattatcctcatctcaacaaatattgtccttcttcttatttgattaatttaaaaaattatttatttattccaaaaataaataattactattttaccaattcaaaatagattttttttgaacaagaatatacagctctttatcccttcccttgacagtgtttcaaggtggcgatttggagatcatgagcctataattctaaactccaataaactagattatttattaagtctcttcaaccaaataatcttgtttattgattccatgattactccactataaatatgaaattgaactcttagtaattatagaattatatttactaagttttactgcaatatccattgatataatcaatttaagtgattagcgctccatgtgttggttcgtaattagttttggtaaaagtactatcttaccctgctaattacttctttatcctttagtaccattaattcactagaaaaagtataatttagatcctatctaaatttgtgcacaatttttcagttctataattaacacttaaagggaaccaatatttgattcgttaggaaagttaagattttataattgtagatcatgttcccagtcatccacattattagattcctaaaatagaagttgtaagaatcatcttctctgataaactttgacgagtgaatcaaaaaaactaataacatgaacagaagttcatgattgctcaggatttaagctgataactattgattatcgttatgatatgaattaggtctttatagtaaacaacatgttagataaagatagctttattcacatcggtccttgtcatatataatctctattatatacaacacattcactttgatgtcatactacatcagtaatgcaaaccaagattacttgcactgaaaaatagacatcaatgaattatactagcagccattgattaaagattctataactttaatatgttgctgactgttttattcatagctaagtgatcttacagctacaagtcacagc

SEQ ID NO: 318605 - DNA, 1136 bp, Cannabis indica
gcataaaacccaacaaatactttagatgccattgtaagtcaagttacctcttatttctttgatctcttttcttcctatgggagtgatattgaaggtgatgcttcaatatttgatttcttgggtcctggccttgaggaacatgatattagggtcttagattaggactttactactgatgaagttcgaaaagttgtctcttaactctcaagggacaaggttgtaggtttagatgggcttaatgcatatttttatcaaaataattgggctgtcttgggtatcgattttaccaatgtagttttggactgccttaacaagcgaattgatttcactgatgttaactccactcttattgttttaattccaaaaaaaaaaataacatgttaatatgcttaaggattttcggcctattagcctttgcactactttttacaaaattatttttaagatccttgccaataggctcaaattggttcttgacaaaattatctctccctttcagagtgcttttgttttgggtcatgtaatctatgccaatattatcattgctaatgagcttgtctatgccatcaataaagagagggtgggctgctttaaagcttgatatggctaaagcttttgatcgggctgagtgagactatcttaaaaccctcatgtttcactttaaattccctgttcgttttgtttctctctatctaacttgcctctccacagcatctatctctttttgtataaatggttaggttagaggttctgtcaaacccactaaaggtcttaggctgagagatctcctctcctatctgttcattctctgctctgaaggcttttctactgttcttaggaattactaggacaggggtcttctctgaggtattgttattgctagaaatgccccttcaatatcacatctcttttttgctaatgatagcattttgttttttgctgctgatcacagatcttgtgatgctttaaattgtgcacttactatctattcaaaagcatgtgggcagattattaatttttccaagtcctctgttttattttccctaaacaccccacctaatattagggatattttgttggaaatattttaccaggatttagatttactaacaagtatgtttgtaaatgttgggttt

SEQ ID NO: 318606 - DNA, 499 bp, Cannabis indica
atagatagattttaaaaaagaaggtaaaaataaaagagaacaatataaaaagggtatagagtgtaatttcctcttatttttactatacttcgagttggacagaaccaaataaacttaatagagtacatattttcttttaataaagaataatgtgaaataaatatttaataaaatcaaaaataaataaaataaataatttcagtaaaaaataatagaaattaaattttatttttttttattttagttattacaatataatgcatatatataattttaaatataataaaaaaatgagtccacttagaactattttaattatattaaaattgaaaatatgattaggttaaaatagtccctatcaaaagggatgaaataatagcatggaaaaatgagaaaattacatttactatgggattttaaaagttgtttacttaaatatggcacttttaagtttgaccaatttatatggtatttttttgtttttaagtatttttatggt

SEQ ID NO: 318607 - DNA, 833 bp, Cannabis indica
tttacagcatccctatgtacagagtatgtgactcagcttggcatgtttaatttgcttagagaagtgcaaggcatggaacttgctcgacttagtgacatacttaacacacgttctaaactattttggacggttcctgagtgaatatacccattcagttgtgaacatacttgacgcatgttacactattcagtatcacgtcacattgtccaaaaattaggataacactactctcttttaactttaagaattttgtaaaagaatgatgtcaaaactcttgcttttgagttttgatgacttttttttgtagtttttgtatttaagtatcgatgattgttgtttatatgtaggcatttaggtggtatttagtttggaggaataaaaacataagaataaaaatgagaataagaacataaatatgaataaaatagaatagaatttaaaatgcataaaaaaaaaattaagaaaaaaatcactaatgaaattacaatactttaaaatacaaccaaacaaatgaataaaataaaaattgtttcatttccattccattccatttcattacctccaactaaacgccaccaagattatcattatttttcactattgttctggcaatttttccatccaaaagcatgttttatgtttcttttggctccaactaggtttgaatcctagtactgtgtttgatcgggagccttggtagctgagttgcagaatgagcaactgaacatggtagctaggtaaaagaagatgaaggaaatcattgagggttgctaagtgtagcaaatagtgattcgaattgtgtgttgatttcatagaataatacatatttatat

SEQ ID NO: 318608 - DNA, 1431 bp, Cannabis indica
tttagtgggataagttgaaaaatactttttttttgtatccattaatcaaaaataccttcatattattttttattaaaatatacttacttttttgagtagattgcctaatataccttcactctctacttaagtctagcatattatttacataacctaaggagtcttatgggaacatcatccataaaagtgggtatatctaaaaaaatatgaaaatagaggtaaaaattaaaacaagtaaagtaaagtgggtatacaatgtaatttcctcaattttcatttaggaaagggctatttacaatatgaaaaaaaagggttattttcaataatatcggaaaaattattaagattatgataaatatgacataaaaagtaaatgtcactaaatatgacattatctaaccaatcaaactaaaaatatagttttttttttaaaaaaaaaaccatataaaacattaaaaagagaatctgaatttaagattcataaaaaataaaaacttaattgaattaccataaaaaatattaaaattcccttcatatattttttttttaaataaaacaaatgaaactacagtaatcaccgtagttgtcacttgtgctgaaaaagtcaccggagtttgctgacggtactggaaaagtcgtcggagtatttgccagtgccggaaaagtcaccagaattgtcgtcagcaccgaaaaagtcattggaattagtattgtcgctgaaaaaatcacaggaaaaattaccaaggtcaataatgactattgtgttgagttataaatatctcgggcaagtgatactcagcttccactcttgcccaaatctgatctttggattggtttattcctataattgaattttgagaatgtcatatatacacgacataaatgtacatcttcttcaagtgtgtatatgacaaagttctagttgaagatattttgaaagataaattagaagaagggagagaaatatactgaagatgtgtattcattcaaagagtaatatgctcttatataggggtgtaaaatggcttgataatattatgtttcttatcttcaaaatttttggaagagtaaaattttagatatgatttgactttaccatccaatggttgaaatgatgatcaaataaatccagtggcccaaatttattcatcaagtatctttacttcaaattttgggaagagtaaaattttggatatgatttgactatacaaaatccaatagttgagatgatgatcaaataaatccagtggccaaaatttattcgtcagatatctttacttaaaattttggaaagagtgaaattgtggataagatttgactataccatccaatagttgagataatgatcaaataaatccagcagcccaaatttattcgtcaagtatctttactttgaattttgggaagagtaaaattttagatatgatttga

SEQ ID NO: 318609 - DNA, 597 bp, Cannabis indica
agatcctggtaaaataattcccaacaaaaactgccatcttaggcggcgtctggaggaggcaaactagcggaatgctgaattagagcatgatgcagccgcagctagggcagcacaggggaataacactcaaaattaacctaaccctggagtgagaagaccacgaggcagacctcgtggctcacgaactaggaaacagaaaacttttcaagaagaacaacttggggaaagtgaggttccccctgaaaatccaaatgattagcctataccatctcataaaaatgagaatgggaggcaaccagaaaccaacgaataggaaattcctcgtgcaaatggggaagacgttgggacacaactaggggaacgtaggtcagcggtgaggaatcaaccgcgttcttcccgaatccatagggagagggatcatgcaaaccacaaagggggaaacacaacgaaccatgcccaggaggaagaacagggcgcgaagaagcaagtgtgacctcgtggcgctaaaggacccacagtcgattaactcaaggaggagagagtgctcgttgcgctaatgatggagaaagcacaggaaccagtaaatctgtaagtcac

SEQ ID NO: 318610 - DNA, 1041 bp, Cannabis indica
ttaatcatttaattaaataatcaaactggaaatattaaaatacgaaatttcactatatattccttgaacatgtcatacaaataaatctatatataaaggagcactatcactaatatttatttaatatatggttgagagcactattttataagaaggccaaaggaagcaccctcaaaataataaaagaaaaagtttcaagtcaatgttggttcttgtgataagaaaagagaacctttaatgcatatatatttaaatataaattattgcaatatataatttaaggttttcttctccttcgaagcaacacttatcattgtttttctcccaattcaaatatgcatagacctttatatatataattacacatatttatatatacgtgggtgagatgcacatatagaaaagtaatctcctttacactcacacacacacacatgtgaacattaaagcataaattatgttaatattccatattgtatatggtaaacacaaacaaaagttgcttcaatagaaagcaaccccaaaaaaagaccaactcccataaaaataaagattatatatatttatataaaggagatgtttttattattagataaaacaaaaagctctacattataagattataattacaacaaagtgcaaagacaatttccactgaacaacatatattactcaaaacacaataattgcagcctttgacgtttctttcttttgtttcatttattaaataatttatttattcaatttaaaagtaaataaataaattttattttccttgaaaccctctttaacacccacacgcaaactcctttgaccctcaagaatgcaaaagggaaagatcacacagccgcaatttggcttacgaaacccaaacttttctctctataatctccttttatttcatttcatatcatatccataatatactactccaagttatacctccaaatattatcatgctatttatttcacctgtaattcatgttttgcaaatattaaagcttgtgttttgcaaaaattattaattagatcttttgtttt

SEQ ID NO: 318611 - DNA, 1022 bp, Cannabis indica
aaccagaaaaaaaaagaagaaaagagagaaaaagcttgagatcacctaccgaaattgtggctaggaatctccaactccttgtactcagttttgacattgatagtgaagattcaagcaactttgaaggtcgctagatggagacgtacctctgatttagaaggaactccgaaatcatttctttgtgttctttttttttcctgctagtttctttcgggtctctctttaataactaacaaagatcattttagatctttgttgttactgtttttggttgtttatttggttgtacaggttcaggtatggagggctttgtttgaagctagaagaagagaagaagagagagagggctaggctgcggtttgaagagaagaagtaggcttgggttcggctgctactacagcaagaagaaagggagaagaagaagacttggctgccattgaagtgctgctactacaacaagaagaagaggagaaagaggagtgatgtgcgactgctagggttagagaagagaaagaaaaggagctactaggtttttctactggaaagagagcttttatactgccataaaggcagggttttgagggggaaaggtcaagtttgaccttggttttttttgcactttgtggtgttggtgtaggggcattttgggcatgctttatttcattcaatatctaattaccttatttaaaaaaaatggtaagatatttttaggcattacatttaacattttaattggatctacctaatttatacattatgttttttccttcttttttaacttttcattgcctatttttttttcactttcctctttctctcttttttttctgttaattctaaaaataatttctgatcacactattatttgtttgactctaaaaaaaatactattgtgatgtactcttaatgtaaatattttaatatgagagaatcatatgttttttcgctattaaaaaaattatgaaatttggatgttcctgctgaaatctaaaaatgaagctgttgaccgagtttttcggcaa

SEQ ID NO: 318612 - DNA, 970 bp, Cannabis indica
tggttgttcttctaattaagcaaggaaaactttagtatatcatgtgtggtcaatttttattttatttgaaaaatttatagcttaattatataaaaggtagatatatgaatcataatctttactaaaaaaaaaaaaaagaaatatatgaatcataaatatggatggtcgtttctgtatagtaattaatcattgtttttatttatttaatttaaaaaaaaaaacatgacaggctgaacatgactagtatggagccagtcatatatataagacttataattaattacaaaataaatagataaataatcaaatactacatataatgcaatggataggatttggatataattgggtggctacctacaacttatgatccggtcccataaatgaaatatttatatgaatactatgagaaaaataaatgtacatgcatatatggctatagcaattatgatatatagttcatgtatatatacacacatatcaatgtatagataatgcgtgtgcatatatatgatcatatatatttgaaatagatttagcaatttgggtacatcatgaaattgttggaagattgctcaaatatatatgtataaattctaattgataaaatatttgtttttttaaaaagtaaaatcttacattaatatttaatgttcttattaaaaatttaaaattcgggttgcttttttggaaaacttacataaactattacttttggtaaaaaaattacacttatacatttgaagtttttttttctttattatatatttttacagtattctataaaaatacaatgaaacaacaaaaaattcacattaaaataacaagaaaataacataacaaattaaaattatatacaaaataatgaaaaattaacaataaaataacaagagtacaatataaaaatacatcaaaagaccgtatttatgtaaataaaatcttaaaagccgtaaaaaatatttaaaattcc

SEQ ID NO: 318613 - DNA, 772 bp, Cannabis indica
gaaggtgttaatgtgtcctaatatagaaaaaaattatgatttattagaattcatttttaagtagaaaaatgtggaaaatataattatgcaaacaatttttttcaaagaaaaaatatagatattaaaagaaatttttacaataataatttgaaaataaaatctagcttttgaaatattatgtcaatcaaattattttatgttactctacagtttcaaatttcaaaccaattaatatttaatataattatttttattttattttaaatgttgctaggtacagttacaccttatgacaccaaacaaacacgacatatataaaatgaatttgtaattaattttttgatattataatttttttttttttgcagtggataataaatttaaaattaaatctcattcattataattttgataagcagtagtatatttttcttattttttttggaaaagtaataagtagtattatttgatactacgtatcctaatatattaatttgaatttcacttatataaatataatttattataagtggtgttggagaccgtaatatctaacataaattgttcgatcgtattaatgtaatatttattgttgttattatcttatttttatcctttattatcttttgtcctcacttttataaaatattggttcgagttattatagtttctgctacttgactatctgtatttattatcctataagactttgtaaatttaattatttatttctattttaattttttttattattattattattaaaacattt

SEQ ID NO: 318614 - DNA, 686 bp, Cannabis indica
tttgtatcttctttgaaaatggtcttattataaatcatcttactataatagtcaacactacacatttattaggattatcattcatgaactataagtgaaaaatatgtgattcaatttcatatcattatatgaatcgaataaaattaaatcaagattagtgggtgaaatttttgattgattattattattattatttaatattatatacattagacattggcataatttgcgtatgattgattaaaagtatttcaatttatttttttcaccttaatgtggtggcttaggtcaactatgacctgtctcgtaccatgttagtatattacttctttcttctgcctcaatttcccaaataattatcttatctttttcacccatttttatctgtatttactatctatttatttattgaaaaatttagactgaatttaattcgaaatgaattcttagagtcatactaaaaaaatacaaattaaataaaccattgcatcataaattacgactcttgaaatccactcatctttggcgtctactttggtcctgaattaattcagaagctccaaaatcttctccttaaattcaaagtctgcatttttggcagtaaattcttatatctttatatattaaaagtgtctatctaacggcatttcttgtttaacagaatatacttaaaaataaaagaatat

SEQ ID NO: 318615 - DNA, 1669 bp, Cannabis indica
tgaataattaatagcgtatctatgacttagaacatatagagcattatatataattaagcgtgcaattctaaaactatattggagttaggaggaattaataagttatagaattttactaagtttttggatctacttattgaaaatttgattatataggtccatggtctccaaactagttgagataatattggcttgtagactcagttagttggttttaattaactaattataattttaaattacactaagtcttatttatgaattttcactaaggaaatacttaattgagaagaaaagaggttttaggtttatttattaattaagagactatgtaaggtttaattaataaatatgttaaatggtaattttatttgataattaattataattattaaaaaaaatagatttggcatttaaaggtataaaattaagtatggcatttatgaaaagaaaaagatgaattattaaataaatggcaaaattaaaattttgtggggtccactatagtgaccgaccacttaagtgattttaagctattttttatctttttttcttttttaatttcatataaattaaacctaaccctaggtgaaagcctataaatagaacatgatcgactaataacctgataactctccataagtctattcttttagaaaattgaaaaagatgggctcctctctaatttttgaattctctctttcttctcttcatcaaattcgaagcctatagtgataacagtatctttcccactcatatcaagctagtagtcaattatagtctggaagattgtgcagaattccaatacctcaaggagatattcaagctcagatcttgttattactccgcgacagaaagaaacaagggttagagatctaaatggaaggagctatattattccactaccaccaatgtaaggttttctgtaactttaaatgtctttaattcattattttaagaaattcatgtttaaggtgttagattatagaattataactaacatacttgttagtaaatctagatcttggtaaaataactcccaacatttaattaattttggatcaagttaaatcaagtaacttttcattaatgatttattaatataaatagactaatatatattatattttaactaaaaaatcaataattactttatgaaatttcaagatagttattttttgagtagatttttttagtatttttctaatatattaaaaaaaaaaaaaatttaagtcgattttattcaacacacttaaatattgaatattttttttattagaataattttttaggatttattttattttattttacgtaatttcaaaatatatttgttttaatacattagatttcaaatttatttatatatatttgtagaaaattaaaattgaattgaaaatgaaatttaattaattttagatcaacttaaattaagtcattttcataatatttattgaaaatgaagctttaacgctgtaagatctcgaaagataagtattttgtaagtttatttttcaattagattcatccctacggtgactacttagaaataagtttacaaatataaaataatggtagaagctcattgtaacgccctaaataattaggcacgctacccaaaatacttataaagccctaatcccctaaccgggattactaattaaaatag

SEQ ID NO: 318616 - DNA, 561 bp, Cannabis indica
cctttttgtttattttaatatttttaattttatacaaaaaatgaacagctggattatgctccttcttgatggttacacgtgtcaacgtctcataattcattgtattgtataatgatgataatggtaggtattttggggttgtgaatgtttgaataataattgtgctttaattgttcataaggaaacttacaataatttattattttattattttgaaaattgtgtcgccttttaactaataaaataataagagtaataatttgtggttaaaattaaaaaatctttctttacaaaaatatatatatacatctaatacactttcaagtgaattatattttaattaaagtattctaacggaatagagttgcactgacaaaaattaaaacaatacaaaatattagaaaattttataatggatctttttaaaagagatgtaccgatatatttctattaattttagcattcgaattacttttttagtgaaattttttttatggtcatataaattatagttatttaaaatatcttacaaaatttaaagaaattcgaaaaagtttaaca

SEQ ID NO: 318617 - DNA, 637 bp, Cannabis indica
gttttctcatatttttaatttttcttcaatttttccataaaatactttttttgaaaaaaaaaatcatatttatgtgcagaaagtatgaaaactcatcaaatttataattttctcttatagatatacatattttttttagctttgggttctgtttgaattccataatccctcaatacgaagaaagaggtaacatgattagggtcacaaaatggatttcaacacagttcacaactcaaatatgatacgagtttttatcggttagggtttgaaaaattagatgagtgtcgaaagtgtgttaaatgactagcacaaaaacaaataaaaagtcaaacaaaatacgacatgaatacaataatacaacaaacatagtttaccacctttaaccacgaccaaggtcggttctaaaagtaggcaaagtaggctcgtgcctagagccaccaccttatagggcccaaaaataaaaattatttaatttataaataataaatatttatatgtcttattataaattaaaaagtgatagtaatgtagtggtacgatttttatttgggttgtgttagagttaacgcatgtgacacgaaatcagcatgaattgacccgtttatattattaaaattattaatttatagttaaatta

SEQ ID NO: 318618 - DNA, 1216 bp, Cannabis indica
tatattattaaaattattaatttatagttaaattattatttatttttatataaaaatatatattttgaagaaatttacttacaagaatatataaaatagataatttatatttgatattacgaattttatttattgtattaataatttgtgataaattacttttataacaattaatatgcgatactaatcatgttgatgaaaatatattattacataaatatagtcgacaagtgaacataataggtcgacacgagaacacgataggttgggttaaagttaagatttcttgacacaaaatatatatgggttaggttatggctgaccaattaagcatatcaacctacataacacaaatataaatatgacatgacaacataaattaccacccctatgtctgcgttaaggccttctattcccttaagttcacgtgttcgagtcctagtgaagttctttttttttttttccatatataattataaatttattcaatacaaaagtgtacgaagaagagaatcgaatattgaactggcctcttatcacaccaaagttaattatcgttataagtgtttaaattatctaattacaatgtatattaagggtcccaaaattttacatcgtttttttatgcacgacctgatcattactaggttaatatgtggttattttatgagaattactttatatatattattttttatttttttttaaaaaatcacggtttgagttgctccaataatttctatgtgggttgctatgtgaattttagttacgatttgagttactatgtggattactatatggattttcgtaaaaatatacaaaaaaaaactgctttgaagtgcaaaaataaaaataaaaaaatccctattttattaacaaaataataatattatataattttcaaaattagtaaactatatatatagaatgttctaattgctcatatatatagtatacacacccactagtttgaaaaggaaagagcaatgactttttcttctcttggcattttctcacacaagaaacacattgctatttcacttttcctttatttatttatttattttaatttctaatgggataggaactaacatttaataaaaattttataagatatacacataaaatatacatattaaaaaattgagtaaaaaataatcacttaatacagttgcatttatttggatttaatatattatatattatttatttattt

SEQ ID NO: 318619 - DNA, 940 bp, Cannabis indica
catctacattacctaaagagaaatgcttgaggttattatctggttttatttgaagaaggctgggttggacttggataaaagaattgagagtagaaaccaattatataataataataataataataataataagtggcatatgatttggtaattagcttagccgatcttaaatgttcacgtttgaaaacttgactatctccttatcataattgaataaaaaaacagatgtggtggttgccaaacttacaaattacgttgactattgactaaattattgaaaggggtcactattatttgacatttctcaatatgctccacagttaataatttttcatataattattaaattaaaatatacgagatttaattaatattaaaatacgttaataataatataccatctcttaataatatttagtatattaagacactccttaacattttctattattaaattattcaaggatatgtttatggctatcagttattgactcataacacaatgaaatggtaaaacgatacaaaataaagacaaaattatatatttttttatgagtttttatacaatgggcacaaaaatataatttagtttcagaaaaagttatttaatttatagaattaaaataaaaaataaaattaaaaatatgggaacggtaaccagttacttcattatagtaaccaatgaccttattggttttcttataatttttctataaagtaactatttgtaaacttgtgtcttaaaaactacaaaaataaaaataccaaaataaataaatttaaatgatacatttagtttttgtgttataaccatgtcatatcaagacgttttagcttaaccaatgtaaatttatcactaaaaaaaactgttagttttaatcacaattttttagtcacaacataattttttttttggtaactaaatgtgactttaagtcac

SEQ ID NO: 318620 - DNA, 1453 bp, Cannabis indica
aaaaaaatgtgttatatttttttagtaactcgttttatgtttctaatttttttttttattgtgtagttattttatgtctattcaatttttttacgtaaatagtgtgtttgtttgtttaagatttttaattggtcatttaatgtaactggtttcactgtgtcaagttttaattgtttgtttaatgtaactggttttttgtatacaatattcaattagttgtttaatgtaactagtttctctgtgtcaaattttatttagttagttaatgcaactcgttttaatgatttgagtttaattatctgttaagaattctcttatggtattttcttaattaactagtttttctgttttaatatatcattttattgttttaggtttcttatgtttttgttttaattttgtagttaattgtattaagtaattggtttctgtatttaatttttgttttagttatttagttaattgatttatgtgagttgacttttaatttagttattttatgtaagcagatattttgtaagattttttgctaagttgtttaatataacaggtttgttatttaagttagaagtcatttttaaaaattcttttatgatgtcttttttttttttttaagtaactggtttttgtaattgatatatatttttattactttagatgtcgtatgtttgtttactttttagttgattgtaatatgaaattggtgtctgtattaaattattactttttttttgcgcgcaattgattttaagatttagtttttaatatagttactctacataattggtttctcgatatcttatttttaactagctgataaatattactgatttattattgtcaaattctaatgtccaacttcggtgacaactctaacatatatccaatactggtgacaactccgatgtctaactacggtgactttccgggagcgacgacttttctgatgatgatagcaattttgttaaatattctcattctattttctacttgtattgcgattaatattttgttttagtggatagtgaaagttttgtgtagtgggttgatggtcgagtcttagagcttcttagaaatttgtaactggttttagttttggtcttgtatagttgtattggttttagttttagtcgtggtggttttagttttggtcttggtgttgtgttggttttagttttggtcttggtcttgtgttagttttagttttggtagtaagttgatggtcaagtcttggagcttctaagaagcatgtaaagtttatatatgagtttttgtatttgtattgtaaatagctttttagttaagaaaccaatttttgattatacacaattaactagtttaataatttattgcctgattaagactcatattggtatattttaagcctttatttatacatatataattaatataaattaaatattctttagtttttatggtaaatttattttaa

SEQ ID NO: 318621 - DNA, 607 bp, Cannabis indica
tgttaataaaacatacttggtagtaaatctagatcctggtaaaatatttccaacaataccatcatcacaatcattcttctcttatttaaaaaaacatatgagcactaaaaattggagataaaattaccatcagaaactaaatagttatttaaacttatccatcaaaatcaagtaagagatattgaaaatcctagcaagatgatagcagacgaggaggagggaggaagagagagatcgacatcggtcgtggtgcgcatcaaggttaatggtggttcatgggagcgactcaaccagtccgcgagccaaaaagtaaaggggttgggaggagagagatcgaataccagtgtagatggtgacccgccattaacgtcaaagagggactaccaacaaagagaaagtgacatgtaaaactaagagagagtatgatggagcccaaatttgtccatagtaaccatctaacaaactaatatctgttgggattgatgccctaaataaaacccatttcaatataatttgatttattatcaacagaagattagaagtcatttatgtttacatgtagtttttcatgtttatggtttaaagtatacaatttctattaagtcca

SEQ ID NO: 318622 - DNA, 1072 bp, Cannabis indica
ttacaatatatatatgtatatatttccaaatatataggttatttataaccataaatttgaaaattacatatataaccaacattagatatttggttatttataatcaaatttaaaaaattatattttaataaaaaaaatcaaattgtataattatcctattttcccacctctttgctatcagtagttttatttgaattgtttataattaattatttcttttaaaaaatatctattatttaattttatctaaatagatgtgatccaatgatctaaattaatcatagacacttgatgatagataagttaaatcatttgaagcaaatatgtatatttgtaatttttccttcatctgtggcataacatagaaacatgctaagtatatccaaattttattgttatatgtgaccttatgtttgattattggacttagatatatatagacccattttaattttaataattaaaatggactaggttgctaattaaattggatcatattgatagattatctaggcccaattagaattgggcctattcaatgaataatagttatttaaataaaggttaaattgctctcttttgggccttgtgtaagagttagggggtcatagtagtggttacgacatactgaacctagccctccctcacatgaacaaactcaattgtaaaagcccatttgcattgtttaaataattgtatatgactaattatataagtttaacctcataaaaattgattagcaacatcattaattctaataatatttaaaattaatttttcattaaattatttttaaattaatttagagaaacatacacatagtttaagaaataattcaagataattattttctaagtaaactagttggtatttttctaagtatttaaatgaataaaatttaataatcaagttaaatttttctttaaaattcaagatacttaaatattagataatttttgatatttaattaaatgaaaaatattatcattgaaaataaattttagaccaacataaattagaataatttttagaatttattttatttcatagattttataatttatatatattt

SEQ ID NO: 318623 - DNA, 1860 bp, Cannabis indica
atagaaagtaaagtatccaaacttacaaaattgtaattttgttattattgttgcgctagattagctttattaagaagctgactagatcaatacgtgttaatgtgtgattcgttataaactggaccaatcatgaactaatacatgttggtcttgtcagctacctaaaatcattcgatgaaattacaattttgttaaatttggatacatggatacatcgtcctttaaaaaattaattaaatttatattgaatctaaacctcaaactcatattaaattgtaataaaattactataatacctttaaattattaacataattattgtttacaaaataaattagtaattttacatcattgttttgtaaaagttttttctctattaatctcttcaaattggagaaagaaaatgttagtggtcctatctcaaatttttctagaaaaaactcattttttccaaccaaccaagcaaataatttctttttttattttcaccacttttcttaaaattttcttttctccctcttaatgaaaatggggataatatgaatggtaaatatttgtatgggattgcaaataaaaaaagtgggaatggatgaaggaattgtgatggtgattgtgataataaagcactgacttgcacgagaaaagtgcagcgtaggtgggggcccatgggccatgcacagagcgctttaacacttttctattcttttctgctacctggattttacgataatgtccaaaaatcaccactaaacgaaaaattacgtcatatgaaaaagaaaagatcgatatcgaggggcattccgagaattgaactcgggacctctcgcaccctaagcgagaatcataccactagaccaaatgcccttgtttgattggttgtaagaaattatagtatattacatatatactttatataagatgtttcatctcaaatttttggaaggaagaaatagtcatgaatattttcttgttctttgtattctttaaggttgagaaatttccatttagaaagaaaaataaaaatagttaaatttaatataattttagattgatcgattcaaatgaaaccaaaatagtgtgttaagtttattgtagatttattgatgtgaagaaaagaaaaggtttgaaatttaatacgtatcacgtaattcttatagaagaaattggtggtgtcggtggataaggatgagatatgagatgagatgagagttagacttggggaccactacttcatgtgtgtcatgctcttaagctataaatcaaattaacggaaaattgtgcaaaaaattcttaaaaaatttactttcatataaataagtctccaactttaaaaaataatagtgatagtttttaaattcgagatttttttaattctcattttaacaaatttattagttgttcaaaaaataactcacgttgataatattaaattgtagtataagtttttaaaaaatttacttttatgcatataagtaggggtgtttattggaacacatttaatatttttaggcctatttagatccaattcgatccgatgttatatattagatgttaaattttaccatccaatccgatccaattaatttttttcatccaatcgatccaacatctattagatgttggattgaatcggttctatctattggaagtatttcttatatatatttattagtttaatttatatttacccaatatattaaatctattattttttgaatcgaatcagacccattcaatattttaggtttagtatgtattgaattggattgaattagactgaatgcatccaatccaagaaaaaaaaaagtaaaaatttagtaatgttaatttttattatatacatatagattttacgtataa

SEQ ID NO: 318624 - DNA, 580 bp, Cannabis indica
gctaaaggatcataatcatatctaaaggtgtataattgttctcaaggagatatattgctgagaagttttgatagaaatttattcatttagttttattttattgactaaggaattcagaaaattttgatagatacttctaacccatgtaaatcaatttattgattttatttgtaatgtcatcttcattatatgaagacatttttcatttctttaccaaatgatgatgtcttatgattgtgtccgaaatttcgaatccttttacgggtatgaatatggtaaggcatgtgatgtgctgtaagtggttagtaattttttatattatttatttgatcatgtgtaggacccgagccaataataatattacttatggggtacatgaatccttaaggtgtcctttaacactatcgcagtcgtgcccgaaaaattaaagatacagccccttacaaaatctacacattgtattgcctaaaaacatcaacactgtttctgtcgttctctattgaacgtgtgtatgtcgttctctattgaacgtgtgtgtttgtcttttgctgttcacttttgagtgagtgtgtttgtcttt

SEQ ID NO: 318625 - DNA, 1967 bp, Cannabis indica
ttttgaccatatatgatgatccaacgatgaaaattagcttctaatgcatggttttcaaagcccagcaggatccgctgcaggtaacacagcttatttttgtaattcccttggggtgaaatttgagatcaatatctttacaattgcaattaaagtgtgagacgtgacttgatagagcattgaattagcttcgaaattcaagttgaattgtaataatcagatcaatattgcatgtgagttatgactgttttactgaaggaaattcatgacctagcaagttgacatccaacgcccaggttgacatctcatcgcgcatgttgacatatgacgtcaacctggacactgggtaagtatgaaaatgtctaaggggtgtactttaagatgcctaagtgatattttgacatcacttagtttgtttctgtgttttggcaaagctggtcaccagttcttatagatgttactattctgcgaaaatgagagacttgaaactctttatttctgagtgagtttctcatgttcaaaatgagaagacaaaacatgtgaatttgacttctctagcttcatggatcttagttattatggaaaactagacagacgatcaaagcggaatcagaatcgaataaaaagaacccaacgcaccatgccatttgttaacctgggcgttggatactcattctttgcaagatctcgtttttatacttctaaggttcttgaacttgaggacgagatttcttaccctattttttaccattccaaattcattagtcgaatcagatttggcatttgagcaatcaaaaacaacaccccaggttgattgtcaacctggtgctgtggccaacatcagctcaacctaggcactgagtcctatttctaggggctcaagtttgtggttttttcctcaaattttcttgaatcttaattatttctgatggaaaaaaaatacctgaaatacttttcaagaacttgattagaaacaacccaaattgacaatatgtcaacctacgcattgggtcccagttatggccattcgaaagttctgtttagccccaaaaaatagttgaatcttaatattttctaaaactagagagaatatttggaagatttctcagaaaaatttatcgaaatcggcctacagtcacaaattgtcaacttgggcgccgggccttgcttctagctcccaagaagtgttgtttcttccatgaaagtacctatttccccattttcgatgaggatgaagatgatgcaaaagttggctcatctatttgatacttggaaagttcccaaattaataaattatcaacttgggctctgggtgctcgggcatcaggtgcttcaggtgctaaaaattgaacttactctatatctgattctaatgcctcaaacatgtttgtaatatgtctaattcatatcccaatgcaaattttaacccattttcactaagatggtcctaaaaactgaaaccctaggtgcccaggctggcttttggggtgcaagttgtgtaaatttagctcctggggcctggatttaattgctccatgtcttcatgaaacaaaatactaaaatatattaaattgaaaatgagttatcaaagtctgaacttctatcccaaagttcccaaagttaacctgggcacaaggctagggacccctcctaggcagacttgttaagacacgggactactcaacctcaagatttcatctttcttgccacgtgtcaaatattaatatccacatcatcagggatacttttggtgtaaatatttacccccaagtcaactttacatgtgtgtgaggttgacttaatgatgtgaactaagtctatttctctcgaaactactaagtggacatcaattttgaaaatcttagacaattatttttattcttcaagcattcttattgagagtaggatttcaaatccccattctatgtcgaatagtggaatttgaaatgttaaatataaaaggagaagag

SEQ ID NO: 318626 - DNA, 793 bp, Cannabis indica
aaaaatactctttataataaaaattgataatgaactctttaaatataagaaaatctctattttttgctaattttttggatatattttaatcaaaattattattattattattttagttaaaaaaaatatataaatagtgtccttagaaatactctattgttatgttaaatagatttaatgcctaaatttttgtaactatatctatataaatattgttgaaaatttattttatcaggattttaaatttactaaatatatatgttgattataattttataatctatcatactaaacatgaaattcctgaaaacgataaataaatacataaggaattaagaaatttttatagtaatggtagcagaataagaagactatttccattcagatctctaacatttgattttttttgtgacagaatattatcaagatttgaatatgaatattcttctgatgacaattgaactacacagccttccacaaaggcttgagtatcaccttaaatagtatgagtttgatactcaagtacctttggaacaatattttaagagagaatactatgtaatttttgaaatatacagagaaataagagaagagagttgtctgatattgaaaacttaggttagattctcccttctcatcactttctttatatatgcttcatttatggataggttagatgagactggactaaaactaaagactctgactgagtcaactcttaggtggcgtttgattgggaagaataaaaatataggaatatgaatggaaatatgagaataggaataagaatgga

SEQ ID NO: 318627 - DNA, 1390 bp, Cannabis indica
ttgaatttttttaaaaaatatttccatctactagtatcattcaatagtaagattgagcataaacaaaggtatctttcgatttgaacctctgcgtagtgaatacgatttagatattactagagtgacccgtaatcttgaactctatctctaacattgtaccacgcaacgaccttttcaaaggtataatcaaaagcccgtgcgtttatggccatgcacacgtctatcccagtatagtaaacgctctagaaattttgctcgaaatttcataggaagcggccccactcccacattcacataggtgagtccatcaagagtactcccatagctcggtactccactccacttggagtatagatctcattaagagcttttattaactcagccttaaatcgcttcaggaattcatgcttctcttttcgtataattatagcatgatctcacttttatcacttcataacttgttattacccattgaacctatttcttgggatctctagtgtatatgtctggttgccactatgagtgattcatcaatttaaggggcaatagtcccattcctttcgatgttttaaggacttaagagtataaaattaccaacaataatttttttctttaaaatcttggttactctacttaaatttctgtcataaatggttgattctcatcgaaatgattccctttcttcaattttaaatagaatatgagaaattcaaatggaaagaaccagggtaaggaaatactttgatgcctaattaagtgtggattgtgttcttattttgatagagtaacgatatgacatgaaaaagttaacgatcccctagtgaagagaagaaatgagttagctatttctacaatgagaaataaagagagtggttagaagaacttattctttccaccctttgatcaaaataggtattctacttgtatgtaattgaaagactaagaatcaccctactcttaattgaatttaattgaattgatgaatggaaattaaaataaattatttatttcttgcacgaattgaaattggaagtagaattttataaactaataattttttagtgattctacaatgcaccatcttaaaaaggatgtactgatgcaccctctacttgttttggcatccaaaaaatttttttagtctaatttttgttcatattcatgtacgttttaagtatttaagatatccgacaaaatttcaagaaattcagaataatttacaatatagaaaataatattcaaacagtctattttacacgttataaaataaaatagtcacacatgcaacacattatttgaacgtagttttcggcgtgttaaacttttctgaatttcttaaaatgttacaagatttcttaaataactataatttacatgactatgaaaaaaa

SEQ ID NO: 318628 - DNA, 2006 bp, Cannabis indica
ttgagggaagcaattggggtggttgagaacttagtgtttgtgttagataggcatcaaagtattgaccatgctgtttaacttgttttccccaaagcaatccactatgcatgctatcaccacattgttatgaatgtgaactccaagtttaagactgatgcttttcacaaccaaatatataatccacatcgttcatatataatgccatgatctagttattgttttggaaatctccggatgcatagagtaacaatagcaatagatcttcctaggtctaaaagatggctttcatgtccttccaattacaaatgctggaatcacagttgtacacattaattttctataactcaatgttgacttcaacagccacccaaagcctttgcctgggaagatgcataatgaagtaaatgaactcattaccccccatctcggatagaattggtcctataattatggagaacagctaaacagttaacaaactataataaacttgtaattatagttgaaactttaaaaattttctaaaacaatacctaatgaacacatctgcagtactccatgatataatcctcccagatgaagttttttctggaacccctgtggtttgttcatgcactgctgataatagtcgtgacatatgttgagagaatgatacccttctgacgaaatatcaatggaaagaagtagtatcgcctcctcagcatatggacggctacatctatatgttgcatataaaggttagaggaagcatttagacaaccaaatatattaattttagattacttgacttataaaatgtagtaaaattgtagattagtttactttctgtaagtcattcctgcaatgtcaacaacttccaaaagaacgatggaccataatcaccagttttcaaatcccgaagtcgatggttgggaataagtccagaacaccacttccagaaagtatccaacaatcgctcatccggtggagccaggggatcaaatgttgaagaaggcctttgtttcttcttcatctttgtatagtctttaaatcaagtagggggatttctctttcgcttgccaaactcaacccctccaagcggtgcctctaaagccaaaatgtcaccatgtgactcactgtcacctatggagataatagatgcatcgataggggtatttggagcatcctcatagggatcatactcgtcgggaaagacctcatcatctttacccatagcagatggtgagggtgatgcagctacagatggccccggtgctggatctgccattggcgtacgatgcagcatgctcaatatagttctgagttgctccataatgaggttctgaccaccctttagctttatatggctattctgatatgcctcatttagctcgacatgacaagcgtaaagacccttctgctcagccttgatcctatccaacctccacactaattctctgtactcggcaccactaagtcttgaagatgatgcagtgggttgagggtaaaatatataccaaaataatacagtaagcatacagtaatacaacaaattaattagataattattgacatagtgtcgataacatgtcaatataccatcaacaatatcttaaaaaacaaaaaccaaatgactgtcgaaaatcaatcgacaacatgtcaaaatacgatcaaaaataccttaaaaataaaaaactaaataaatgtcgacagcctatcgacataccttagagttaaaaaatacaatgtcgataaacattcaacaacctatcgacatacaatcgacactatcttcaaaagcaacaaacacaaacaaatgtcgacaacctatcaatatcatatcgacaatatgtgaaaaaaatataataaaataatcaatgacaaataatattaattaaccgtgaaactaaacaaaatgtcaacattctatcgatattgtaatgccctaaataattaggcacgctactcaagtcacttattaaatcctaatcccctaaacgagattactaataacaataggaatgaaaata

SEQ ID NO: 318629 - DNA, 796 bp, Cannabis indica
aattcgcttccaggtttggaacaaaacgcgaaagttgcagagttggctattgggtggaggaaaacctgaagagaaatgtatacgtaacataagaaatgggcgatgaagttgagaaatggagaaatgagagagagagagatacttacagaagagagttggggaagatggttgttgaaggagtgaaagggtttggaaatgaaagtgtaagaactatgagaggccgaggcagaggcagaggcgaggaagagtgattgagccaagtgaaaagcaagtcattgttctactgcctttgccaactaaccgccacatcttttttttttcctttttctcttttgccctttctcttttttctttttgtatttaattgtgtgttgatttcttgttgcgtatgaactcagccttggaataagttggaactaggtagccctcattttgcaaatcctttttatcttttgcaagaagttaaatcgctgcaaaattttcaaaatttttattttggtttcactcaactattaaactctaaattttggcagtaaaaccccccaatactcatattctgttagtaatttatcttttccgtccattttaagtactaagtgtcatgttggactagacacaatgtacacgtagcacaattttattagtccacgtaaaaaattattttaaaaaaattaaaaaatttaaataaaattaatttaaattaaaaaataattataaataaaaaaaataattttctttttttctttctttctttcttttctttttctttctttttttttccttttctttcttattt

SEQ ID NO: 318630 - DNA, 806 bp, Cannabis indica
agccctatttgagcctatgtggactcaatcgagacgatgttcttcgtcgatttctcttcgtggaaggtcctggtgtgtttcatcaaggctctaatgctgctcttagagtggtttcttacttgccttttccttactctgctttgagtggttttagggtttttccgactacaattagggattctgtgtatgattatgttgcgaaacgaaggtatgaatggtttgggaaggagaatgattgtttggttttgggagagaaggaaatgctcgaacgatttattgatagagatgaaattttgggtcagttctaattgatattgaaaatgttaaaaattgaatctttttgtgtgtttctctgtttctatatatataatatatatagtcatacagatatgtatatacagttcttctttttcatgagttgcattctgtcattttggtagggaaaagaaaaacttgaatttcaaatgttgaatgaatcttttgatagcaagcttaatgggttggttcgttgggattagacaactatgattggagtgttgatgaagatctcatcagttcctttagaaaactttcaatggatagtatctgtaatcagaacaatctcattttcctatgttccttggctagaagtatttggtagttgttgaattaatggattcttcaactcagagagtatgctatcatttgtggtatgttatgcttagaaatcaggctttccatgatgagaagagaaggtaatctgatcatctgcaaccttggccttcaagattcaaagctctatcattgacactgagttcagtggtgtt

SEQ ID NO: 318631 - DNA, 1260 bp, Cannabis indica
attaaactttattttgacaaaaaatcaattcagggtcctatttgtactattttagaaaatacatggtctattttgtcatttaacaaaatacagggtccaattagtaacttttgtaaaacagagggtccaaaatggtatttactctttttttttttttaaacacaaaatcaaaaatttcaccaaccaaaaagtatgttttttttgtgtgtaatagaatactattttatttgagtaacgcaattattatatctagttattttttttttttgaatgggttattattttttaatgcaagtgtaactattgattacttcataatattggtatagattattaaactaaaacacaataaattaaaatagcatagtagaattgtaaataaatattacaattattgaagagaaaaaagcataacattcagttaaaatataacacacacattaaatattaactaaactatatttatttttagaattagtaaatttattccacaagtgttcaattaaaatgttttgaagtcaaatgtgaactgccttcatctttaattttttgtgtcgagcgaggaatcattgaaactaacagggctttgtcatcaacaaccgtctcaaattctggacttgggacctcgactcgttcttcaatagtttcattaacatcacatccatcctttgctactatatattgcacgatactatatgtagtacttgctcattccttaggagtgttggtcctaccataattgtaaatttagattgcaatactctaaatgtacattctacattttttgtacatgattcttgtttcattgcaaacaatttttccttcggaccactaggatcatgaatactttgaataagagtagactcccattatattcttttcctttaatgacgtaattagctagtggagcaataccttcagcaagattagcagaaagatgagatactttctcagcacattaatatcattattaaatatcggtagactaaaatatccatgtcatatccaaagatcacagttagctatacaagatcatagttgtcctcccctagttgttggacaattttcccattaacagattgttggaactttgatgaatattttaacaaaatatagaagtgtcttagtgtgtgtgaaataggactgtacatcagtcggtttgggtggtttatcctacatattttctaacccaatctaaagttcgggttgctaaaatttaagtgcaacccgcccatttaaaaaaaaattctataaaccgac

SEQ ID NO: 318632 - DNA, 619 bp, Cannabis indica
tcaactccgtcgtgtcatctttcgtttcacatgtaaaacattgatatccacgtcaccagggaaagtttttgagttaacatttgctcccaagtcaactttatacttgtgtagagttgacttaatgacatgaactgagctcatttatctaaaaactacaagatgggcatcaatttggacaatcttggacaattgtttttgttcttcaagcattctcaatagaattaggactttgaaatccctagttcttgtgtgaaagaattttcaaaaactaacaaagaaaaaggggaaaacttattatttttttacttatcttcttctttgaaaatttgaaattttccataatcttagcagcattaggaattgacgtaaccttttaaattcaaaatcctattcctattttactaggattttcgaatttaaagcataaagtagaacggaaaagatatagttttatcttttcttatcatttatcttttcctataaggcattgaatttaactctcaattgctctaggattaggagattgaactcacttataaataggagagctttcaatcaaatttcacacacttcccattcacatcgcccacaccaaagcctttagaaaagcctttggaat

SEQ ID NO: 318633 - DNA, 1137 bp, Cannabis indica
ctcaatcatagtgagtaagacggttgtaaccaaacctgaaggagagaaagagatccaggttcatatcttgataatgctctactacaaaaaggaatcaagggctagagatcttgaacaaaaggagtcattatattctgctaaaatcaatgtaagattttcttaaacccttatgtgtttatttttattatttaagagatattcatatttaggatgtttattcaacatacttgttagtaaatatagatcctggaaaatttttcacaacaactggccttagagccatagtcatgatctactttcatgaaatatggatgtaaaacgatgaatattatttttgtgttgatgtaaatgtgttcatgttggtttatgtgttttttcatgattgaatgtgttctatgaagtttttccacgaaaataaatttattttcgtaataaaaatattttatttggattccttgtgaaaaattaagcaattttagtttttatgtaactcgattcctataaaattaaaaagttatgaaagtttgaaattcgggtgcccatgcgtgtcgagcatggtgctcacacgcagtagatgcttcggataaggcccatacgcgcccgcatgtctgggatgcatcgtgtctaaagacacggaatgaacgccttcaaacacgcttgaggctgcattcatgccaggaggaccctgcatccgccaacgtttcccacacaagggaccttactgcagccccagtctgcacgaggatatggctgcttgcagactattttggctgcacgtgcagccttgctggcagccacacccctaatgcgaattttgaaggattttttcaatttttccaaactttcccaatttgaaaccctaaaattcaaaataaaatataattttaatatatttaaacttaaatatcaatttttaattaataatatttaatttttaatagattattattaatttttttttgatattttgaggtttaaatttaaaaattaattattctatttttttaattatcgtcagatttcaaaaatttattaatttctttactatttatatattatttaattataagattggatattttaatatcagccatattttaaattaaaagataattttatccttttgatttgaaatat

SEQ ID NO: 318634 - DNA, 861 bp, Cannabis indica
ctccctctccctctccctctccctctccctctccctctccctctctctctctctctccacttctacaatctgtacaagtttcttttattctttatttcactactccttccctccctcactcacaagtttctcctattctttatttcactactccctccctcacacatttctcttaaatttttatttcactattcctccctccctcacaaatctctcttattctttatttctgtccctgggctccccccctctctttttttaaaaaaacaaaatggccccactcattcaaggcatttgtcacaatctttaaaaattgcgaatttaagcctcgaggcttctttctttttctttcgtgaggcacgcattgaagtgtaaacctcaaatatttaattataataatattttaaaagcatctaacaatatcattgataattaatgtctaataaatatcaaacatagaaatatctcaaactcaaacataacatcaaacgtctaataaaacttagacattctgctaccctagaacaaatttcttttcagcaatgatggcatgatgaagcttcagctagaaaaaaggaaagagctggaaccgaagaaagcttcagcaggggaggaagcttcgacgctttttctttattttttccattttcttctctaatgatgccactgaaggttgagggtaatggctcaatttatttcaaaccctagctgatatgttttgagcgtttttaaaaaaaatatttatgttttatgcttttattgggctttatttaagttaaaacttcagggggccttctatgttaaaaacattaggggctgtttggcttcataacttaaaactgttttcagtttttaaaaaca

SEQ ID NO: 318635 - DNA, 747 bp, Cannabis indica
aaattgagattagttttatagaagttttattatatctgcaaacacacatttttaagtaatttgacatcatgataaataacttatacatatatgtgaatttttacaaatttataaattcttatacaagtttacaaatattaataaaaaaaacagtccatgatatttaaaattaataactttcaatataaagtaaaaaaaaaaaaaaaaacctaactaaacatgattgaagatataatgttttcttattaaaaaaagtaattattaacttatgttttacaaaattaaactaaatgatatcatgagcctgatatttattggacgattttagtgttagaattatattagaaatcagaccaaaattgttaaatataaattttagaattaagattgaaaattttggtctatatataaaagaaatcatcacaaataagatgaagtgacaacttataatcattttttttagctatttatctattttattaggattttagtaaatttgtgttttctttaatagttttgtcatatgttgaatcatatggcttcttaaaaagttttatttggtaaagtccaacataagttacaaattatatatagtggttatgttattggctataaataacatattcttgatttaatatggctataagttttctttttgttggtgtgggtgattgaattaataccttaatcttgcccaatatatatatattttttttaaaaaaattgagttatatacatatatttttt

SEQ ID NO: 318636 - DNA, 993 bp, Cannabis indica
ttgatcacttgctttagtttcagcttcattttttgaaaatgaaatggaaacgatacccagaagaaaattaatgactaattcaaccaaaaaaaaaaaaatcaaaagaacagcacaaaaacgatcacaaagatgaaaaatcacaaacccacaatacacagaagcataaaagccacgattttgaggcaaaaaactgttgaagttaccttctgaatggctccactcggagagactcggcaggcggtgacaggtgttggtagtagttggtagttgggggggcttggattgtgagagtggcagcggcgtggttcgtgactgagatataatcgaagttgagattgagcgggaaatggtgaacggccgaattggcgcctaaatgatggtgaataatgtttcaaaaggctgggctgggcccatatatacaaacctgaaattagtgggtcgtttttacggaatctattggaccggtccatgactttttttagggattatttcaaaaataattacaaaaatacaaatatacggaattataaatatttttacagtttttaagatttatttacataaaataattttttttaatgttttaattttattattttgttgttaatttttttctatttgtatattatttttataaggttttttttattattttggtgttatttttctgaatacaaatgtaaaaagaaattaaactgtgaaacgtttgctactttgattaatggccccggtccaggacattgttagtgaaaaattttcgtcatacgtggcagctttctatttgttgtagcattctgtgacctgaaaatccagtttattggtggcgggtaacgaaaacaaattatctccttttctttaaattgttgttagagagagaaagagaaagactagttatttatttatttattttggaaaggaagagaaagtgaagttgaatgggggatctttacgctttggactttgatggagttctttgtgatagctgtggagaga

SEQ ID NO: 318637 - DNA, 622 bp, Cannabis indica
ccaaacgccacctaaatgctaaagttttcactttattacttttaaaacttttttttttctattttggctaatacttttcaaaataaatattcttacaatcataataagaaataaacgtgtatacgatttactaatttcaaaattagaatttataaagtttcttatttataagagtacagttggagacaaaatctactcgcaaaaagagaaagtaaaatacacaagtagattatgcaggccagtgagaacacacaaataggggacaaaaccatcaaagttgatgcgcacagaattgcagcgtcagatcgcgacaatggctgccacatgacaaatttcacctttatatatatttttttgtttcttttaattgagttattgcccctttatatatttttttttttgttttcttttaattgagttattgccccttatttttggtccaacataaatatcttttatatgatcatactttcaaatagaattgttgtatgctcagtcttttcgttctatttaatgcttaaatggccttacaagaatactcatattttaaatagatgttaggctagaattagtctaagtttcgggtcgtattttcggttagttttcactctttgtttctagt

SEQ ID NO: 318638 - DNA, 1462 bp, Cannabis indica
cacgctaatggaaacagataggtttatgcttagctatttaacactgccaatatccttctagggatatgctttggagatggctactgacattcttgatgttatcccatctaaatccattcccaagacacatgtataattatggaatggacgcatgcctagtctgcgccattacggaatctaggggtgccccactcacgtcttacgaaagaaaggagggaaacaaaaaactaaattttgcatgtgtattggcaactataatgagattagtggtggataatttatagtccaaaagatgatagtgtttttctcaagaaatttttcttcacgggaagatcactatgtcaagaacttcaagccatgcagccacgtttctaggggaaatgctttcgaaattgaatcaaactaatgttcctttgtcttctacaccagtataagatgatcccacaccctcagttgaaccagtttaatttaagataattgaggaaactatcactaagggtcttgtttaagaagtcatagtacttcatcatagttggagagttttgaggaacctgattatgcccatactcgtcttcacaaagcggtcattgtaatatagtatgggcagtcatgtccacaaagagatatcctaatcaaaaagtaattaatagaactttaagcacaaaaagtaaataaattgttggtggagtttgagaaaatatcgatagtaaaattaaagtagacaaaattggtagaatatttcaaaaacaaaagtaataaggtttcaaaaatcacctatatgtttgactcctttatttgggttttgattcacacatataatacaattagattgctcatgtaacacattgaaacttaggcgcgctacaaagattttctaattaaagtgacaactttactaataaaaggggtttcctcaaaaattgtgtcaaattaaattttaatttaaactattaaacattataaacatatctatatatatttacataaaccgggatcccgtgtttaaacttttacactctttatcaaaatacttttacaacatgtcacacaatcactacgaaatatagccccactcgtttcaagaccgaacactcctggttgcaccgtcccgacatgtacaatcattctctaagctcggaactcactcctgttcagcttttgcttttcttttacctacacacaaaagtaatatcagtgagttaacaaactcagtaagaaaagcacacaacatatatttgttgggttttgtgccctaaataaaggccattacaatttaatatgattagttatcaatttaagagatttgaagtgatttatgttaacatgtatttttcatgcttatggtttaatatatgcacaaaatcagttaagtccataacatatattcattcacaattattgtaatgtcaacacaatggaatgtgattgtgattataatgattcaaaagactaagtccctgtt

SEQ ID NO: 318639 - DNA, 820 bp, Cannabis indica
ttacttattcttttcaagtatttgtcattataaacagatttgataacaacaaatctgggaagtataatcgacattattgttattactccaatgaattattagtaataataataagttgatatatataagtaatcagacggtatgtatttatagagagacacaaaattgtatcactggtaatattataaacgtataggcatgtattgatatcatcatcatcgttagtatatttaattaaagcttaacaacttattatatatgtatatacatgttatcaagattatttgtgtatttgtgaagatctataaattatacacacatgttatcattattatttgtgtaagcattaagatttataaattatacacagattcccaaaagccatagaagacttttactattaatacttatttaagtatactttaaaaggttttagtaatttagtcatgtctatataattttatgaggaggattgttagtgggtattagtggtgtaacaccttttatacgtgtcctcttgtaattggttagcgatactctataaaaattattatattaaattatatgggacgtgatatataattgcaccaataacgatattgacacgtaggaaggtgctagacaccaatagcatctcatattaaactatatgagaaatgctaaacaacaccagtagtgcttagcaccctcctacgtgttaatatcgttattggttcaattaagtattgggtcccatatagtttaatataataacttttagaaagtatcgttagtcaatcgaaacgcgacacatctacaaggtgctaggtaccactggtgc

SEQ ID NO: 318640 - DNA, 897 bp, Cannabis indica
aaagaagtcatccttgaactctttttgttgggaagtctcacagcaatcctgtgattgttggtatgagtttcgagatagtaaaaaccacctacacctcacttccttgcagagcagacccttactgagtaaaaacatagaatttctactggggttggactgctccagctcttatatgttcaaggctacaagctctatcctagagggttcactggtgctgaaaccatcatctcaaactaaatgttcagggggataacaactgaactcccccttgacaactaacctaatgcggtatccctgttcattcctaattctgcatgaccttaagaccttcccaacgtaaggtcctatagatctaattttggactcaattaactcagcctcaaatgtcatagtaggatcctaaggagtctttgatttatgagctttttgagatataatttcaaaatctaagtcacctggtgaaaaagcagcagtgactggaggtaaaaatattgtcttcactaagggagtatcagttaatttagaaggttcaggccaagctgcttctagcaaatagtggcacctacccttaattatctcttgtaagaatgacatataatgacaagatgtatcatcttggctagttttaacaaggtggtgcctaattatcacatcaattatttcaagaatggtttgaggtatatgagttttgggtctaaattttatgtcaaaaatttgagaacaaattgattctaaagattctaggattgtgatttctgggataaattgggacataattatgactgataatatcccaatttctagaaaaatagaacacaaataaaacccaaaaatctacaaatcgtataatctaaaattttctagccctacagttattcagacaaacaaaatcaaaat

SEQ ID NO: 318641 - DNA, 1885 bp, Cannabis indica
ttggagcgagaagtcgcgacagccaaggttgcacaacgttttctcaaaatcaactgaaactattaagcaaatcctactaacttatggggctgcatgcctcgggttagaagattaactttgaaaagtttgctatcacttttaatctgaataagcaacaagtggattgagatggggttttacacgtattgggtttgacgtacatttgtacctactcatagtaagtatatgggattggctatggtggttggtagaaacaaaaagtggatgtttgaggggatctgttagaaggtcaggaagcatgtttgaggatggaaactgagtttcttttctgctggtggagggaggttcttattaaatcgattcttcaagctattccatcttatatgatgagtgtctttaagcatccagtggaaacttgtgaataattgaagtctattgtcagacagttctggtggggttcgaatggtgataaaaggaagattctttaagtgaaatgggaagaagtgtgtcagcctaaggagatgggcgatcttgggttttgagatttttacctttttaatcaagctctcttttggctaaataagtgtggagattacttctatacccagaatcattacctgccaagattttgaaatataattattttccaaatcgttctatcctaaaagccactgaaaaggatggttcatctcatctttggtcaagttggttttggggattaaatctgcttaaatgtagtattgatggcacgcaagtttgggcattcaaagacccatggatcccacatccgaggtcttttcagtcgatcacgaggagggctaatgatgatcgttgggtgagtaaatttatccttccatctggtatgtgggatgtagggaaacttacacatgtatttctgaccatggatgtggacattattatgtctattccattagcaaggtgagagacagaggatggttggtgctgacactatgatcaagatgggatttatagtattaagagtggttattcattggcgtggtcgcttcaggctaatgagggagtatcaggctcaacccaactggttcattggtggaagggcgtatggaatcttgctatgccaccaaaggtgaaagtttttgtctggcatatgttccatttggcgttgcgagtagctacacaactttatctcacgaaaggtttaggtacctctttgttgttcacgatgcagagaagaatttgaaactccggaacatgctttattttactactttggcttgattccaatatggcatcgattgggggtatggtcggtccttcattggtgtgtccatggaccgatgtcaaaaattctcttttttctatttgaaaagttatttcgagaggcttttgaattaatgatggttactttatggtgcctgttgtatgatcaacactcagtgttatttggtaatatgaagtcaaagttagatattgttccaaatttaaaccatactcacttgttggaattcaaagagcatgtttggcagagtcttcagctgggactgtgcatcctaaaccaagttggccagcaacctactcggtggttgccaccaccttctgagtcctttgctcttgcaagtgatgcttcagtggttcttgggaggagctctatcgggctgggtggagtgatacgggatgctgcgagtgtgatttggctggtttggtcaaatggtgtgttaggtaatttttcgttaatgtggcagaactacttgcaattagactagggttgactcttgcacatcaatttagtttcagtatctccattattaatagtgattctattgtggataatggttggattcataatcctagggatgagcaacgatcgattttttacacaaaaaaaaattcaaaattcagtttt

SEQ ID NO: 318642 - DNA, 999 bp, Cannabis indica
tgaaatgtggcacatgccaccctgtcattttcggtaactcccatgaaattcaatattctttcaatcgcagtcaaccactgttcatccttaagtacaccaggacctcccaaaaatattggaggtgcttgcttcctgaacctctcatataagtgctccataaggttgccagcaacatgttgttccgctggcaccgcaggaacagcagcagtagctggttgcaagtgaggctttataggagcatcccgttgtctgagccttcaaatctcttcatcttgttgagtaattttggcttgcatctcagcaaacctttgctcccaatcaaacaaagactgaggtggattctcttgaccacccctaagagcacgaccgcggcctctaccgcgtccatgagggttttggggatttctaccacaccaaaaccctccggtctcaaccatttcaccctgccttctgacgtttttctgggcatccattatttaggacttagcctgcgaacccacaaggcatgtaggttagacagtggtcaaagtattttcaagactgcatttaaggttttagcaacaatttacacatatatgtaatacatcttaaacagtttgcaaaaagtaaagcttacagtatcgtgagttgcgatcgacactagccttgattgtacatatcttgacggtcttcagtgaacagcctggtggctctgataccaaactgtaacgcccgtatttgaaaacttgcttaaccaaaattaatcttataataatatatttatataaccttatgggtcgggatcctgagtttcaaaacacagttaaaattacatttactaatataaaatttcataataatattttttttttacaaacgacaggtaactgtaaaatagaactcaaaatgttgaaagacggaaaccctctaggttgcattgtcgcgatatgtacaatcactgccaagctccaactcactgtttctccagcttagcttttcctttacctacacaaggtagca

SEQ ID NO: 318643 - DNA, 2261 bp, Cannabis indica
aagggagtatgcttcctccattacactatccaatggagttttgttgcttgtgtccttttgggtattcaccatggtcagtaaacttccctcatctctcaatgaaagcactaaaatatttattgagattttcaaacatcgattaattatagcttaaggaaaatgaaaaacaataaataatagacaaatagttttttacgtagtttgggcgttaataatccctagtccacgagtatattgaattagccttatcgacaagtatttgagtattacaagtgtttacaatgataactctgtattccattttgtttctcttatagaaaatggaaactctctagaaattttggcagaatttttgtaaataagaaaaatgttcatcctttgtacatgaaaaataggggtatttataggcacatgcgtgggtgagggcatacccttcaccaacctagggttccgtactcaacacgttttctttagctagtgattacaacctgccaatctgaccatcagtggctagtgaacctccaaatcgtgcggtgcatagctgtgacatccaaatttgtaggacttactacacttgtcgccaaaaggtttcaccttgaaaagttagtgtataagcaaactattgggcaaaaaggagctatagagcacatacgcgcactaccaaggtatgacgcaggggacaagatctaatttggtgtcagaagatatgtaacagtcgggtttagctccagattaggtattattgagttccttgaaggtttgtctaagaccttcctagaccaactgattcgctaccatcctggagcgtgtgcaactttcgtttccttccctaaaataacagggttcgtttccccaagttttatagtgtcttccataaccctagtaagaggaagacataaaataacaacatgtcatccgacgtggcacccttccgtgattgccacgtgcaaatcatccgacaatagagataacaaaaacacaaggtacctaacttgtatttagataaaacacagggtaccaaatgtgtagacacccttcttgtaaccacctgttacacccaaaattcggctaccatctcagtggaggacacatgtcaagataaagagaatatggatcgatgaaatcacttttaatggaataactcgttaattgtgtaggtagcaaagtatatttgcaactcgctgactgtaaggtcttatgcgaggaaaagatatacaaactgttgctcagtatattaatgagaaactatatgtcattggatgtataaggcgagacatcgactccgttacatctgggaagacgaaagcgacgcatatcgactgtgtaaaatgcactaactaattacgacggttgagtggactcgagacataataagcgagatgcctatcacgctataggaaggcccattcctgtaaccttcaccagttaacttcagacatctgtcagtaagacttacaatcttgacgagttagaagctaacattcaaatgagcctcgagaaactctctgttaataagaactgcgattgttacaaatgaagcgttaagttttcaaacaaagaagcaacaaggcgtatattgtcgaccttggaaggataagaaaaaaggctccagctcgctatcacggccactggaaccaagctcttgtcgagacattccagaacgcaacaattaaagagatgttaaaacacgatcattttgacccagtaaaagctaaatagtggcaagtaagatcaaaaaaaggaggaaaaaaattatacgaaaaatgccctgaaaaactatcagaaatctaataaaattgactcgtggactatgcagaattttaactgcgaaaccgcgtaaaaaatcctttgcgttcattttttttattttacagcttttattttttctatgtgagattgtcacttttaggctcaaatttagttaacgagaatctgcgttaacaccaccatattgagagtaatagaaaattttaattttttctctctactttgagatagccacttgagtttatatatttcatatttttcttcatcttagttctgagtttgaagtggagtttgattttctagctagcaagttagttgactagttctcatcgtcaacaaacatacaatcaattttagttattagtttataatttattttcattaatattcaaaataataatactatatctttatatattaaaagtgtctatctaacggcaattcttggtttaacgattcttgttttaacgattcttttttttatttagccttac

SEQ ID NO: 318644 - DNA, 937 bp, Cannabis indica
gagtttatcagacacttagagttcaagatcagtttctagttgggcaacttaggttttcagcctaaggttaaggtctttatataggagacctaaaactttaagtttacaattcaaatcccttagtatttgtataatttgttagatatttacaaaagaccaaagtgcccttgattatagatattattcagccattctattggcttttagggcccaattcacagcccacagttgtcttccacgtgtagaagtatctaggaaagcctacagtgcactccttggtcggccaggcccctgtggaggccaggctggccgaccatggaaatgtcccaaggccggccggccatggagctgtcccaaggccggccggccatagggtcggccagctcttgagagggagcttgtctgtcacttaatgtccgtttgagtgttggggtcttcgtttactgccacgtggcattaatcttgtccatgtaagcatgccacgtcatgagaataaaaaatgggataacaagatgttataatgttacactgtcattatgtgaaagtttaaacttttgtattttggtggtggatagctaatgtggtcattccaagaaactaattaaaaccctctctaataagttactttaggggtgttcataaaatagtcgatccaattcaattcgcacgatcccatccaattcaacccgcaaagtacgaatattcgtacttgtgcggattggattggattgaaaaattcaaaatctgcacttgtacgaattggatattgattgacatgtaaaagtaaccgatccaatccaatccatacatatttaaaaaaattttaaaaaatttatatatacaattagcattttaatatgaaaaaaatagtaatttaaaatctaatacatataatacaattatatttcaaaacataatagatcaaatttatattcta

SEQ ID NO: 318645 - DNA, 1217 bp, Cannabis indica
tcacaattaatctaagagagattgatattaatttgttgttttcttctttttaaattaaagcaaatgagaaatgttggtctaactcaaagtgaaatttgttgatggaatctgatttttgaaagtgagatcctaattaacaacaaccccattatatatttatatattttgacaaacaaaaacatatattttcaacaccaaaacaagtattatttttccttgttatatatgtagagttatttttctttgttgatcagtgagaggctagctatatatatatatatatatccatgtgtgacaagctaatatgacagtgttttggattattgtatattaattcgaattaatacatataattacaatgctccattagtattaataatgatcagagaataaacgtgattaataatatgagtacatagataatctctctcaaattgtcatgaaacaactagctagaaggtttaatttaattgtttatatatatgttttaggtttaaaatatatatattgtacaagtcttaaacatatatatatatatatatgacctcatcaagtaatgattgcatcataagggaatcattattaattaatgcttctgaaattgaaagagcttcgtcatatatggtccccacattcacacacaacacatcttattgctacccttattacttactatatatactcttcttttagtcttttttactgaatacttctgcctcttacccttttctttttattattaatttatatcctaattttaatttcaacttgctctttgatattcctgttattctaatttttttttttaacaattcatgatcatcgcccatagtttatgtgaattataattaatcactatgatctgttgttgttgacttagtagtaaggcctcctattactgcctcatcaggtatgtacttaccctaaaaccagtgagctttccaaactcgattcatctcttcaatggggagatttttggtctctggcaagaagaagtagatgaacacagtcatgatgatcacaaacccagcaaagaagaagaaaaggccaaacttcatgtggcaaagcatggataagaagacttgagctattatgaaggtgaagaacatgttgactgagacatttatggcttgagctgctgatctaatctctaatggacatatctcacttggtactagccaacccaatggaccccatgaccatgcaaatgctgctac

SEQ ID NO: 318646 - DNA, 2125 bp, Cannabis indica
atcttaaagtgacaggagcaaaattggtacaatgtttaaaaaaagaggtaaaaatgatagattttaaaaaagaaggtaaaaataaaagaggacaatataaaaagggtatagagtgtaatttcctcttaggggtatcaatatccatgatgtgaaaaagtgtggaacctctaacgataaacgaagacaacaatagctacactatggtaccgtcggtaccataattaccactatcacaaggattgttaaccaataaaaattagttagagattgttttagttactttgttagcttgtgtaacgaactttctgttatttatatttcttttggttcttgtaatagcatctctttaaataaacaatgaagctcacagttgtgagttaagcttttttagactaatctaaagtttctacctgttcattctctttgtttcttccatgctcttcttcttggtttttaccaattcaaagtttagctagttgagcctacatggcatctgtcactttaatggagtcgtcgattcctgcttctgatcttgcggcatcaatagacaaagcaattgttgtggaaacatccttttcattttcgattctagcttcctcaatctggaacacgttctcaagtgctttatcctcctccctcaagatcaaactagaccgagtaaactttctctcgtggaagtcccaagtagttcccactgttattggacatgaattggatgaaatcttgttcaatggtgtctttcacgttcggaccttagtcacgggtgaggtaaatatgcctacttgtaatggaagaaacgtgatcaacttctcctttcttggctctgatcgtccatgactgaaggagttctagcctcgattgccaatcatcacacctcatttgtcgtttgaagagctcttgaacaaaaattctcaagtcgatcccgcgcgcgattactccaactcaaaggtcaattttctcatgttcaaaaaggcaatctttttatttctgactatcttgacaaattttagtctcttatcaatgctcttgatgttgctggatcatctcttgcattacttctcgctcttgttgttccagctcttgaatggtcttggtcctaactttaatcccattgtctctggcattactgctcgtagtgactccttgtttcttgaagaagttcaagccttgcttatgtcttatgaacgtctcttggagcatcacaacaatatgatagatctttcgttaaagatgcaaagaaaatcttgcttttggatcaagatcaggcaattctcgctttgcttcaccacctgcttgtggaaataccaatgaattccacttcaagactctctggcaaaggtgattctagaagttacataccaccaaagctcgtttaaatatgtaagctatgccttaaatttggtcaccttgaaactgtttgtcactacaagtttgacaaaaattgaagccagtcactgcaccccctcgagcccatctcattgaattggatatggactttgatcctcaagtatatgcctctactattttacttaattttggtgatgataatgcttggtttggttatacaggagctactacttatgtcactaacggccataaaacttggagtccacaacaacttatactagatctaaaactcttgtagttggtgatggtaagcaacttcttataacacatataggatatacatttttaccatcctttaactcatatacattgcaattaaactacttccttcaagttcctactattaaaaagaacttagttagtgtctctaatctaacaatgaattgttttcttgaatttcacaaaaattattattttgtaaaggacaagtcaactaggaaagttctactcaaaggacaagttaaagatgacatttatgtactaggtgaatccaggaactcactgatgattcatcgaacaaatgtaccccatatacaaatgttaatagagaaaatgattctgtctattttccaaattgttctcgtcatgtttttatttcaacactgaatcaagacatcaatatttagcattataaactaggacatccaacccttgatgctttatgttgtaacgtccccgctttaagcctccattgggtccttacacccacagaatgaat

SEQ ID NO: 318647 - DNA, 805 bp, Cannabis indica
gtagtttgcattgcatacaaaggtagagataattcgacagacttgataagagttgctcgccctgctttagatagagtcttggccttcccaccatgcaatttcgtagtcaggttattcagaataaagttaaagtctgcatccttttgtctagatctgaaaagaggaagcccgagataattaacgttatcctctggctttactattacacgatagcactagaactattattttgataataattaaactatatatagccccaaattttaattttgcaatttcatccaaacaaaaataaacttaaatttacttttttattttattttttattttagtatttaaaaagtaaaaaagaagaaacagttacttctcctattttgctctttgagtaaagagtaaaaaatatgtgaaaagatatggaaataaaggttagagccttggttcaatgtatatttcagcacaatagtaaaatgtttagataacttaaatctattttaaagttactgataatgtcgtttgaactaaaccatgcaacttccatagtggtgagaaatccttatatcagttctcaacatctacattcccaaaaacgacgattttctttgaaaaaaattcaccttgaaaatcaccattacagaataaatataaataatggatatatatatatgtaaaggagagacattaatacatgtcatttactcatttattgactattgtacagaacttttatcatgaaagctgcctaaacattcaacgtgttcaaggaaaaaagaaacaaaagggcaaagtacacttcagtgaaatctcc

SEQ ID NO: 318648 - DNA, 792 bp, Cannabis indica
ggatttttcatctgtattactaagctaaattatcatctagtaatgtgtcaactttttatcacttagcccccattttcaatttcattggacttctaaaatttaaagtatactagtgaacatatgcataggtgacagcatatttggtagtgttttcctttgtatatatgcttcctaatttctgattaggaaaaaaatgatccatttgaaaatatatcatgagattaggcacaagtgctgacatgggctgtaatttgaaggtttcacttatagttgtatctttgccctgatacaattacaatgtcatcagtgctgggttggcttgctcccataaataacaagcctggtgttaaaaaaatcccaacactagtgatattatcgcaattgcttcgtttgcctctcctctgtgtttctttctttgtctctactccctcttgttgctgcaacatctttagcttcacatattctaaccttaaagcagccaggtccctgagcattgagcaacatcattgccttctccttgaatatgccaaaactttgcattacgaaattctcataaaagattcttaatcaaagatatatataaaccccaaggacagaatattatttttacacatccaataataattttgtgacctatggtactaatcgtgaagtctaaatgaaggcataccccattttagaccatatgtaaatgtggcgagtctggactgctctgcttggccccacttgatttatttcttaaagccgatagtaatgtggcaaatataaaagaataattagcatttttgtcct

SEQ ID NO: 318649 - DNA, 960 bp, Cannabis indica
gaacaaaaaaaaaaaatagtgttctacgtaaggagaagagaatttgatgctttctctttacaaatatttatagattattatttttttatattatagtgatgaaactaatttatattaaaatatagggagttaaatgtgaatttaatttcttaaatttagcactttttttatctatatataaattagttttagggggtttaagtagtttttttaccctaaaattaaaagttttttaaaagatatttttttttaaaaaaaaataaaaatttaacttgatgattatttttttaatgtgaaacttgatggttaattagaatcatattattaagtgaacaaaatattgggggcatatatatgaagagatttaaagtttaaacctaaaaatcctcaacatttgacatggtggtaattttgatgttactgttattgaagctttaagtatcaaagaggctcttagttggattaaaagtatgaattggtaaaatattgagattgaatctgatagcatgatctctcttcaaggtattcgtggaaaccaattaatgtgttctacttttaagctaattttacacgattgccaatttttactcttatctttatcttttgtaaatttgtgttttattagacgatcagtaaattaagttgctcatgttgtggcaagaaattcttgatttctctctagtcgtagcattttcgagcacaatatttggactaatctaaaagcataaatgctaatattttaataagattgttgtttctttttttttttagtttaaaatactaatctctattaataattaattagtaatataaagacgtttttatattaaaaaaataaaatctgtattaataattaaaaattaaagtgttaagtgattgttcacaacatttatcataaatcctttaataattttttgtctatcatgagcaaataatagagatattgactataatactact

SEQ ID NO: 318650 - DNA, 1398 bp, Cannabis indica
ttttgagactctgttttgctgcttagttcggccaagggaaaaaaacttgtaatagtgttttgtaaatacttttgggatcccaactttcgtaacttttaaattataaggtttaaattattacaagttattttcattccgtttattaataaagtttaattttccgcgcttattttactagtaatcctgattaggggattagggtttcataagtttattgggtagcgtgcctaattatttaaggcattacagtatatatatattcttctcttgctatatatattatattacatgtgttgtaatattcttcttctacctttcatatatctatatatatgtgatatatatagtgtatatatatgtgtgtattataacatatatttaatcaatctcttttattgtccttgtattatttttactattgagatgtatatatcttgattttcttgtattgtaataatatctctaacagttgacattcaaactagggttttggtttctgagatcgtcttagcgtaaatgagtcaaactttatactaggacatgaattagacatgtcacaaacatattgaggcatcataaatagacttggagcaacttcaaaattgagcactcagagcaccagttggcccccaacgcccaggttgacatattgtcaaccttagacgcttccaatcatcaaactgaagaactatcctgagcactttcttcatcttcatccagaacaaggaaacaagtgctttcgggaaagaaacaaatgaacttggaggccagagtagggacctagtgcctaggttgacctaagcgctcggcctagtgcctaggttgatacttttttaacctaggccgtttccaaggagtttttctagaaagtcttctgggcgtattctctgttttcatcaaatattaagatacaagtgtttctgacaatcaaacaaagccatctggtggccataaactagacccagagcctagattgacatctggtgttgggcctatgttgatattttttttcaaccagggctgtttccaatcatttttctaaaaaagtgttatggctattttttctgccattataaataacaaagatacatgtaaatgcggggagaaaacgagaatctcgaagggctataaactaagcctagcacccaggtttactagcacccaggtttatctggtgttgagcccatcgcccagattgataatcaacctggtatcctagtttctgtcactcaaatacaaattttgctctggaaattctctccgtcattgtcaaaaatagggtaggagacctcgtcgtcaatttcaaagaccttggaagcatcaaacgacatctcgaaagctttaaaaagagtacccatagcccagcttgacgtatgacctagtgttggaaattatttt

SEQ ID NO: 318651 - DNA, 1065 bp, Cannabis indica
gtgattttagagttatcattctttaaattatgtgatatttttttaaaaaaataaaaaataaaaaaagcgcttgaaagaaaaatgtgagttattatatttgaaaaaaaaatagctattaaagaaaacatttgtttggtttaaaaaagtaaaaaagtaatttggggcaccaagccaattaaactcaatcactagcccttggccatttgtgatttggggcatagatttaattggtgaattgccaaaagaaaaaggaggagtaaagtatgtcgtagtcgttgtggactacttcacaaagtgggtcgaggataaggctctcgcagccataacagctttaaaattatgagagttttactgcagtgctatcatctgtgggtttggcgtcccttacaaactaaattctgacaatggtaagggataattagcaaggggacgcacatagaaaggcgaggggcactcagtcctctaaaatagaaataaacatacatagagagagtattgctatgagcctatgagacactcatggtacatagtaccacgatttaataattttctataatatttattaaagtaaagcaagtgggatctgatattgggttgcaccaatagtaatattatacttcataacagtgctaggcaccatgcgtaccctttagtatttttcttatatatatgtattttcttataatatatttttaattaaaagttgtatttatggtgagcatgcccattaattgatttgtgagtatgttgatatagattattaaagggaaatttgaatttctatgcttgcattaggggataatttttcccctaaatttaaaataggggatattggtaaaatgggataacattttcttaattcccacaatacccccccccccatttgaaacctgatgccctctctctctttcgcctctctttctctctttctctctttctctctcgctcggtgccgcacccacacacgcagaccacacacccacggcagaccacccacggccgaccggactacgtgacccacggccaaccgcccccctcaacccatatcacccacgccgaccgccc

SEQ ID NO: 318652 - DNA, 1487 bp, Cannabis indica
ctgtgttcgtatttttctcgatgaattcttaatacgttctcgatgggatctcgacaaaattgtctcaaggttagggataatctttctcgactggttcttgataggttctcgacacaaatgtcttaacatcagggaagacctttctcgatgggttatcgatacgttctcaaaaggttctcaacacgaatatcccaaggtcagggaggacctttctcgaaggcttttcaataggttctcaattatttttctaaaatgggaaatgattttacatttctaactattcttgacatgttacctttgtgttctcgattatttgtcaatggttttttgatggtgtgtatatagttgtattttcaatcttctgacgtgttatcgactgtttctcaatgattgactgattattattttcaaagattattgttttcttttctacaggtttttgatgggttcttgattatttgtcgagagagtctccaaatattgtagttttttgttattctgattcagttgtccattgtttgtattcaattgtaggatgatttgtgtttctaattgtattgtatgatgatgcttgtgtttctctttctatcttattctactgtaaatgttacattttatatttaattatttatcaattaagctttttttcttaattagtatatttttgcttcatattgtactgaattaatcttttaaattggcaggtaatgctacttaatttttaattatcattgagtcaaagatgatttgaagattaccaaatgggtagctgaatctgtactatcaacgtgttatggatatgttatcagtaggttctcgatagttgaagcattgtaaaaaaaattatgaattttctttttttttcgttgattctcatttgaatatcaattaattgttgataggttatcgctaagatttaacctttggtggtatagtcaataagtttatctattatggcagtatagtcattaagtttagctattatcgacaagttatcgaaatgttctcgataggttctcgacatatgaagcattttaaaagaattgtgatttcattttttttaattattatcgcttgactatcgattgattatcgacgggttgtccatatgttatcgatatgagttagaatttatttttttttgttgtgtgggttatcattgttggattatcgattgaatctcaacatgtccttgtcatgttatagttttgaattattttgtaaaaaagttggaagtttggttattattgatagattatcgaggaagtcttcaatatgaataaatactcatcaactaatataattctttttttgatgttgttgatttttgaaggtatacttttcttaataaatactcatcaaacttttttcgattttatatacccaattaaatccctcaacactccgagcaccatcatacaatacaagtaaaaatacaaacgatcctgacattcaatacaaacaacaaacaattgaatcaaaataac

SEQ ID NO: 318653 - DNA, 1347 bp, Cannabis indica
ggattcttcacaatcttccacactatgattgagtactttacttgatatgagtgggcatgcactcttcactatggtttgaaaataatgaagaagaagagggagaaggattttgaaattctatagaaggagactctcaattttgttatctgacaaaatagtctgaattaggttatgagagatgtgatagaatgagagacatcttattccttttggggtttagggtttaaggctaatcaccttcaatcttctctggatgctttgttacttaaggaagaaattttttggaagcaaagatccagggccaattggctcaaggctggagataaaaaccctaagtaatttcataatagagcctccactaggaaaacgaacaattttatcaaggccattaccttggatgatattactgtcatttctaatctaacggatattactaatagcttttttcagttttattttgaactttttacttctaaaggtcttgacttagactctatcagtattgttctcagaggggtcacaaaacgcattaataatcaacaatatgagtatcttgctaaaccttttgagtttgttgaagtcaaaagagcccttttccaacttttaagggataaagcccctggtctcgatggcttaaaccccattttctatcagaagtattggtctattttaggtcaagatctctgtacagttgtgcttactatccttaataatggtgctaatcttaatccaatcaatgaaactcccttgttcgtatccctaagaaaaataatgcctccagagttcaagatttcagatctattagtctttgctccacaatctacaaagtagtgtctaaatccattgccaatagactgaaagaggttcttaatgatcttatttcccacaactaaggtgctttccttaacaatagaattatttttgataatattatcattgctaatgagattattaatgccataaatactagaaagaatggcaagcttggatgggcaaccctcaaactagacatggagagttaggcgtattcttactcatttaggtttccctataaccttatttcccttatttcaaattgtatttcctaggttactttttaaactatgcatcaataataatttttccactcctattcatccttccaggggcatcaggcagggggatcccctatctccctatttgtttctcctcttggctgaaggtctctctgctattatccattcaaaaactcaggatcatctattttaaggggatttctatctatcgttctactccttctatctcccatcttcttttcgcagatgacactgttgggttttatgccctaataaaactcatttcatataa

SEQ ID NO: 318654 - DNA, 1229 bp, Cannabis indica
tactcttaaatattataacagagcaaatgaaatgcaaatgtaaaataagtgtaagactcaaattattaccatcaatatattttacattaaagaagaagtgaataaattgcatggatcccacttggtcttggtggagaaatatatgcatttgttctaccaagtatattgtaattattttagcaaaaaagtatattgtaattatttcatcacttacaaatatgatgcaattctgaaaagtttgttccttgatcgtccactgtcttttaaaataaaataaataaggaatgttcctaataatactcatcaatcttaacttattaatttgttcaagataaatgatttaaatataatatcaacaaccctacaaaaaatatatcaatatagatacaaataatatgacaacgtggctaatctcttcattcaagacaaatacaacagacaagtgcactaaaactatttaaaggctcacttatttctttaggagggactcttattctaatgtgtgttatttttgttaaataatttgcgattaaagtgattcattttttttttcgaggagctctcatcctaaagctgattgtgctattagtagaaattttatcactgctaattaattatccttcttttgaaagacctttattgaataaaatttatctctttttaaaaatactatttaattacatataatcacaagtacatatatattaaaaaaaattaaattaatatataaaaattaagtccaaccaaactttcatgtttatgttgagttgagattagaagtggcttatccagacatcattatgtttatgttttacatttgctagtagaaaagtgagagcatctccaaagatgtttctctagttatacattagttaaaataaaataaagaaatgaaacttaaaaaaatgagctctaacaatataaaaaaatgactttctataatagaaaataatagggagctctctaaaagtaggaaatttcttatgttttgctaccacctttaatagtattttaattaaaatactattatttttttattattttataaatttaatttatatttgataaattcaaattataaaataataaaataattaaataggaactaaaatagaaagcacgatctattcaaaaaaaaaaaaaaaatagaaagcatgattgaagcaacaacaataaaaatgactctttattttcactttttagttattttagttaaaaaaaaatagaga

SEQ ID NO: 318655 - DNA, 811 bp, Cannabis indica
ttatctctgtattgcttgttctatataaataaagtatacaagagcctataagtttgtaagtttttacagctcatattcatcaatttcaactcttatgaattgccttatatatacaggagattatcattttatcccaatggagtacaattgtttacaaagtttattcatctaataattaaattgcttacaaaaagttattttatgtactttaaaaatccttttaattatagcgagtacaattgttttaaattatgtcccacaaaatagttttaaatatttttatatatatagttgagcaaattctagactaactattcccgaaaaacacattttaagtaaataaaaaatattttaaagcatcttcaattgtaacactttttaaaaatatcaaaactctctatataatatttaaaagataatattttatttttttatattattttttacactctttacttttaaaagtactccaataataaacaatcttcaaatttactactatgatgccaatcgttattatttaatgttttagttttattcaaaaaattgagtatgggatcaatattgatttttaatgtgacacctaaacatgcatctctaatggttagcatcataccacatcatcaagcactttctctaagagcatttctaatgagagacaacacccatagttgttaaaagtaacacatcatcccataatattggttgacaactttaaaagttgttaatgtaacctatagtggttgacaactctaaaagatttctctatagtcccacatcacattttaaatattaaattaataaagttttt

SEQ ID NO: 318656 - DNA, 679 bp, Cannabis indica
aattctgtaaaaatgcaaaaaaactgttttcaagtgtaaagtggaaaataggatgccaatattgttattatgttttataaaaaaaatttcaatacgacacataagaattcatattcaaatatttactcatacatagccaataaaaatagtaagttgcatttgagttgtcagcaactgttagtagcattaatttgctaacaaaatttcttatctgtttttggtggtgcagtgctttcattaggagagggagaggaatggctttgcattggagaactcagtgaattattaatttctttctcccattttacatttattagaaccattacaagtccaacattgtcaattctagaggtcatttttttctgggtctgttttttgactaatagattagcttttggattttatgtgtaagttctttctttctttttttttttgttttaatctttgatgtcataagacaactgagttctaaatgtgaggataaagtactgtgtttattaattaaatatccatgaaagtttctaaacctttttttttttattttatttatttattagtttttttaccaagaagaaaaagttaaactaggggtgttcatccgatccaatccgtacctttttggtcaaacaacatccaatctgcactaagtgcggatttcatattttggatccaatccgat

SEQ ID NO: 318657 - DNA, 782 bp, Cannabis indica
ctcgcagtgccttacccaccatatcaacataggtggtgttgtcatcagtagtgatccttaagtcatgtctgatcttcgcattcaacccgtccacgtatttctctttcttgctgaaactagttggcacgattcccgaggccaatctttccaaatggtcaaattaagtcgtgcattcagtaacactcatgttttctttctgattcaactaggtgaattcttttctttttgtgcttctgactacctcattgtaatacttagcattaaatagttcctggaacttttcccaggtcattgttctaacatcgtgagtcaaggacatcatgtcccaccacaccagagcctcttcttgagattgaaatgtgatataggccaccctatcattgctggtgatgcccataaagttcaagtttctagtaatcactgttaaccattgcttggctttcaggacatcaggacctcccaggaaaactggaggtgcctgcttacggaacctttcatacaggggttccattcggttcactgtagctacatgtcctgcctgtacatcagggacaggagctggtggtatttcaggtgcagggattgtaggagcactgttacgaaaattattaaataatacgcaagtgcacgcaatcaagtagtaaactcacgcaagtgaggtcgaaccatagggaattggattaattactactaaattatacttatgattctatttggaaactcaatactttttatgatttaaaaagaatgaaagtaaaccaagaaacttaaataacacaagt

SEQ ID NO: 318658 - DNA, 2881 bp, Cannabis indica
aataaaaaaaatatataacataactttttatatatttattattataatgaactaaattataacattatcatttataatagaatcttaacaaatcacaatacttcaaatatataatttaccaaacactctgttcaatttttttttccacagttttgctggagctgttttttctcacagcgcacacctacaactgcttttccacacatcacaactgtgtcaaactggccctaaattaacatcattaatatctttttcggcctataaaaaaaataatgcaattcgacttttaacaactggagagatacagaatacaactttgatattagaaaattcattaaagagcaagagaaagagattccaagtaatcatcatcaactatcattagagtccttttattctttgtcttctttattcttagttgtatgattatgaacatgattattgctgtgaatatgtttgtcattatgaactaaattcttttctagagtgtttatgaaactattttaaatgatgaaataaaatttttagattatttacatgttcactcttgctattacaattttgcattaattatcatcttgttaatgcttacactattaattagtataaagattttagattttacacttgagagaaataataaaatcagacttagaattgcgtaacataaaaaagatgtgaaattgaaatattccattaattctatgagtttcacttgaagtgaataatattgcttgattaattaatattgaatagagatatcttattagttaattaaactaattttatcatcacttaaaagagattgatagattacattagaatttttgaaacgacaaatcaatatatatatatataaaggaatgtttttaagagttgatgtggcagcctaattgtgattcttttctaatctctcatttttctaattttttgatttattcttattatttctaatttatttgtttaaacacattaatagattttaatgatcttaaatgtatttttgcaattttattttagagtaatgtaccgtattctcttttccatcattttcttttagaggtttatccctctccattcaattaaaaaaaatcaccatttttcatggcctcttctgctacacttggacgaaattaatcttggaaaaattacatccttcaggtgagatttctgtggtgtctgtattttggttcaaggaaatttttactattttcaaatcaatatgtataacctaatctctcttctcttaatttttttgatttattcttattttctctaatgatttattttcaatatcaagatttttattttgagcaagcaacataaatcatagattttttgtttttggatttgataatttctaatctgacacatggatggatgacaattgctaaaattgaatagaaagagagtgtgggagtgagaagatgagaagactatgtatattttacttcgtaatactgtctctgcttctttctccatcttcgtcttcttcaattttgtatcttgcacaaaattaataatctatataaatttctattcccaaatcagctgattcactaatatactaatattagtataatttttataatccatataaatttctagtatattatttatatattaaaaattaataaaaatagatttggtgtaatctatattttaacaccaaaaacatctccaacccaacactatagtggattttcccacttttcacttcaaccggctaaatagattttactgttttttttcttattcaaatttaaaaaaagtattgttttaaactttaatgtgtattcttttttctgttaataaactaataacaattcactttttcactacttaaaaaataaataataataagatgagaagagtagttcaattttttggtcgaaagagtataaatgcagttaggagaaaaagacatggaagacaagtgtgaagtgctcactttgatatgagagagtctcttttctttggtaattaggaagccttcactttcgggacaaaaaaaaactaataaaataaatgcattaagaaaataatattattgttacaaaaaaatattaaatattattattatttattaaaataaagaaaataaatgtattactttatgcaattaataataactttactttgtctttaacccctctttgtctcttcctttctctgcctaataagttcactagaagcagagggccggtttcattttatcagcttcaaccagaatcaaatggactaatttattttgaaattaaatgtataactttatcagtcattcaatttaatatcaaaactagcaatttcataccactagatgagttcgtatatttaaagaatattgttttattattttcactcaacattttcttcttacaaatttgtgttatttcttaagcattctttaaagtttatatcatgatgtattctttttttgaagacttgaagaataacaatgaaagttggatcataagaattagactttgtaggatgtgggagtctactaacagtaagaaagatgatgaattaattcgtgtggacatgatttttattgatgatatggcatgtacaaatttatttatctaattatttatttaatttattttatattattgtcacaccattttattattatgattattgaattaattataattttctaattttgcagttttgttaattaatatttattattattaattaaaagaaaataacaaaataaattataattactttataattaataatagtattagtaactaaaaatattataaaggaagagtgaaaactcaataatctattatatatagttctctcatataaagaaggtgtgacaatgcacattctatttagaaagagttgtaattatccaattttg

SEQ ID NO: 318659 - DNA, 1068 bp, Cannabis indica
cgatgcggaagacaacaccagccatccttcatacaacaaccgctcatgatgcaacgtgaaacctgtaacggattttgcttgctctaaatcactcttaattctagataggaagacatccgtatcaatctcccgcgacaaacatcccaaccaagccaagccgtagaattcaacaaagaacatttagcaagagggaagagagataatgcatctgctgcccgattagtgtgccctgcccgatactgaatttcgaaatcatagcccaataacttcaccagccaattttgatgttccggggtgactaatcattgctccagcaaaaattaaaggctttgtcggtctgtccagacaacaaaacaccggccaaggaggtagggccaccatttgagaacagcaagaaacatggccatgagttctttgtcataaatggactataggcgggcccgaggcttaagaacttggctgaaatatgctatcagttgaccttcttgcatcaacaccgcccctaatccataccctgaagtatcggtctccaccacaaacggtttggtgaagtccggaagagccaaaattgggaatgtggtcatggctgtgcgccacgtttcaaaggctgcggtagctttgtctgtccacccaaattggtcttttttgagctgatcggttaacgaccttgctatagtcccataatccttaacaaacttctggtagtaacccgtgaggtctaggaaaccccgcaactccttgattgttttaggcagcggccactcaagcatggccttgattttagaaggatccacagcaacaccttggcccgagataatgtgtttgagatactccacttgtcgctgcccaaagcaacattttttaagttagcaaaaaattgatgttgggtcagcgtttgtaacaccatttcaaggtccttgagatgtgtttgttcgtcgggactgtagacgaggatatcatcaaaaaacacaaccactcattttcgaaggtgaggtttgaaaatttcattcatctgagattgaaaagtggctggagcattagttaatcaatctacaacatagtttactt

SEQ ID NO: 318660 - DNA, 1526 bp, Cannabis indica
aattttactgtttcagtgattatatatgtgctaaaccatgctcccccagactttgtatatctccaaatcatgtttttcgaactttgatatgtactaaatcatgtcccataaactttcatccatgttagaattttttttatcaaaattggaccaaagtccttaaattcaacaatctcaatagtttaaggggcatttttaacgaccttaaaagttcaggaggcatgatttggtaaatgtcaaagttcagaggaaaaaaatcttaattagtcttatttttttttcatgaaatttgttgttacaactttattcttttctcattttctttttgactagtgatagttaaaatgataatttatgttttaaaagttaaataaatagttacattaatcatagaaataataaaattttatatttcaaagagggtatgataggtaatatataattaatatatgaatatcttttaattagtgcatgtcatgtcaataaaaaaatgaaaaattttatcattctattttaaaaaatgtgtcaaaaagataattatatgtatctacatctgcaaagtaacacacatactgttatacccgaaattcagttgtacttcaaaaagtgacacgtgtcaatctcatgcaatatgaaccatcagatataataacgattatgtcattaaatacaaaataaaataactcattaaatatagaattaatagagtatattcataactcgctgactgtgtagtcttaggcgagacaaggatacacaaactatcaattcatgtattgatgagaaactatcttgcatcgaaagacataatctcaagggaactacggacaatgcatagcgagacatctacctcactacatgtaaggaagtattgacgaggcgaatcggttgttgaaacacttagcgtataatccacattataataattaagtgtaacaacttgggagcatgtaggacatgattgtccagtctgtgaggccttatggtcaaagagcatttcttaagtttgctcaatacattggtgctcatgccattactggaagacatatgaatataccaagtcattattggtcatctatgtacaaagggagatgcctctagcgagatgctcttatcccacgtcagcatccactaccttgaagataagaatgataaacggttatgcagatttatagttctacacgtgttaaaatggaatgtggtcaaagcttacgtttcgtgaaaacagttatatgtaattcaaattcaaatataaataactgccaacctatattcctataaataggagtaaattctatagaaaaatgtacgaaaaatctttgagagagagatcacaaactgtaatcttgtatccagaaatatcttgaataagatagactcatggacaatgcagagttaactgcaattaaaactacgtaaaaaacttggtgtcattctcattattctacttattaaatttcttatatttgtgtttaattatgaaataggctcattaatcgttaacgaaaatctgcgttaatagtttg

SEQ ID NO: 318661 - DNA, 739 bp, Cannabis indica
taaaattaaaaaaatcgtaaaaatgtttaaaattttgtgaaactgtatttatatatatatttttttttatttttgtgtatttatgaaataatcctattaactttttatctttttaacatagtacaaataatatcatgtgatgaattttttgttaaagtaaagcataataataattaattttgttgtgttatgaattagttatatttttgtatttatttatattaaaaactgattttaatttgcctatatagatattaaaaaaaattaataaaaattaagttcagcttgttaatttatactgttttaaaaaaatacaaattttaaaatagtatttactcataattttttgtatgtatattattaaaatataataaactttttttttatttaaaaaatataataaactttgatagacggtaatagttctcatcaattcaaagtctatccaatgtatgggaaagcggattcaaataaaataatgtaataaatgagagaaaccatttctattgtcagaaatacaatttggagttacattattttttatatggaaacaaacaatatatattttcgtttctttttaaataaaatatttggagtgacattgaaccattatgataagtattaaaagcaaaagaatcaaatttatatataatgaataacttttttcttgtaatcctagtttagtgtcctcttgtaatcctagtttgttatttgtaatggaatctcggcttgttaaaaa

SEQ ID NO: 318662 - DNA, 1492 bp, Cannabis indica
tctgttgctggtttataccagcttttaatctgaattctattttattaaattgaactgtccaaagtaattacagctatatatagtgaaaaggaaaataggggagagttaggcaaactaactctagataagataatcaactcagctgcccaaactacagttaaaagaaccaaccgacttattaactaaagcaagaaagggaaaagaacagacaactaacacaaaagactaaagttacaaacagtaataacggtcatagctgtaagaaccgacttaataattctaatatcccccctcctctttcaagatggacggtatatgtcatggacggacatcttggaaatgtgagatgagtgtagtagaaggaagcggttttgtgaagatatcagctagttgaagagtgctatttactggtatgagtcgaatgctagagttcttgattttgtcacgtatgaagtggcaatcaagctctatgtgtttggtgcattcataaaatgtggggttgttggctttgtgtattgatgagcgattgtcgcaatatataaaagctggaccattttgaggaatttgaaagtcttgaaggagatattgcatccatgttatttcactatccgtggcagcaagggcacgatattcaatttcagttgaacttttggaaatggtgggttgcttcttggtgcgcaaagaaatgaggcagtctcctaagaagacacaaaaacctgtggtagagcgtcgagtagtggggcaagatgcccagtcagagttagaaaaacctcgtagatgcaatgtggaagatgtggagtataggagaccctggctcggactaactttgaggtatcgaattaggtggtgaaaatcttgtagatggggtgtacgaggcttggccatgaattggctgagattgtttacatcgtaggtgatgtcgggcctggacaaagtcaaatacagtaatctgccaattaattggcgatatggggaaagatcatcaaggggttcgctttgttcatcatcaagttttaatcttgggtccatgggtgttttggtaggttttctccctatgtatccagtgtcttcaagtagtttaatggtatacttctactgagataaaaagagaccttcaggggatcgggctatctcaaaaccgaggaagtattttaaagggccgagagcttataagttgaatctgtttttaagagactcttgtaactgatacaggagagacaagcttggtccagtgatgatgatatcatcaacgtaaacaaggagagcaataaaggattcatgtgatccttttgtaaacagagtataatcagcttgggattgatgaaaaccttcttcgattagagcatctgaaagtttgcgataccattgccttgaagactgtttaaggccgtatatggacttgtgcaatttgcaaataagtggagtactagattgagtggttgtggaaaaagtaagaccttaaggtagtgtcatgttgttgggttttatgccc

SEQ ID NO: 318663 - DNA, 1636 bp, Cannabis indica
tgccatgttttgaaacgaagactaggattaggctcccggtataaactagttaaccgccaaacagggaggtttggtattgatatctcaatatcaatatggctgtgagagtatcctagaagccgcacaccatcattgcatctccacaaaagtgcaagcccacctttgtgaccttggacctcaacacggtgggctccctcaaagcccaatttgatcctaagtctttcaataatatcacttttacacaaaagtttcacataaaaagataaagttgggtttcttttgaacaacaatgttctcaaggaatcgtagggcccgtgggttcccaagcccacgacaattccaacttaaagtactcatgacgattggtgggcctggacactagaacacaccatattcaagttttttgaacaagattcagcatggaccgaagcatcagcaggcccattacttctctcggcagcaaaacgtttccttttaagttaagcttgagtcaattcctcatcagcttgttgactatcataaagcataatccctttattcttagttttagattgagaaatatcaggggaagatattcccataaagatgggatcagttgacttaccaaaattggctcttgcattattgatgttcacaccagatgatgaatgagcagaagccttgcctgaccgtaggaatggtgaagtagcaaagttctggtgtcgacggggaagagctttcaagcctaaaccgtaaggcttgaggatcaggtgggctggtgtgtcaaaagtgcgagggtagaatctctcggagtgtcccattaaaccgcagatgaaacagaaagttgggacattttcatatcgaaacgtaacataaaatgagtcaccatcccgcttacgaaacttcatctttcgttttagaggaagatcaagagtaagcgttacacgaacccgaagatattccctccataccacagtaaagttgttcggatctgattcaataaaagttcccacataattcccagcatccgtggccaccttcatggtcatgaagccattttgcaaatcatggatttgtaaccataaatcaagcgtattaaggctaatggttcgagggttgtcaccatctttgagacgagttataaccaactgtttacgatcataggtctaaggactacccacaataacacgcttgatatctaactcatgataaaactgaaataaaaaccggttctgatcaagttgcttcgcatatatacctttgcctggtttctaaagatcagtcataagattctgaaagatacgaaagtcagagactttccctataagcagtcgcccaacgagacaccatttggtgtcaatagccaaatcatcttattcttcattctcttcataaaaagtctcctctgcctcttcctcctcaagttggatgtctttccaacattcttctatattattcatattgaaactactggatgccataagatatttgtatacacgaactggacagaataaaacaaaagacagtcaaacagaaactcaaaaagagagagacatgacaaaactctcaaaaaagagagactatattaagtccccttaaactagaaaacaaaacacaaatattttggaaaatattagtcaaacaaactatactctaa

SEQ ID NO: 318664 - DNA, 779 bp, Cannabis indica
tttttttctttcttttttctcaagaaaaactcataaaagtaaaataactttgataactaggttacacaaaagtggaagattttttactatttatagaaattcattctctatcttaaggaggacatggagagatacttcagtaaaattagacaataaaattttaatatctaattttttttttgctaatttatgactacacataattttttgatgtaataattacgctttttttgtgctcatttacgttcctgaaagtgtctacaatacatttgatattttctttagacaatattcgtcttatagaactaaaacaagttatactagttgtacaaaactagaattgaagataaaaactaaccaacctcactatacaaaaccaagaaaacaaactatattgaccaaataaaagcaaacagaccatattcgattgtagtagcaatacaaaaattttacaataataaaatatttaaataatttaaattattttatattattctcaataagaaattttcataaataatagttatatagacaataattattatgattttttaaagaaaaattaataaaatagaatggcatttactatttaacataaaaaaaatcttaaattatgtttattttgttaaaggtaaaaagttataacctattagagttatgctattcgtcccgatccaggtggcctgaactttctctcgagccacgtgtcagccgtgtgtatcatgcaacaaaaattttataattgttataaaataatataaaataatataaagtagatg

SEQ ID NO: 318665 - DNA, 1043 bp, Cannabis indica
tttgaattagttgttttagtttataaacaactagaaaactaagccgcgcgaagcgcggtattattcaatttttgtaatttttataaattttaatcctttttttgtactgattattttatataatcaaaatataacatttgatgtgtatattataagcaaagtatcggtttaaaagttagcaatataaatttgttatttccaaaatatgtaaaaagaaaataattttgtaaaaaatattaaaaattaaaaaataataaaaaaattgtatatatttttataacaaaataaataaataaaaattgatttaaaatattatttagacattttttcttttaacttcataaaaaaaataattactaaaataatttaattattaatggtaaattttttttattttgactaataaactaataataaataataaaattattattaatatactattttttctattgaaagaaattattattgagtgtttaatattattattattgtatttttgtcttttgatggatataaaaatatatttgatataaaaagttaattataacaatatatatgaaaaaactccctataaaaataagattgattttattctcaattttttgctcacaaaaaaaaaaataataattgaagctcctttatatagaaagccaccagtatttaaagtccatatgatcaattaattgaaaaaatccattaagtatttaatgtaatataatttgtaaatatatttacatataaatgcatattaaaagtcaccaatctatatataattatgtgtgtgctcaatttataaagaaatagaagagataaaattattggagggaaagaaatatattgttgaaaaataggataaaagaaaatttgtatatttattttatttattattttattcatattattaattttaggctaattagcaattcccctcccccccctccctgaattttgacatatattaaattatactccttgaactttttttgccgttaaaaattccccctaaactattgagattgttaaatttaaggacttttgtc

SEQ ID NO: 318666 - DNA, 956 bp, Cannabis indica
ttattcaaatttttgagtatgtttttttagggcctctcgcttaagagtttttttgtcccccatctttgatcctgactgccactatttataattgcattgtggcagttaattacaaagctgaccaaaattcatttacaaccattatccctaaaattgtgggatttgattacaaatcaagccaaataaatgaggttcttacatagttgtgaatattgcacctctattgggtcgagatgaacgcataattaaagatatacggtaagccgtatctcatagggatgccttccttcggagggagccaagttcactttgatagcgagcagctgcttgtcattttagcttcttgagactaatattatctttctgataactatacttctcttgcattgagaagatcttcctgcaagaaaaacacctcgttgtctgctgtcttggcttgtcaaactatttacgcttagtttgtatatcgtataatatacgctaagtatttttagtgttgtcgctttctctttcacgcagcgtggttgaggcctcgtcatgaacatgtgcacccacatgctttctcgtcaatacataagttagcagtttgtatgttactgtctcgcaaatgactattcagccaaccgggttataaacatactctaccaattatatttctaacgagttgttccatgctaggcatacttgccgtttgcatgtttgagcctttcccagctcgacacgtgttctcttctgatgtgcttgctgaacttcgagtataacaattgccccttaaaaagttctttttaattaaaaagagctttttaatgattataaagggtattttcgtcatgcttttttgtttttgaaaagacgcattccctctgattttggtggttgtgcagtttcgaggtacaccagaataaaatgaccatcttttccaatttcacttcaaatcgcgtccattggatcaaatc

SEQ ID NO: 318667 - DNA, 838 bp, Cannabis indica
gttttcctcaaaatgaccctttatgaaatgacgcatagattgcaaaaaagtaagtctctagggtcttgatcgacaacgaaggttttgtcaacattttgttcaagttcgcattcaaagttgttatacacattttcgtaagcatgacacgtggactttaatcaaggaaagccagggagtcattagctgcccaactttcctgactgatgttccgggaagacaaaggctctaacttcgtgagaaaattatatgtaaaggggagttccccgactgccagctacatggagggtatctgtgagccaagccctattccaagaactaaagccatcgactcccacagcaagaatgggttttcccaaaagggccaatacacttcgagacacactaaaccagggtacgcctttagcctgtagaagcctcacctaaatgtgtcagcctatggacctagtgactaggctttttcgggtacaatgtcagaggttgtctcccacgataccctatcgcacagagcatgcatgtccttgtgtatttgagaaaatgattcaacagctagggataaagggaaattcaaataggagaagccctgaggtgacacgcgtccgaggcctaactcgtacgacttgatgcccttaagtgccatatgggaaatataccacctactaatccaatgatcggatttcgccccaacaatgatccatccaaggtagcacatacaaagaagttggcttataaataccccagaaaaagcgcaagaggaggaagttctcctttgaaaaaaggcccattcttaatcatcccaagcaaacacatttttgtaaccctactatcaactccagaatat

SEQ ID NO: 318668 - DNA, 854 bp, Cannabis indica
aaaaaataaatattagcttataaaacttacattttttctccatatgtcaaatagaaaagtcatagaccttggttttctgcttgtgaaatttaacgaatttggatgacgtgtggggtaagatttgaggagaacactaacaaatgtaaaagtaagaaaagaaagcgctttcccaataaaattcattgggaagaagatattagaattttgtagattacgttttgtcaaaattagttaaagcttcaatcaccgcagcgtacactttttgattaattttttttggtattttagaattcgagcaatttttagaaactacaaaccacttaatctaaatattttttaagcacaatttgttgtcttatgtcttatacacctaaattatagatttcatccaattttgagacgtctggaaagatatacgagtaggggtgtttcatctgatttaatctacattattttgttcataatgcatccgaccaccgcattgtaccatttttataatatcaaagttttgaattcgagcaatatttagaaataataaatcacctaatcttaagattctttgagcacaaaatttgttttctatgtcttatgcacgtaaataaaagaattatctactttcgagaggtgtagagggagatacaagcaaaatgatgcctgatattggaatatgacttaaaaaattgtgagtaatagtccataaaatttgtaaaaaaattttagttttgaaaaaattattcgttcctatactaaatgaagcattttcacggtaaaaatcattggaaaagagatataagagttttgtagattaattttggaataattatataagacacattttttgtaaaataattaca

SEQ ID NO: 318669 - DNA, 583 bp, Cannabis indica
ttttttaaaaaaatgacatttactaatatagtttccaaatttagagtcattttacatctcaaccctaagtcaattgcttcctttgatttataatcattcagcaatagtattttattttatttttttaaaacactagtatttaattatgtgtagtatttaagagatttataaacaatgtaaagtgtttatttattaattgaagtcagtaattattaccgttatttttagaaactatataaataatcttttttaagttaaatttttgtaatacatactctatataattataaaaataaaaattatatttattaattattgcaaacaaagaaaatgtaataactttaaaagaaaaagaatatattaaaaagtatgataaaaataaatgtattaaaaagaaaaaaaatatattaaaatttgaaatgtaataaatctgaatgaaatgaaaaaaagtgggataaaaaaaactgagataaaaaggtactctcttatactaggataaaaagtaactttttaatcccggttattatttatactttttattaggggtgttcgtggtgcgggtggtgcggtttttgaccatttt

SEQ ID NO: 318670 - DNA, 435 bp, Cannabis indica
ttttttaaaaactacacctataaattactctccaattgtatgcttttaatatttgtattggattaaaatctttaatcaatatttatggagttatttttaattatcacaaaaaagaaaaccctaaatatttttattctctacaggaaagacaaaaagtattttatttccatggaagagagataaacctaaagagagaaagaaaaatggggggtttagagagagaaagagatgaaacgccattggaaaagggtacaataatcactgcttgctcaaggaagaagaagaaagattcaattcaattaagatattacattggctaattaggatttttgccccctgaactttgacatgtaccaaatcatgccccctgaacttttaaggccattgaaaatgccccctgaactattgagattgttggatttaagaacttttgtc

SEQ ID NO: 318671 - DNA, 1365 bp, Cannabis indica
aggcaattggggtcccgccattcccagtgttttgttggggtattcaaattttcttccaactagatttgtgcgacccatttatttgggtggtttatttttgatccttttcttttacgttattattattatttttatataatataggcttatttatatttttcactaggctccgagaagaataacagagcagatctcccaattgcgcttttttttttttttttacctcttccaattgggcatctacaaaaatctttttcggatatattttcttcactagtttttttggggtccgcccctcgattgtggaggggtctccagggatggtgcttgggctttgccataatgcaggctgcaaagtacgcaagtgtatctttattgattatattcagcagcgaagtgttatcttacaaaatgcaccttgtgtgagtaagggtactttacggttgaataaaacaaccacgaaggccatattggtggtgagttagttgttttatttcattctgaaaggtccgttgtttttcggatttggttgttacattatttatgaatttacaacttcatttagattgtgttgtgtttggaaagtttccctataattgaaattggagtaacattggaagtgagtaaattttcggagtgtaattattgagtttaatatgtttgtttggttatgtaatagcaaaataattatgtaattggatctatctaaaaaaaaaaaaaaaaaataatgtagttggatgtaactgaaatgtctcaatactcttacttttttgtgacccctgagaatgagtattactaagtactgtaattattgaatgtagtaaacttctttcaaagtaaaattagagctagtaattatacaatttagattatattatattttaaaatacaggtgatgattagtaaaattctcccaacaatacttgttcacaagattgattgcacgaccctcttcccaactcagtcattccagatgagaaacttgttgaatttaggctttttattctcgaatatcgatctagaaaatttgtccaacaaggcccgacgttttcttaaagtgagattgatttagttgactctgaaagtgtgttagtatttgacaatctttgtgaagcagttagctcggacggcacccttagactatttaggagtgtttataaaatagttgatccaattcaatttgcacgattcgatccaatccaatctaaccgcaaagtgcggatattcgcacttctacggattggattaaattggaaaattcaaaatccgcacttgtgcggattagatgttaattgacatgtaaaagtaaccgatccaatccaaggcacacatatttataaacaaaaaaattaaaaaaattatata

SEQ ID NO: 318672 - DNA, 573 bp, Cannabis indica
gatttttgggagtgaggacgtgtggctggaagttgaggagaaagttgaatcttttattctccatcataaaagtggtcccattctatgtaagtttttttttttaataaaatatttgtaaaaaataaaaagctggagattattgggaagagagaaagagaggggcaggagaggagaaggtgacttagttttgttttgtactgctttagtttatttgatgtgaaagtaactaacctaggcaggtgatcacttgaagacctgaaagaattgaaagaaagtgaattagagaagtagacatctggtggtcaccaactgactattgacaactggattcttcttgttgctaagctatggggtggcttcacatcccaagtttaattataaattaatcattgtttataaaagataaatttgggttacatacttaaatgtgtaatatagaacgatagtaccataaagtataaataagtggtaaaaagttaaaatatagtttgtactctaatgatgtgccaaaaagtaatgtaaatttggcacatagtaaattttgtgttaaatttggcacaacatttactatga

SEQ ID NO: 318673 - DNA, 996 bp, Cannabis indica
aattgtgattatatgcttcaaatttatttagtccctacgatttattagtgcaactaaaatttaatactaatgtgataaatcaacgattagatttgcttacacttggataagtggaatgtcttatccaaaatattagaaaggtaaactagcatcaaatgtgtttatccaatttttccccaccctgacgtggcatatcaacatagtcaaaacaaaaggcacgtggaatacattctgtcaacaactggacatgtacactatgtgcagcttccaagtcaagaacaagacagaggtgcacaagtattgacaagaccttgacaggatgaccagtaggtcagacatcttataacctacagaagacaagtgtaagacagctcaccatgaatcgggaaggatagtgctgtacggttcatgaactctcaagatgtcacgattataagatagagtgaaacaagacaagtctttagaccctgctcagaccataggtagccgaccaaggaggtttgtctaactaaggaggtattttccaaccaaggaggcctggccgaccaaggaaggtgggtcggccaagctgaatagcaaagctgtacggataacccccaaagacaaggctgtaaagacatcctagatagcccccaaagatagggccgaccagccaaaacatgcattcaactcgcaataggctgaacaagtcgtggggtccacaacaagccttttagaagattcttaagatgacttaccattgcgagataggtccaatagcccatgaagatagggatattccctcattatattattcctatatattagggatttagttatcctttttgtatttcaaataaaagataaaaaagatgttgatatttctattttggagggatgactcttcctatttgaattaaaatatcttgtaagccctatactatataaagggcattagatcacatgaaaaggatgtcggttttgtgccctaaagaaaatccatttcaatataatcag

SEQ ID NO: 318674 - DNA, 1262 bp, Cannabis indica
agacaaggggaggtgaacaacctaacaaagctacagataaagttctggtcaactgtacccaaaggtactttccaggtaaattacattgtacaaggctaggtattagcgaggtaccgtctcaaatacatctacttagacaaatagtgagtcctaagttgtgcacttaattataatggactcactaccaagtcttatacagagttcctaagggaaccacacataagatcgcaattgtatattcctactaggccatcacgagaccctagccaaggtcaaaagaggacagaagactggctgtttgcttgaaccttggccttggccggctagggttcctaagcctaaaagggtcggccaggtcccataacccagcctagggccggccaggaatctcacttccaagcataagccggacagctcttagggtgcctcctattactggccaaaccccatggtgaacacccatggctggccaggtcttgaacaagacctccatggccaaccaaggtgtacgtaggatctaaacatgtttttcaagaaccaaaacacgttctttgtgttcttcgtgacttaaagaaccaagaatcacaatgaagttcaaaatcagaactcttttgtctagaaatcacactttatacatcctcagacaaccatgcgaatcaaaatatcaaaaagattacaatctaacgtgggaatcgaaaaaacattcaaagcgaaaaaaagattcatgaaatcatggtaaagtcaactaaatcaagtaaatagcaagaatataaagcttacccactacaagaaacctttgacgaagagaatgggaagcttagatcgttgaaataacgcaaaaatcttgggagatggagcaatgtgggcttcagcctctagagagaatgcggagcttttcaaagttacttttttagtgagagaatgaaaagtgaaagttgaagaggaattcccctccttaaggcttatatagcttctgtgggaccacttcttcacttgccacacagtgttcaactaaaaatcatgtggaagtacaatgcaattaacttactacaacatatgagatcaaacagtcaaaagcagtcatctcaaagactaaaaatgtagcgaaataaactcagctaaggctacatcagtctaactaagctagaaagtcctatccgcacagaggtccacacagggacttaggggcaaatgttttccaattttttcccaccttgcgtggcatgtctatgtggccaatatcagtgccacgtggtagtaca

SEQ ID NO: 318675 - DNA, 1589 bp, Cannabis indica
gttctttacttgattttgcttgttgaggttgttgatccctcggacgttccagcagacaatcttatccatctccaagaggaggtactccccctcctcttgccttgtcaattttatgaattttgtgcattccaatagagattgcatctgctccaatagtaacctcaattccttgctccgaaacaccatccaaagtagtgtaggaattatccagttgagtctcaacaactacctcttttcctctagatttacctatatccactgcaccagtattcatatcagacaccacttctttattccttgcttcagtattcacagcactatccacattagctttggatcctttaatcacccattgttgctcttttcctgtcttcttcttgcaatcagcagtagaatgcccaagtccctggcaatggtgacaaagtattggtttccattcataagtaatggaagcaaacacatcataaccatgctcatcttcaaacggtatacgctctggaaattcttgttgaatagcaacttcaataaggaccctcggttagctcaacttatttctttctttagtcattgcttcaacctgaaggggtgtaccaagctgcccaacaatcttaaaaagagatttctcacccccaatacttcaattcaagataaggtaattgaatccaaattggcactgatctgatatcttcatttttaaaattaatttcagggtcccaagccttcatcacaataggtcgactattaaagaacacatatcccccattaagtatttcatctcttatctcaactgtatcaaaccgaactagaaagaccacataggacagagatccaaccttgtcaactttccctttccacaccctcctaataaatccatcaatcacagataacaggggattggaacctagaacataaccaacaatagaggaactccagtaatgaacctcatcctcaatatcctctagagttattttaaccttactagaattacccgaattgttaaaggtattttctaagttcctcactatgtttccagatcgaaggatgggaggagtgataggattaccttgatttacactcacagcacagtttcgattagcctgaaggaagtaatcaaagtccttgctgatgtcttcttgtctcttgatagattgcagcaatgattttggtgatgataaagcttgaaaaagatcaacatcctcacgcacttgctctgttccatcatccccttcttcctcagaacactcaattggttcaacaccaatgatcgaatcaagtgtcttcgtcttatgaacatcggcagtagaggttggccctcgttaaatcttactaccattttgttcttgtaaaaaattttaaaaccaattgtttttataatatttctttttaattttcaaataactttatgatttttcactgattttctctcttttaatactaacaaatctgtctctatttttctattacatgaacacaccaataacactcttggaggagctctctcaaactggatctcttgtgttctctgttaaatgagaagaaagatgtatccttttatagactgtgatttctgaacttagggcagagcccta

SEQ ID NO: 318676 - DNA, 783 bp, Cannabis indica
taatacaatacaatataatacaacacaatccaacgtaatacaatacaatacggcatactaaacgaatccttaaagaatacgacaatacaatcaaaatacttgaaatacgtataaaaatattacatcaaataagaacactcaaaattacataataggcttgaataatatctttttgtcttaaaatttttttcttctctcacatagacatagacggaaaattctaaaaagagtaatttgcagcataaatacataagtttaactctcggctacaaataaatacttaagtttaattttagcggcaataatacttaagttatatttctaaaaatctgtaggtatgtaattattaagtattaagtaaattggcacgtgacaatccctgattggtccaagtcataaatttttatttttttaaaaaaataatttaaatataccaataaaaaataacatgtggataatgacttgacatttaactgtcaggtacctacagaattccagaaatataacttagttattattaccgtaaaaaattaaacttatgtatatatttacaactgcgagttaaatttagatatttatcctgcaaattactcttctaaaaatatttttaataagaattttgcaagcttcatatatgctcagcttaggccatctctaatgacaaaagttaaatatagtgttgaaataacactaaaaaaaatataattttaacactaatttttttttaattccaattacaacactaaaatatatattcttcattattttattaatataataaaa

SEQ ID NO: 318677 - DNA, 822 bp, Cannabis indica
cgcccaagtccatttttgtggtccctacttaatttttttttattgtaacacatttgaccaaaattctgtaaattttatcgtcaaccccttcatttaattaatatttctctaaaagtttaatttttctttttccttttaattggtagggtcacttaaaatcttggctctgattgcatgaacttaaattaaatatccattatggttttaattaaatcacacaactctaatattaataactattgctttctggtttgtagtcctaatcatgtatttatttttggcttatttaataaataaaacataaaaaagtttagagatttgtggtgggcaacagtccatagttgttgggtcactgaggcaatccatgaagaagatgaagaaagatgaagctatatatatatatatatatatattggtacaactgtacatgataaataattattgtaatttactattattatgatgttttgtaataataatagtaatgcccagttatgatcagtaacatgtcaagggcttatcttgcccactaaacttaaagatcaatggttgtattaataagcaaatatgaaaaaatgatttgttatgatgaaaatgacagtttttgcttattatttttagggaggctgttttgttttgttttgtcttgttttttcccatagtgaattttctataatatcatttcatcttattttttaggctgttttgcctttgttgtatcagaaagttgcaaaggtggggagggaggaccatttattgattattcttttttcattgcaagttgggatttttatttttgtggattacatccatactttattc

SEQ ID NO: 318678 - DNA, 1081 bp, Cannabis indica
atatcgattcacataatacatattgtctccaacatcatacactctcagtatatcatatacacattcattataataaatcataaatcatattctaatacacaaagaattaatatttatacacataagcacaaaaaactacctaattttcttacctcaaatcccactggtaaatcctttgttatcccatcactactccctcaaatacttcaagattcttagattaagagacattggattatggtgactgattgtgagaataaagagtgccataaattttgcaaagagtgtaatagtgaggttgaagatgactttagggtttagaacgagcagtttggtggagtgaaaattgaacaatataacttttagggttgtttgaataaaatatatatcaactcttattaggtttagttttaggaataataataatatgataaattattaattaaataaatcaatatctaacttcaaaatttaaattctaagctccatcctataactttaggacttagttttgacttaaaaaaattatgaattatgatataactattctaaaaaatttacatatatttgaattatctttgtaacaccactagaaccattgtaattggagttatacaacttcatatatggtcattttactaaaacaatttctaaacatgcaaatttctctaaacccatgatatcagatatggtatagagccttaacctaactagaagtgtggtcgacgaggacgtcgaatcccgtaagagcgtgtgattgtgacagttagtagtcttgtgattcgtaaaggaaaatactgggtaagttgtgcaaacccacatcgcctggagaaggtcaagtgtgatgattttgagattgtgtaggtattagaatacacaattaagtagggcttaaataggttgataggtactgcctatatccacaaggtgcatcttgttttggtggcctagcataagaactctaaagttaagtgtgctggacctagagtaatcttaagatggatgacctcctggaaagtttctcaagaagcgtgcgagtgaggacaaagcatgctaaaaaatacttgtgttagtttgtagg

SEQ ID NO: 318679 - DNA, 1448 bp, Cannabis indica
ttgttaaatactccaatctcaattaataaaacaataactaataaaataataaataataattaataattaataaaacaataattaataaaataataatcaataattaataataaaataataattaataaatcaataaaaaataaaccaataataaataaatcaataaaaaataaaataataattaataaaacaataattaataaaataataaaaaataaaacaataattaaaacataaaaaaattaaaacctatcggagccacaattgggcctatcggacacaacataaaaaagattaaaacctatacaaagaatcgtgccccatcgggcctacaatcgcgtccgtcggacccaacataaaaaaaattaaaaactatacaaagaatcgggccccaacgggcctacgatcgggtccatcgaacccaacctaaaaaaaattaaaactacacaaagtaattaagccccatcggacccacaatcgggcctatcagacccaatataaaaatcaaaacctgtatacaagaaatcaggccccatcgggcccacaatcgggcccatcggacccaaatcattttttgaaaaaaaatcaatcaacaacatcggatccaacacaagcatcggacccatcggggtctgacatcgaacccatcgggccatcgtcttctccaaatcgcaatttccgtaaatcccagatctaaacctaaatcgaaccctaaatttaacaaaactcacggtgcacacataaacacatacattatacattataaccctaaaatcaatacctatcaatactctaaatcatacatcacccaaaaaaaacaatgacaaaaaaaaggggtcgaagcttaccttggacatttcggttttgatggggccgacagtgtaagtggtaggcggtgagaagtggtcagttttgatttgggaggggtctggcattgtaggcagtggtgaggggggttttgatttggtgagggtttcggttgagagagaaccgagagagatagagaaagagagagagagagttggggtattgttatgagaggggtattcttgggtttttgataaagtggtcatatgttttcaattttattatgtatttgtttaggcataaaatattacgatattttatgcatatttcttcaaatttcccaatgcaaaagagagggagtgaagtgcacgtaactaatcagtttaaaattttattaaataattttttttgaattttttattaaataatattcagtagatatttattattggctaatacagccgccgcgatgaggatattgtcccccgcggcgccgacttcgtacaggtcaaggataacttcgtctttctcatttttgggctggaaaaactctatttaatgaaagaaggtcgcgaattatagaaaaaagaccatatggaaccataaaaatacaagaagaaagctcttggagcgagcatggg

SEQ ID NO: 318680 - DNA, 1216 bp, Cannabis indica
tttagagatttttttttttaagattttattatttgtttttaggcaaagaaacaaaaccataatataagatattactatatatcaaaattttcattttgttatattaatattagtccatatttttctatttttattgacattaatatttttattttatatgaaaaaataaaataactttttttaatgttataaattgattttaagttggaaagtttaatggtaggccttaagtaagtgataagcacattttacctatcttttgttatgttatactgttttgttcaaacattaacctaattaaactaattaagcatctatatatagctatatttacaaaaataaataaataaataaataattacatatttttttgaaaaaaataaataattacatatttattgttacccgctcctataatttgattttcagctgaaaaattaaattcatttatacatttatatttatagtttgctttacattcaaatttcagtaacttttttgtttcaaatattgaaaagcaaccaaatgtggacctaaataaatagcattaatgcctttttcttaatacataataaaaaacccatctatctagtttagaactaactttttttacaatctgccatgttcaaattttcaatattttttatgtattttttttttgagataattacataagtcattttttttaaaaaaaaagattattttatatttttactttcaaagattttttttttaatatttatttttatggtattttataaacaagaaaactacataaaaataacactcaaacaataacaaaaaataacaacaaattaacaagagtacaacataaaattacatcataagactgtaatttctgtaaataaaattgtaaaaatatttaaaattctatagaactgtatttttgtaatttttttgttatttttgtgtatttataaaataatattttttttgttaattttaaataaaaataatgaggaaagggggtgatataagaaatttttaaggtttttttttttttaatttttttaagtttgtaagtatcataaacttaatgtttatttttaacagtataagtactcattgtttgtaaaactgtaatttttctctaatttcgttagcacatactctgttattgtcttaaacaaggcacatataaggtctaaattttaaatcattgcatctagataaaaacatatagtatcagttactt

SEQ ID NO: 318681 - DNA, 1048 bp, Cannabis indica
aaaccagcaacgaaaaacatggccaattcacacccaattcaacccaaaccttaaccaaaactcaaaactattcaccaacacataacttatcaacacagagagttaaaacacaaatccatgcattaaaatctaacaatataaccctcaaagttcagattaaacaacataaaatctaggctccaaacttaagcacaatatcaacaaattcaagctcacaccttgaatcttcaaaacccaaaacataaacccaaacacaacactaaaattagagctacataacatattaaaaacacctataaaatccctaaaatcatctcaacaactctacataagcatcgtacttcaatttataactcaatcaagcacaaggcatcaaaattccaccaatatcatcatacatgcatttcaagaacatctaaagcttaaatcataacattcaacttcaatttcagcaaccaaaaaccaagaatcaaagttgaaggagctacctcaagcttcaagcaaggatcaagcctcaactcctcaaaatcaagctttatccaacacaatcctcaagcaatttcacaatttgtaaaaatgaaaatagagagagggaggggtcggttttgggtgatagaaaactagataattactcttcatttttttacaaaataatgccttttgttgaaagtaatccaaaaatgcacatttaccaaattgcccctagggccataaaacacatactcaaactttcaagggcaattatgacatttctacacacaaatatactcaaataaattttagattaatcacacataaataaaatgtcaataaattatctcaaaattatattttggacccgaacctagttcggcccgaaatacccagttgtgattataccgcgccaacttgtcagaacacacctgaaaaaggacaaaacaggcatactatataataatatagtccataagcacgtatttaaattaaattcataattttacacttatcgggtcaaaaatattaaattgcccctaactcaccaacggggtctttgttggaaattatttta

SEQ ID NO: 318682 - DNA, 1399 bp, Cannabis indica
aaatctaatgtatttaaaaaaaaatatatgttcggaattacgtaaaataaaataaatcctaaaaaattattctaatttatgttgatctaaaattattaaattaatttataacataaatataatttttcaatttaattaaatttcttgaaaaaatatctaatatttaagtatcttgaataaaattaatttaaatattaatttttatttaattaactatatataaaaaaataccaaaagtctattcagaaaataactatctagatatttcataaactaattattattttctattttataatataatatattttagtgtatttattttaataaatcattaatgactttttaattaaagtgatctaaaattaattaaataatcaattttcaactttagtctattttttaaaatttcaaaaaatatctacatttaaaaaaatacaattcaaaacttattaaaaagtaattaatgaaataaattaaaatatatattgaaaattattctagtttaaattgatctgaaataaattttttaacttaaatataattttctatttaattaaagggagagaaaggagaatttttttttttaaaaaagagttagttacaaaaaaaaagtttgttaaaaaacaatcacatacctataaggatatgactttcttaaaacacctaactgctataatgatatttcagcaaactaatttaataattgagataagcatcctatcataatgttgccacactagtgatatccaataccaccataaaatattatatggctattagtgaaattaaatttaaggtcttacatattaaatataataattatttttttaaaaaaaatgctaattattcataagatgccactttgtagtagaatcggataccactggtgtaattatagtacagggtggtgcttcatcccaaagaagagtgcaccgtgcaccgatgtacttggcatccaagaaaattttttagtctattttttcttatagtcgtatacaatgtagttatttaaggacatctctaataaagtgctataaagatagtgtataagcattttttaacctatattcataaaattgaactccaatagtagtgtatagtgtggtttaaatttggcacatattaagagttgtgccaaatttaggacaaaaatatagtatgctcagaattttacactataataaatatcacttttttatttactattttaccactcattaatgtaattaataacttttttacattaaaaaaaacaaattaatacgattaatcagttgataatacatactgtcttcagtcgtctgtgaggggtttcaacagcagtcgtcttcagtcgtctatgaggggttcaagagtagtcgtctgatgagagtggttcggttcggctcaacgacgt

SEQ ID NO: 318683 - DNA, 1612 bp, Cannabis indica
tcttgttgatttttgttgttttcgtgttattttttgaaaaaccgtaaaaatataaaaaaacattctttgaacgtaaaaatgtaaatattttataaaaaatggtgccttatgtaattattccctatttttaccaatttataataagctgtataaatgatataaagtcaatgtgaaattttttgaattgttttgagttattttgcaaaatgctgaaaaatagaggaactggttgctagttactaattttaagtatttttttactacaggcgacatgtcatttgactaactttcaacatacacttttgaatattttgtgaacgttttgctcggctctaacaactctcatcacttctaaatcaaccattaagttcataaacgctcaatttaatattagtaacagtaaaaaattttatggtggtcattcatgttcaaaaataagagtaaaaactctataaatagagggcatgattatctatttgtgtgtgactaattaatttgaaacacactagttacaacattgaaacatagaaaccttgcggtttgcgaggttatggtcatccttagacatttagctaagcttatgagatttgaaaaattcttagaagtatttttaaagtttttctaagatcgcgttcggaatgccaagagggaagtagaattaagtgtaattgaaggtaattatacaattttgagtatttgtcagagcacataattacacttgtaggaaatttactcttttaacctacacacaatagaaacaaatcaagttttctccaaggtcaaaatcgacctttcaccactgagtcaaagctcagttgactcctttgatttatgagttaaacgacagaagcaaaccaaaacgccaagtcgtttgaactcaaccccaaattaacccttcgaatcctctagaaccaaacacatgctcagaactcacaaacaaaactcgaagactgcttctcaacccagaaatccaataaatcccttcccagatcaaaaataacccctagatctatacacaaacagagataaaattgtaagagcaaagaaaaatagagagattgcactaggattttataaaggttccaaatattgctgggtacatcctcttcgagctcgccttaaaaaatagcccattccactataagatcttcaagatcaaagatttacaaagcaagattccaaatcacaggtacgattggtaatctatttttatttcagtatttatttctctctctctctgaatatttactaactccttcttcttcctttctctgtgtatatctccttcttgggttggatctccgagccctaagcctagagtccaagacttaaccactgtaagtctcttcctctccaatttctttctgatctgtgtttgaagttaagtatatatgtttatatagccttagggtagattgagatagctgagagttagttgcaacagttttaacaaactttgcaacttactactggttctgtcacagtaggttgttagaggccaaaggccacttgtaggtattatactttgtaattcttgttgttgcttatctggacaatataagaatatttttattatggaaataaattttttatttaaggaaataaataaata

SEQ ID NO: 318684 - DNA, 1033 bp, Cannabis indica
cttaattagaaaataatttccatatataaaatattctaatagtatatgtctagtttaattatttgtttattaatatataattaaaagagtactatatgtaataatttaattatttcgacaacaatatataattaacaaatacaattgaacataatacgaacaaaaaccataaatggagatgttatatatatgtatataaatgttttggaaagatggaaatattaaatattattagtcatgatcacaattcacaacctacctaggtttaatttgagtttgaagagtttgtattgtattgtatataaataaacaacaaattattaggattggaacccaccatgtttctcattcaagaaaacgaaaactctgaagtctaaagtcaaatattaattacaacagaacaaattctcaaatatttaaattatatcaatatattgcaatattacaataataggttgcaccaaaaaaaattatgataaaacctagtaaaaactatatattacaatgtggtataattcttctaaataaaaagggtctccaaaagttattcatcatatatcatctggaaaggcgtttaagaaagtttaatttgtccatcaagaaaaaatcttgtggaaagctagatgtcgtccagaatggagttccggaagtctagcttgtccatatgtgttatcgagaagggagttccgcaagtctagcttgtccatgtgttatcgagaagggagttcctcgaagtataacttgtccattcgaaaagagtctccaggaaaagttagtcttcttccagaaaggagttccggatggctagatgttctctcttggaaggagtcccagatagtcgattcctattgtcgctttttctatttgggaagtctcttcagcgtacgcttcgatttatcttccaagaaacgtacgactcatctggaagctctttaaacttgagccgacgtggagattctattacgaggagtttgttaagttctttaagtcataactaacttaacaaattatcatttgtagccaccgactttgg

SEQ ID NO: 318685 - DNA, 986 bp, Cannabis indica
catttggatataagttgttgtatcatagaaccctcagccattagggctattggaaatcactgcaagaatttaaaaagattggataggaacttggtttttgttactgatgatagtaaagatgaagatgcttttgctattgcatcttcaatgccaaggctaaagcattttgagattgcttatacaagtgttactactaaaggtgtattcaaaatactcactagttgcccttatcttcaatatttagacatttctgaatgttccaatctcacacattctcgtaatttgttcaacaatttctgccctggtttaaagattattgtagacaattttgttgacgatgacactctgttcactattgttattggttcacatcgtgacttaactttgaattaagctttggaatactataattacattatagttaatatatttaattatgaagaaattatactgtatatttcttttttattttttacctttcttttgttactcttaatttatacttagtttggttatattaggaagaaattacactgcatattcattaaactataaaaataaattgataatagaaaattaagtaaaactaaattaaaaaatatatatattttttgaattaattgcacacttagcgtcgatatagaactaatgtggcaactagctaattagccttatcatcattttgtttgtcacgtgtgacaaaacttaataaaatgaccaatttacgacactgtaaatagttataatttttagaagactaaaaaattcaaaaggcacaataatatataatttatagtttggaggcaaaaattcaaataacctaatttatgtattagtcattataacacgctttgttaggtcttaaataaaggttcatcttttgactttcttctcatactctttaatatctagtcaaccaaaataacacactttgttataataataataataatttttttctttctgattttttattttttttttaa

SEQ ID NO: 318686 - DNA, 310 bp, Cannabis indica
tttttattatatttatttaatgttaattatatataaaaataaaaaatttatttattaaagaaatatatttattaattaataaatataaattttattatattttttattaattaattaaaatttattaatttaaaaatactatttaaattaatataataaaagataataatcctactctattttaatatacaatattagcttcctcagttatattactaaagtagttagagtgaattagtgatcctcttgacctcttcctatataactattcaacgttcattaggaggacatccatccttttctcctctaa

SEQ ID NO: 318687 - DNA, 1463 bp, Cannabis indica
atttttggatgagaagctcagcatattgttgaggtgtatacaaatgacttgtattataaaatttaggcaataaatagtttgcaatgtagtcattagtgcctattgtaatatgatataagcacttctttaagtaatcattttttactatattttttatttttgagattgtaatttggtggttatctatttgtttattcaagctaatacaatcaccctgtagaaaataacaaaattaataaagttagagtgattttattaatttaataataaaaaaaattaaattcaaattttatagatattattatgtaccaaatattttccagattgtgggagaattccagctgatcctgatgcatagtttacacctttgagtatgtcatagccagtggtattagcaaaaggtggtataaattcatcaaaccctaaagttgacctttaataataatatatatatatataaataattagttgatatttaaatatatagaatagttctaagtaaaataattgtaaataaataattcatgtttattagagttgttcatgatgaatagatttaatttgaattttttaattaattttcaaactaaatcattattatgattaagtttctacacattattaatatcacacccttaaataataagagttactcaggcctgattctagacatagggtggactagatctgtgcctggagccccacctagttgaagggcagttgaagggcccaatttttttttaaaaaaatattactaattcttttagtaattttaaaaaatgctatattttttttaagtaagagcccaaaattatttttttttctatatggctcactatatttcaagaaaaaacaacctcataattcttgttgatcaaaaagaaaaaatgaataattacataaagtactattttttataaaatttttacatttatacattcaaagatttttttattatacttttacaatgttttacaaaataacacgaaaacaacaagaaaattttacaaaataacacgaaaacaataagaaaattttacaaaataacacgaaaacaacaagaaaactatataaagtaatagaaaaatatacaacatccaaacaacataaaaaaaaataaaaatgaacaacaaattaaccacagtacaatataaaaatatatctaaagattatattttctataaataaaatcataaaaatatttaaaatttggtacaattgtacatatttttataatttttttttattattattattgttcttttttttttttttttagtaaattattccaaatgaataaaccctcataattcccaagaaccaagatatacattctaacacaaaataactataattatatacacatttaatataaaaaaaaattatatatacataccaagtatatcaaccacagtctgaccattggtaaacctgcctgttggagtagctttaggaaaatcaat

SEQ ID NO: 318688 - DNA, 873 bp, Cannabis indica
gtatactttatcgttgattatcacatcagtgtaaatctagtgcactaatgaattagggacattatcttttcaaccatataatcacaattacattccactgtgtggacatcactgtaattgtgaataactatatgttgcggacttaatagattttgtgcacatcaaaccataaacatgaaaactacatgtaaacataaatcacttctaatcttttattgataacaaatcagattagattgaaatgggttttatttaggacataaaatcccaacagttagacccttcagggtcttataaagacgcttctttcttccctccacatctaggaagttaaggcaagcgtgaatattcctccacgtgcccctttattctggatgattcttggttcagggagaccttttagcgatagagcaattttaaaggacttcaggtactggaggattaatttggccttctttaataaatgtcatgtgtcatgtcttgcaaaaattgcagataatatttacccccaagctctcaggatgcaacgtggtgtgggagcttgcagtactcatcagcttttacgtgacaaattctcaacatgtggtgctgtctgagatcgcttcacattccatgagttgacgtcagttaatgggtcactaaccgtaggcattattagcatggcacataggcggtgccttaaatgcaatcgctggcactatgcgcgcgtggaagtgtatttcttgagaggatttataatgactatgttgctcatcatccgagacatgcaatgatgaacgttaatgtgacagtcagtagtcttatgatctgtaagggaaaatatcgggtaagctgtgcaatcccacattgcttggggaaggtcaagtgggatga

SEQ ID NO: 318689 - DNA, 742 bp, Cannabis indica
agattgatcaagctcttatgccactcaaccaagctttttcctccatttcctcttttctcttccaaaaaatggatattgggtcaaaaaatcaaaagatcttaaaagcattatagaattagtaaattcctgaattctctgatatgtcaatgtcataacattctaactaataattaatgcacattaaaagtgaaattatcgattttgagttccatccataaatcttcagaatatggttcacattaattagcaacaatgttgcaaatgtttagctatacatatgtgtatggggacataaataataagaaactagactgctcattacacttaatcgtcactagtagctagtagcctaaagtgatctaggtcttggctttctacaggtttggacaattcctcattccttgttttaataatattccattctaatattgaatgcccatccatgagaaaaataggaataacaataatgtcataaaatgaataacacagtatggttctttaagaatcatatgttagacaatttatatgtataaagtgaaatatatgtatgtgtatataaaatgcggaattaaacaaatatatacactatataacttaaggatcgaaatacctccagccattgattcttgagcttcaaactcacataagctttgatctgcaaaggaaactggttgatgtgggtaatcgggattcctcgctctctcaactctctttagatggaatttgctgttatgaacagaat

SEQ ID NO: 318690 - DNA, 1373 bp, Cannabis indica
ttgcatacataaatacatacacaaatagtaatacaagagaggcttgctacctcaaaattaaaaaatattacatagttttttttaatatatatatatggaacactttttaatgagtattacctatgaatggttactaaacaaatttagactataaatattaatttaaaaaataccaaactatcgaattttgatctaataacgaataatgaaaatcacaaatttgaatttctatgcttaatttaactacttaattaaaaaaaaataatcaaaaaatatctttttttaacacttatatcaaaaatatgttcatgatacaaaaatatttaactcaaacttaactttttcatttcttatttttcttgctaaaacacttttttaaaaaaataattaccgatggaacaatctcagcccatataatataaaaatgagagatttttttaattagataaaaaatcaagcatataaataatacccattaagagtgcaccccatcttatatatagtttattatctttctacattgacaatgtggaactctaatagttctaaaatagggaagccttttaatatttaaataatcaaactaataacttactacatcatggtctaaattcattttttattttgaaacttaaatttattttctacatttataaaatactatttattactttaagcatattctattaattattttgagttttaatattttatatatattaatattatatatttaaaatcaataaaatatattaacatttaaaatttattatataatataatataaaaatttgagatgaaataaaaaattaatattttattgatatattttataagaatatagaaattgttaagattgctctcacttgagctttgaaaagctaatttgggctttaaggtccaaaagatatagtgtgctacagattaagtaactagtaagtgtagggggtctgagaagggtaatcacaggctacaccttaaagcctgggacaaactatgcctccccaagtctttagagggtctgggcttccgaaaaactagagaaatgaatcaggcattcctggctaaatgggggtgtaatcttctaacgggtaaccaatccttatgctgtcgaattctggaagcaaaatatctataaagataagtcttttcttgactataattctaaagactcgaatttgtagaatgtggttaaatcgagagccatgattcgtaagggtgactgcaaacgggtggcgaatgggtagtaaacaaatatatgggacgatccatggattgcacacaggaagggtttcatcccccaccttagaggtcccactactcatggggagataaaagtggttgagctactgttagtgttgggttttgtgccc

SEQ ID NO: 318691 - DNA, 2568 bp, Cannabis indica
tcaataaacataataagttaagggaactaattaaaacatgcaaactctatttcgactggagtaatgtagttcttcgaccatgccacataaagtcctatagcatgacctacagtgctgtattcttggtgaacgacaagacacaaattatattttccacatagatttcttcgatgaaaactcgacgataatccttgtagaggtaatcaaaattctagactgagaattcgccattcttcaaacattacaccttcaccaagaacccccaagcaactttcaatgataacccattgggctccaaccaaacatgcatccaacatggatatctctgtagttctaaataataaataaaaaaggattaatacaacttgtaatttgaccatatttataatttagtattagacaaattcataaactaataacaagattacctttctgaactaccatcaatatgtggcggtagagctagtggagcgaatatcttatcagcatgtagtgtactcgattgtagtggagcagagacatggacatcatcactttgtgattgttcttcgggagcagagataatgttagcaggggctggttcgtttgattctccaacacccgaaccagatgcatgtgatgtacctgcaacaccactatgttgggaacgaactatacacaagagtttagccatatgctttttaagctgcctattactttcctctatctcacggagtcacttattcatatttgacaataccctcgttgccctcatcattctttctccttgtagggcgtggcatgtggaaaaaatgagtttgtgatttgtgtgacaccatagcccaagcctcggacccgactatcatgctcatatgtcctaaggccgggccatggtcaagacgttattcatcccttccacacttagtgttccttattcgacttgctttcacaattcatcctacaaacataataaataaatagagttagaaataaattatgaaacaaaaaaatataaatgccattatactttaaacttacaattcattgggcaacattcgctttaatattttcaaaagctggaaaatcattaatggcccacaataatatagccttaagattgaattcttcatttttaaaggtatcgtatgcaggaacaccctcatgccacaattgactcaaatcatcaactagaggggataagtacacatcaatgtgattaccaggttgtgaagggtcagatatcaacagtgtgagcatagtgaacttcttattcattatcaaccaaggcggcaaattatacatcataagcaaaactgaccagcaattatacttactgctaagggtagtatgtggattgattttgtccgcagatagaccaagacagatatttctaggttcattgacaaatttaggccgcctagcattgattgttatctaagtgggggagtcagctggatgtctcatcttaccatctagttttctatcgctagcatgtcaggtaaaatttttagcatgaggtaatggtggtaagtaccataatacctttgcagggacaccaacctctatctcgtcataattatttttcttttgccacctagactcaccgcatgtgggacacatcattgcatccacaaacctcttacactatatgacgcaattgttagaacatgcatgtatattttcgtatttcatacctaaggaagataatgtcttctttgcctcgtagaaagacaaagacatcacattaccgttgggtaataactctactaggaaagctagtaaatttgtaaaacttttatcactccacccgtatttcgcttttatattgtataatctaaaaagcgtagacaatttagtaaacatattacaattaaggaaaataggcttctcaacatcctctacaaaattttaaaattttaatggatcgatatttgattcaaattgtgcatctcctatcatttctggaatgtgataattttcataatccaattaacacccttaacctttttaaacttagacatttcctcatcaagaacactaatcttttccccgtggtgagaccttaaaactattgtctattctgttcctaaaaaaatactcatttatcttagtaatattcatacctcccatagtatcacatttaagataaggacaaggaaccaactttagatttttgcatgcatctgaccaaaattaaaaaaaaaaaaaagttagtcaacaccttccttatattctgctgataatctattcacactcatctgatttctatccatttcgaaacttcaataaaaaacaaaaaaaaaactttattcaattattgtttgaatatatgttttaattaattaccacacatataaatttaactaattaagatctcacatttttaatttaaattttatgtatttttcatgaaatttatcccaattctatcaaaatttcgacaacataatgactgtactcagatgttctcaaaaatttcaaacatgcaaagaacaagaaacaaaacacgcaaaataatacaaaactaacaaaataacattaacaatacaaaaattatccacttattcgaccgcagtacatgtatattcg

SEQ ID NO: 318692 - DNA, 926 bp, Cannabis indica
gtatattgtaaaaatacctaataatatataataaggtaataatattatattgtagtaagaaagagagtagaatttgcgtgtgcccttatcatattaaagatttttaagataattaaagaaataagttatagccatcacccaagacttgccgtggtgtttttggaaccctaaaaaattaatgttttatttttactttttaataaataaataaatattaatagaggaagaagattatccattcaaaaaaaaaaaatagaggaagaagatgaagaaaaaggcaaagtatgggcaagatggtgtgtttgaaaaagggtttttatatgtatatatttatatacacataaatatatatatatatatatatcataatatttgtgacatgtggaaagttggttgccattttaactaggttaagtgtaatatttggtttttgtgacataatctttttgagatataataacgtttacttcttctttttattataacatatttatatatcctaataagtaagttattattttcattatctcaaaaaaaaaaaaattaattattttcaaaaaaaaaaggtaaagttattaatacatgatttcctaaaaaatatatattattacatgaatgttaaataagttacaagtacatatatagttagtgttttcataatcaacctattaattattttatactcaaagattaatatgatatgattttcattgtgtagggactagggatatgtaatcttacgagaaaatatttataaatatatattttgtgattatcttgttaaataacaataattttaaattaataaaaatatatataatttttaattcccattaattcaccaaacctcatggaaattattgtaactaattattatgattgaattaattgtatatatatatattattggatgcttttataatgca

SEQ ID NO: 318693 - DNA, 1407 bp, Cannabis indica
gggtctgacattgttattgttgcgcggactgattctcgtcaaggagagtgtctttagaagaatcactctggaggacaagggcttttgctgatgttggagcagatgttcttttcattgacgcactagcttcaaaagatgaaatgagagctttttgtgaaatcacgggcaaccatatttttgttgaatgttaattatttaactttcataatgttcttttgctaatttgcaataaagtaatttggtaattataaatttgaatttagtcaaatatatgttaagacttaatagatttttgcaaaatgttaagtagatttttgcaaaatgttaacccttagattttggtagatttttgaattatttgtgttttgttgttattaaaataataacaacaaaacacatcaaagcttttaccgacaacatatcaaagcttttacatgaaagcttttaccgacaacatatcaaaacttttaccgacaacaatgttctcggtatagcctttaacgagaactacactattgtccttggcagaaagcaatttttaacgaggactttttagcgaggacttgtcctcgttctatcgttttaccgaggatatttgaagttataacgaggacatttgtcgtcgttagagacccaattttttagcattagcatagatatatttctgaagaggacccaatgaaataaatagttattcattacagtaataattaactccaattaactttattactaaagaaatttttgtcttaaaaaagttggtaaaaaattttaagagtacttttttccaaaaaagtctttcttcaagaacggaacaaaacaataatatcttcaaatatacttaataattatcaacagacaatgataatttcttccgaaaaaatattaataaatttctagtatttaaattcatagatgtcattttcattgatatatagtaacccaattcacaataatgtcaactcaaattacataaataaaaacattcatacctgtaacaccaagagagtaagagaggatatgaagcaatgccatcaaagtaatacatgggtggactccacctcgacgaagaacaccttcgacattacaatcaatttcgataagtcgatcatcgtctcggcatgcaatcgaccagccatgggatagaaattatggtgccttacttagagctggttttgtaatatcaacatcaaagaaattgacaacatcagtgagtctgtaaaataagcgctaggtgtatgaatacaggttttttagggtttaagattatttggaaatcgcaatataagttttaagagaaaaaatcaataataataagtttaagaatattgtaggaattgtccttacaatgtgtttggcgaccagaagaaaagccaagaatgtcacccctattactatagtctgcca

SEQ ID NO: 318694 - DNA, 695 bp, Cannabis indica
aattatataatatactttaattatattttataaattatattaaatggttatgcatatacatactttatgaaataacttaaaaaatattattaaataatttattgtcatctatataatatatttaaatgattatattgaaatatactatgatcgcacatagtcgcacaggatcacatagactaatattagaatatactttgaaatatactatgctcgcatataatcgcacatactcgcatagacccaatattagaataaagttttaaatatactatggtcgcacatggtcgcacagggtcacatagaccaatattaggatacacttcaaaatatactatggtagcatatagtcgcacatggtcgcatagaccaatattaaaatacagttttaaatatactatggttgcacatagtcacacagggtcgcataaaaatatattaggatataaattgaaatatatttgattgcacatagacgcacaagatccataataagtgctttaattagcataaatttcataaatagatataaatcaaagtttgcatatatcaaacacaagaaacattaaatatataatttagggctcgtttggtacgccatattgtattgtattgtgttatattgtattgtattagtattatttaatacaatggtatgttttgtattgacttgtattaatatattgtattgtatt

SEQ ID NO: 318695 - DNA, 1597 bp, Cannabis indica
aacataattttgttttctagttttaaaaataaaaaataaaagtggttatagaactacgtttttattttttaaaaataaaattttaaaaacacaaaatttacttttattttttgtgattaaaaaattaaaaacaaaagtgttaccaaaagcctccaacaattatctttattttcaatttgaaattgcttcatccgtccctaatgtcaaaccattttcaatggatggtataaattttgtattaaatataactcacaagatgagttaatgttatatttagttcaaattttataattatactccaaagcacactaggggtaaaataaattttattttagagaaatgctaaaaggtaccattagtgcctagagaaatgccaaagagcacccatggtgtctagcaccatttgagatttaatatcactattagtgcaatttaatatccgatttattttaatttaataaagattatagaaaatcgataatcaattatagggagccaatctcatagtggtgctaggcgccttggtgctctatatcaatcgctcatgtgcctagtaccctctaaggtataatatcactattagtgtaattaagtatcaggtcccatataatttaatgtaataaattttaggggatatcgctaaccaatcacaatgtgacacctctagaagtgctaaacactactagtgttataatatcgtgtgtgttgtgttggcccgacccatattataccatgactttcaaaatatgtgatgtattgtgtcgtgtgccataagaaaatatgtgatttgtcgtatcgtgtcaatatttttaaagagtaggtctggcacgtaggcctagattcgtgccatgctttacttgtgttgtctcgtttttttttaaatggaccaacctacttttatattcgagctcgaatttgtgttttactttttcacatttagttttacaattaatgagttaattactataatatatatttctcatgattttaattatatttatataatttttcaacaacattttatagataattatattaaaaaaaattattagaattattataatttgaatattaacttataaatactcaagtttttatatcatattttataaataaattactatatagttttaattttatattttataatagttttaattataaaattataatatttagtattgtatttaaattttattattattttaacttatttataattgataaatagatatgttttattattacaattattaaattataagattttttaatatttcgtgccatgcttttcgggtttgtcgtgtgtcgtgtctttcagactagtctattcgtgcttactacgtctttcgtgctctcatgtcgtgtcgtgcttaatcacatatttttcgtgttgtgtcgtaccaatttatagtatcgtgtcatgccgtgcataatcccatattttttcgtacttggtcatgctcgtaccaattttatgttgtgtcaaaaagcccgatccatatttacatcactaggtaccactaatgcttattagcaatactctttattttaataagaagatataaaaaaaaagtcaacaaaaatattaaatttt

SEQ ID NO: 318696 - DNA, 1526 bp, Cannabis indica
gaccattttacccctaagcttataattgctcagtttttaggtcaagggcatttaggtatttggcaaaagtgtgataggtggctggtttttctttggatagctggccacacttgagttcagcttagattaattacttttgaaattaatcacttagaaagaactcaaatatttagaaaaacatagaaatttccccttctctctccctttgtgctcgactaccacaagaaccagcaacagccagccctaaccctcactgctttttagaaatttcgtaaggaatcaaggagtttcaatcaaaggtaagaccctatagctctagtctatgtgttgtttatgttttaagtttggtttgattatgtaaatttgagagtttgtggttgttagggttagatgtatttgtgaatcagtttctaggttcatttaaagttagagttgacttctagatgctggttttaaggtgttatgtggtgaatgaacaagtttgagtttgaaaactcaaacttggctcattaatggcatgtttaaattttgtgtatgtttcttgctattattgcttggaaaatattatttgaggttggtacaagaattccggaaggtttggcatggtctggacacgaattggacaagttttgaacttgtttggggtgacctggtgcaaaccagttaactagttttacaggtcctgtaaaactggttaactagcttatggccaggtttcctgaattgtttgatttgtcgtgttattttcagagccatagttggttatttccctgataattagggtattgttataacaattactgatagcagaacccttagtagggagtttgagttttccagattagggttttggcatcttatttacacgtttatgtaaatgtgacttatggcattcatccaacacaaagtttttcattcagggcagccaactcatttgaattcaaaaataaggtaagcatatcatagaacatgttatatatgttattatgtgtatgagtaatataggcatgttgtgtatgtgatatgtaaatgttgtgaattgatatcatagcaacacaactatagtgtcaggtcagcagtacgagtatagtaccaggtttgacatatctgcaattccaaaaagtattagctgacgctatcatagcagtgcgagcatagtaccgggtcggcagtacgagtatagtactggttaagagtgatattatggttaattatacttttgggtattatcgatgctatcatagcagtacgaatatagtaccaggcccacagtgcactcatagcactggtagtggctgatatcatggtcgataataccatgtataaagaatgttcttacttatctaataagccttgtggataggtgtatgggcgcctagatacaagtcggtaatgtatgactcacagttgctactttcatgtggaggtaaaggaaaagtgaaggctaaataggagtgagttccgagcttggatggtgattgtacatgtcaagacgatgcgtgttggaatttattttaccaggatct

SEQ ID NO: 318697 - DNA, 562 bp, Cannabis indica
gtaaatagatcctagtaaaataatttccaacaaaaatttattcaattcatattcaacattacataaacaattatgtatcttataagacaaatcgattctgatgcttcataaagcacccttaacacttgttaccaacgagctccatatgtcactatcgttgcccgatgaagtaatcgatgagtaagagacctatctgcgatttcaaagtgagtaattactcgttctcaataatagtaattaccgtatctttacctcaattataattgagccacaagcgataataattgtttttcatatgacatgcttagcagtgtaaatagcttttcttacctcaatccaatatcaagtgtgcgggttgacctgagtggaactacgctcaacgatctcgggtgctatgtcacaacaatgaaacttggtaaacaacttaatcacgcaattggacaatcctaacccctactgactttgaaatagttaaaaacatctttaaaataccccaatccaagctctaaaaaacaccccaaacaaaaccggtttcgaacgaaaaactagggtttcccctgct

SEQ ID NO: 318698 - DNA, 1147 bp, Cannabis indica
atctaattgttaaactctcattcatacaatccattcaggttgcacaattaagatccatctacaggagcttcgtgacaaaattattagcttactgtcttctcttcctcaagcttcgattggctacatccgacgtgaggccaactccgccgctcatcagctagcaaagcaagctttaggcctatatcagtaggctcttgattacaagatctattcattcagtcctttacttgagattgcttttggctacagatctctttctttttcaaaaaaaaaaaatatatatttttaattataacaaagaaaatgtaattattgttttttaatcttttgatttatttttaaaaataacaaaatatttaaaattacaaaataatttttttgaataataaatgagtataaatttaatatgtgaaaaataatcaataagccacaaaattaaaagtaaatattacattatacaaataaaatttttatttttttaatcttttaatttattttttaaaatatcaaaatatttaaatttattaaatattttttttaaaagatagattagtataaatttattagttaaaaataattaataagctacaagattaaaaataaatattaatttttagatttaagaaattattgtttttattttttaaaagatgagtcacccgtagaaaaaatcgacaaactaaaagaaaataatataatcaaaataaaaatttaaagattatagattataaatatattttttatatagtgtaaaaataaatattttttggtatttttttagttaagtagctaaattaagcatagatattaaaatgagattttttctatttttggttaatattactttaaataaaaatttatactactaaaaataaaataaatatttatattgtttattaatttcaaatatactattcttaaagtttgttatttacaaaatacgtagaaaaactcccccaaatgcgcaaggagaagtgtgacacacatgtggctatgtggcacgagtgagactcacacgcaagtgagggacaaagcctttagagtttcctgacgctcacaaactgtagcgtcagaacgcagcagtagttgccacgtggcaattcagacaaagtgaatttcaactatagggcttcttttctcagcgcaa

SEQ ID NO: 318699 - DNA, 527 bp, Cannabis indica
ctttggcacttgtcacattttttgacatagtccattgaatccttgatcatagtaggccaaaaatacacttttataggtatctttttgagtaggctttgccctgcggcataattaccgtggaagctttcatgtacttctatcaatagtcgttcagcctctgtcttggtgacacatcttagaagtggtattgagaaaccgcgtctatacataaccccttccaagattagatactgagcagttttcctcccatttttcttgcttcattcttgttttctgaaaagattcctgtctggaggtacactactatgggtgtcatccagttggactgtcatccagcatgtctatttcttctgaaatagtgatgcttggttcttttaagaactatatgggtactaagtttgccttgtcttccaaggtgttgctggctagacgagcgagtgcatcggttgttgcagtctctattttgggaacttgccttatagtatagcctttgagctgacttaataagtcttgaatcttgctcaaat

SEQ ID NO: 318700 - DNA, 1140 bp, Cannabis indica
aaaatatatatatttttttgtttttaaaatatatatttttaattttgttataaattaataaaataattgggggcatgaataattttgctagactttgaccacacattgaagaacgttttcatgccatgcaagttataaccacttggatgacctaatttaataaacacaaaatttgagtattatataattcaatttttttttaggtgtgagacataaacttaatgtttcttaaaaaaaagaatatttaaaagttaattgatattatatttatgtatagatttaatttatttaaaatttaagttttatatgtattttatttaaggtagtagaatttatattgatgaaaattgaaaaaaaaaaaatcaattttataaatattaaatattatgttgttaaaaataagtattgagtttataatattaacaaatttaaattattttataccgctatttactcttaagtttataatatataatgttttaactttcaatttacctaccaattaaaaaaataaccttctatgtataagaaaataatttaaaaaaaaaaaaagcaattgaataagtttgaattaaaagtttcatactctatactaataatacagttgcacttctttaatttataattattaaataaatttagggtatcaattggatacttatagttttttttagttttcagttttattatagtttttatagttttattcaaatacttatagtttttatatatattgactgagatggagaaagattcgaacttaagatttcatctttaaattatatttatgaccactagatacttattatttctaatcaatacctatatagacatttttagtattttcggtatacaaataagttacaatttcattatttaatgtagttataggtatctctcataattttttaagaatgttgcttgtgtataaaaatatcaaaacaataaaaatttatagaaggcccctataacctacaaaattataactcaaaaaatactaaaaatatatatagatattaagaaataattttttttttctaatttaatatatgaatagtattattgttgttgtaacgccccagtattttgccttattttacaaaaatactattttcatgcataatttgaaaagataaaaaa

SEQ ID NO: 318701 - DNA, 1280 bp, Cannabis indica
atattcttttatttttaagtatattctgttaaaccaagaatgttgaaccaagaaatgccgttaaataggcacttttaatatataaagatatagtctatatataaggctctacaagtaaatcaatctttaaaattatataattacattaattaatgtatataaatacgagtgagattttttccataagcaattaagggcactattttacaattttacctcattgaatcacattcaatatttttaagtctatccaaatgttaaattttaccatccgatctaatccaattaatttcagtcatccaatcgatccaacaactattggatgttggattggatcggttctatctgttggatgttttcatatatatttatatttatataatattttaaacctaatattttttggatcggatcagatccatccaatattttaggtctagtatgtattggatttgattggatgcatccaatccaagaaaaaaagagtaaaattttaatgtaaatttttatatatacatatatattttacgtataaaaatataaaatataattactcatccaaactaaatgaaaatactaattagttcgattggatgttggatgtattggattttcggacaccgcatccaacatctgattcgatccaattggatattcaaaaataacatccaattcgatctgatcacaattggatatccaatatttgacagtcggttgtaattggattggatcgatttatgcacacccttattagaaaggaaaaataaataaaaaataaaaaaacaaaactttctattttcaaaaatacgtgctaacaaaaatcacggaggcagttgaaccacactcatctcgaatctccaccattttcattcaaaacccaagaaaattaactccaacaaaatataaatctcacccaaaaattaatcaaatcccgacaaattcaaatacaaaaggtgaaacataaaaaaaaatagagatttctacctccattgataaaaaaaaggctaattagcaattttccccccgaactttgacatgtactaaatcatgccccttgaattttttttgccgttaaaaatttcccctgaactattgagattgttaagtttaaggacttttgtctaatttcattcaattttactgtttcaggtactaaatcacgctccccagactttaatatctaccaaatcatgcccctcaaacttttatatgcattaaatcatgccccctgaactttcatccatgttagaatttttttactaaaattagataaaagtcct

SEQ ID NO: 318702 - DNA, 1816 bp, Cannabis indica
gagcacccgtgagccaagcccagcaagacagtataaatatcaataatcacaaaatacatatcacatatataacaataatgctattacacttcttgtctatttggcatagaactacgtgttacgctcacacgcctatttacgtctatgtggcatagacccatgtgttacactcacacgcctattacgtctatgtggcatagacccacgtgttacactcacacgtctaattataataaggccttaaaatggttcatctcggttctaattaccgagtccaaccaaattatgccttgaacgcataattcttaatcttaacataaatagcatgccataccatttaaacatcaatactcactagaataataatcctagaccatataactgctcactttaggataataaccctaatcccggttcttaattaatcataattataatattcaacatgagcgccactgcgcttactctacgtgttaactactctcttacctaatgtcccgaatacgtggagattctaaattcctgggtgctcctgaccaaatgccgataatcctagtcacaatttttgggattcacaaatagggttaatccctaaatccattttcacaaaattataaaattggcattcaaatatagataaacagatagagctcggaacgagctttctaacgatactctaaaacttgaatcggagtctggatcacaaagttttgaatattcaaatattgcatttgaatctatccaaaaacacaagacgggtcgcggcactccccacatggggtcgcagcacctgggttgaaaacccaagatttacattggggcgggccgctgcgcccagtgagtggggtcgcggcgcctgagttccaaactcaaaaaacccaattttccaactttgcaaacatgcaaaactcacatcaaaaacaccccaaacatgcatcataaattcagttttaacaatattcaagataaacttaacacttgagcaaaaatcatcacaatttcatattcaagagctttaataccaaaataacatttttcaacttacaaacaacaataaacaaagttaacaatcagctttctaactcaaaatacaaccctaaaaaactcactaaaagcataacccataattttacaagttcaaacaacataataacctccaaattactccactccactacaacatgcattcaagaacacccataacacgaaaacatgcttttttcaatcatcaattttagcaacaaattcaagattaaagtggtagaaacactacttcaagctctactcaaatccaagcaccaaaaccaccaaattcctagctagttccaaggtaaatttcaagaattatgcaatttgatgagatgagaattagagcgggtgagggggttggttttgggctgaataaaaccaaaaaattcttttccataatgcctaaaaatccatttttttgtaaaataaataaaatggtcaaaaagaccaaaatacccatagggccttaatataacatatactcaatccaagggcataaatgtcaatcaatcacacaccacacttaaataatttttaagaatattcaattatcaataaaatgccaatataaaatcccaaaaatatatttcggtcccaaatccagttcggcccgaaatacctgattgtgactataccttaccgacttgtcagaaaatacctacagaagggcacaacaagcatactatataataatatagtccaataagcatgaaataatattaaaatcacagttttacccttctcgggtcaaaattacaaaaatatctctggctcaccaacggggtct

SEQ ID NO: 318703 - DNA, 667 bp, Cannabis indica
caagatccagaacttttctatttatgagttagatttcaatgaattatctattcatagtaatataattaaaaattttataattgtgaaataatatttttcaaaattttcaatatttaacagtttaaaattagtcataaattttatcatcgaggcttaaagtctttaatgaaaagtcttttttcttaattttaaacttaaaagtcattttagaaaaagctagaattttgtagcttcaaccaaattaaaataatttatatatttcctaaatactcataatttttttttttaatggtatatccaaacaccactactacaaaatagctttttagaaacttttttttcacaaatgataaagggaagttaaaagtgtaaaaatatccgcctattaaaaattgatatttacaggcagtttttttataaaaattagggctatttacaaaaatatggaaaaataaatacaagttatgatatatatggcataaaaacttaagtgtacaaaatatggcatttatttcaaaaaaaacttaaaatatgggaaaaattattacatacaaagagaaatgccataaaaaaactttaaaattgtattttttaaaaaaataaaataaaatactggaataaaaaaatgaatgtcaactgaacattctttttattatattttttataa

SEQ ID NO: 318704 - DNA, 2498 bp, Cannabis indica
aaaaggataagaaggcagatggagcatgccttgcacgtgacaaagctgccttgaagacggtagaaaaggcccgcccctatacagtagccaaaaaacatatgttttctcaacatgggatttttggcttcctaattcaaagttgaataggattttcagcatgtgcaattttctatccttttagtccctcaatgactatataaggagtgaactttagttgattcgttaagtaattcggaaggaaataaacagaagaataggaagtatgaattttagagatcaactacaatactggaggcatttgtaacgtctccgcttcaagcctctattgggcctttacacccacaaaatgatgtctcttatacacgagtacgttactctggtttcttcatggactgatgactgacccgaaaaaccaacacgagtgtttccagtatgctttttcctcactcacacgcttcctaggaaatcttcctaggaggtcacccatcctaaaattaccccaagtcaagcacgcttaaccgtgaagttctttcgtgatgggctactgaaaaacaaatgcacctcattctcaacccaaactccttcacttcatttggatcatcaacccaaactccttgatcattattaatagcaaatattgtattatgagctctcctcattctcaagcttctgtgaaagagcttagaattttcatcactatttctagtctaatatgttttagctttctaactcatgaaggaattgaaaaatttattgacctatactattttctagctcagtttccttctcaatcaaatcagtattcaaaggatccatgtggataggttcttgaatctcatacaacttaattcgagttttgacttttttgagcttcaatgtctttgaaactagacttgctaatatccttcaacactaacttaataatcgaaaaggcttagtagatccagttatatgtctcttccaatttttttaaaccatatcagaaaattttgaatgattcatgtattaaagaatcgaaaaggtttagcttcaccactttgcaaagaataagtagataagagagcaggactatgatcaaactcaccttcaggaaaaaagttcacagccacataagggaactcatctatccaaagttgattatctagaacacggtccaatttcgcataaaccaaggctcttccttcttgcttattagtccaagtgaaaaaataacctgaacttttaacatcaaaagactgtaatcctcaacacagtttgttaatacaagtaatatttttgtgattaaaaatcacatttaagtaaaaaaaaaattatattatgactaaaagattgtcattaaaaatagtttttttttattaccactaggcatgcactaataaattcttttcatcaccccaagaaaacacaattaatcacaatatatatcttaaaaaattaaataaataaattgaaaatgattatgtatatatcatggaatatttttacaagatgaacatatcacactttgatttgtcatcactccaaataaaatattataatcattaaaaaagaatcttacgaataatagctccacaacacaaaattgaaattttctagtagaactaatatacgtatataattcgtgacaaactaataatataccttggtttgttatatacagccaataataatattgaaaacatctatatctcaaataattatcaactgtagacattattattatactgtttctattatatatgaagacataattattatatatatataatcaattcctatatatatgcacatatttttttacattttttgtgatgtttgaaagctctttgacaagtttgagatttgtgagtaagattcgaatttgtgccttctatcattatctcttcctcaaggaaatatcaagttgatataattaataattatgatcgtaaccttatatatcatcattaaaataatttccaattattatgatttctgaaagttatatataatattggaaatcctatatatattaaaaaaaacatatatgtaatcaatttaaaatctaaattatttgttgacaacataataaaaatgctcaagtacatattacaatttagatatttattagtaaattataaaactcaacataactattattaaagaaatgatataggaaaaaataaaaatttaattatcttattgaatacatgaatgaaccaatacaaggaaagggtccttaaattttatgtgagaagtccttatcaaaaataatatttagttagaacaaacatctctcgatccaatctctattgcctaatagttgagacgaatagttcccaaactttcatcgtgactaactgaggtagactttgggatgctttcagatgtagcggatttcttaaaagactttcaatttggtgcccaataaaatttacgtatatcttcagttctattagaaaattgaagataaaaaggtcaacataaataaatttgaatactgtaaagttctttttttt

SEQ ID NO: 318705 - DNA, 1173 bp, Cannabis indica
aggtaccaccgctaagctgcctattagtgtggtagggaagattatgcacctgacattgtctctcacaccttttagattggtctgcacttcaaagtagttgatatgagaaaatggattttccttcccagtgtattgatgtcaggaagggctcttaaactttgaagggataagaagagctttgattcagagttgtgagcaccactctttgtaaagttcaaattcagacaacttatgggttgtgatcccttttactaaggctgccaaggtgtcaaattttacctggttgaccacatgggtggtggtctgcatcccagttggagaatctattacccatttggggtctcctttagaagttcccacttctagcgatctgttcttagtcaagaggccacgcaagtctcttggtgttcaaagtcaatcatgtacttcagtcaacttgggtcatgttgttgtctcctaacaatgaggtcgtgaaggcaacactggtgaagcctcaaaatgaactccaaatcatcttgggactatcacttgtgggactggacattcagagttttgtaaacgctacttccctaaaagcagtcttcaactggaccataagtatgaagagaattgaattggctgctcaagttcaactcctctccgtgtactcgagggaagtactcatactgctggccattggggccatgaacaaagtaacaacataattcacccctttcatctcggaagtactttcgagtatgaatcagttcattggtccttacgtgccagatctcatagcctccacttttaaatcagtgtcttctactgcctccatcattttgagttgtaggtccatttccccttgcagggtctcaaggcctggtgtcatgagagcattgaggaggacttggtagaggagtcctattggttctctcggtgttttaaggcctattgtaggctcttgttcaaaggtgctttcgctccaagaggtctccatgcctggtgtttgtatagttctcgctcagttaccaagtgtcgtagtggcattctaagcattaaaagtttctccttaagcacttgttcccatgtgactaattggttgacatggattctctcacccactgagaaagacccctacggagaatagttttgtgaccagaactgtaaagaccgcttagtttaatttagaaatta

SEQ ID NO: 318706 - DNA, 1159 bp, Cannabis indica
cattaagtaaataccttgtcattttgccctctttgaaatggcctaagcataaatgtgcataaattttaccaatctaaaaaaaaacatgtccaaaagacgatttcacactccctaggatcaatcgattggtggatgccactgttgtgcacataattttgtcctttatggatacttgtttaggatacaataaaataaacatgcaaccccttcaccaagaacataccagcttccaaactgatgtaggattgtactgctacaaaatcatgtcctttagactcataaatgttagtgcaccatatcaaagacttgtaaatcatatggtccaagcctcaaattggtaaaaatataaggagatttatgttgatgatatgcttgtgaagtccgtaaagttagggggaacattggcgatctaagggagcttcgatgttttgatgtggtatacgatgaaactaaaccttctcaaatgttcatttacggttaattctagaaaatttcttggcttcattattttaattttgaaaacaatgaccaaaatcattgaaaactgaataatgtcatataggttaaatgactaaatacatcccaaataacaagttgttaatccatccgaagagcatacacaactaatccatgggcagccacaatggctaaccgaagtacataaattatggacactccaggaaaacttgataataaacttgttacaatgtctaacaatgatcctagattactggaaaaaaaaaaaacaaaagtagacacaattgctaaggggtaaaaattcctatccaaggtcattaaggccccgtttggggtagcttttaaaaaagttaaaagtgctttttgagaaagttattgcttaaaaagtgtttggcaaaataaaaaaaaaaaataacttttttaaaaatttaagttaaaattatagcttttagctaaagttggctcacaccaacttttagattttagcttttaagggaagctgaaatttgagtttaatgaatttttcatttgacccaatttctctcatctaattttaaaattctccatttaccaattaattttagggcttcttacattctttcaatctcatccttattcagaaaaaaaaaaatcattctctaatcaaaaactactcaacagttatcttattattattattatt

SEQ ID NO: 318707 - DNA, 882 bp, Cannabis indica
atttaattgaatttttattcaatttttttatttattttaaattttattctatttctattcctattctcattttcattcttattcctatatttttattcctcccaatcaaatatcatttagcaaatcttttttgaataacaataacagtaagtattcttgtatatttaaactaagagcattgccactatgcatgcctaacactaccataagttaatactttgtgaatgattaaccttttttttttcttagaggagccatcttcattcaacaaaacaaggaaccttattacataggatataataagactaccatcattgacattaatcacaatactatgttaatccctccaactagcacatgctttagaattaaaagctaatttggctaaagaatcagccatttacattagtacactcctttaatttgttgttggaatagtagacattgcaggaatcagattcaataattaagagtaagactttgtcacaacccaattcctttgcaaagagaaactccttaactttagtctatattaattatttaattaaaataggtgagatctaatacagttatacttttgttataattacagtcatttcgagcaaatcactcattcatttcttttagacaaaaaaaattgttttcaaaaggtaattaatggaatatagaaattttattaaagaaatataaatttaatgtagtaaaataaatatgaaagaaaaaaataaaaattttaatggaacaaaaataaaaattattaattttatcagactaataataattagggtaaattgcgtcataagtacttaatgttttagattttatacacttaaatatctaatgtttatttttggaggcaaaaatacctaatgttacaattct

SEQ ID NO: 318708 - DNA, 559 bp, Cannabis indica
gaataataaagtatagtagagtaaattagaatctctaatttttcatttatatatttcgatcaatttaattattcttgttgttcttcattttatttgctatttattattttcaactattccaatttcgattgtcaattagaaaataaaataggttatatattggtacttgataatcaatctccgtgagagcgtatcggtcttaccgtaataaattacaaaaacgattacatatatcgcgtaacttgtaatttttgcaacaaaaatatgcatataaatttttaaaataataaaaatgtacttttttaagcaaaaaataatttaaaaaaataaagagatcaaaatcacgatatataactataaataaacaataaaataaccagaaaaaaaaataaataaataaacatcataacaactataatacacttctaaataaattataaaacaaccaaataacggtttatgactttcactaatgaggaatttttataaatacaaaaattcaaaacataaaaataaaaattaaaaaaataataatattgacgtactttagtaatttttt

SEQ ID NO: 318709 - DNA, 865 bp, Cannabis indica
ttatttattaattattatgttttcatttcaatttaattaagttatcttttaaaaaaaggaaataaataaaatagtccactttattcttaaaccaaatataagattactttctcataatccaatcttgtctagttcagtccaatctaatccaatcctttctagttcaatcctgaattccatacgggccctaaaagtaattaaacgttcagtcgaaaaagcacttaattcttctgaaatctcgtacctaaaatatgacgcagcttatgagaagaagaattatgattgtcaagtaaggtcggccctgggcataggcaggctaagcctgtgccaagggctcacctatcccagggccagaaacatacttttgaaaatatacattttttattgattttgaaaaatacgattttttttctaaattagggcccaaaaatttcttatgtcccactaaatttcaaggtcggacctattgtcaaggccttgaatctgcttttttttcttcttaatcttcttttgttgtcgcctatacacattatggttccaagctccaagagcagacgcagtagaattaatctatctatctatatatttatatatatatatatatatggaagaggtttcaatggttacatttttattgtaactatcatggttacatttttttaagccattggattactattaaatggttgtgattaatttggaaattaaatgaaaataaataataaataacttgtaacctgaaagtagcctaataatttatttccttttaaaaatttaattaagattaattatattttaaaattaaattaattgtaattattaattaattttctgcaacttattactatataaggatcttttagca

SEQ ID NO: 318710 - DNA, 831 bp, Cannabis indica
aaaataatttccaacatgttgtttgcatgaaagcgacagtacttggtggtatccctcttgtttatatctttcttcatgggatgaggtcttttgtacgacaccaaggattgggctgttgtaaagatggtttctatatctttgataaggatagtaaaggcagtaaaattcgaggcattctcttgagaatgttgttgacagttattgttgaacttgattttcttcccattaccttgtttgttttcattatttgaccttttgccactttgactcgaactactattatttttggggttttgattctgctggacgtatgtattagcatcaatggtatgtagatggctctttttttgaccaaccatgtctacacaccgaactgcattttcaggctttaaaaatatgtctgcttgttttaagaactctcctatcatcctacagtaagccttttgatgtctttccataattctcacaggggtttaattcctcgtaggatggcggccaacctcccttcttcgggtagcccttttacctttgttgcctcaatcataaatctattgatgtaatccctcaaaggctctcctggtatttgttttacttcaatcatgtcttctaattgagatgagagtttcctagaagaggagaactgtgcatgaaactctgccatgaaagaattccatcaattgaattttttgttgaggattattttaccaagatctagatttactaccatgtgtgttgtttaacatcctaaacatgaatttctaaaacaatagaatttaaacacaaataaagttaaagaaacattacatttgttacagcagaattaaatgactc

SEQ ID NO: 318711 - DNA, 680 bp, Cannabis indica
gctgcaatgttccattctgctatcttcctcaaaccaattccccctgctgcttttggttgacaaacagaatcccttgcaattggtccaggaccttgtgacagatgttgtccttcccataagtaagctctacagatagcctcaatatctctaattgttctctttggcaaaaccataatctgactccagtaggaatggattgacattagtacagagtttacaagaatagcccttccatctaaggacaagttcctggtgctccatactttgattcgggctgtcattttgtctgctagtatcatacattctttccctgaaatacgctttgcacagataggaatacctaaatatttgaaaggaacttccttgctaaatcttgagcaatcaacaatacgttgtatctccttgtcatccatattgcagcagtaaaaggctaatttattcaggttaggattcaatccagttgaggctgagaagagttttaaagcttggagcatgtaatagatactcttgtaaacaccattacaaaagagaataacatcatcaccaaacatcaagtgatttaacttcaattcagcacacctatcatgatatctgaaatcagttttagctcatatcttcaacattatccttgatagatactccatacctaacacaaaaagtaatggagacatggggtcccc

SEQ ID NO: 318712 - DNA, 1090 bp, Cannabis indica
tatcatccatgtgattgctgaagaactatgcttcttactagaccccatccaactacttagctctttggtagaactgttcatttgaataaaaaataatatatatataatataaatatatattctaaataatatcccaccaccaagtacattgatcattttataataaacataattgggctccttagcatttctcttagatttctttgtgtttcttgcataacacactcattgatccatattattctaagttgaatgccaatacaatcaatgtaaacaaaattggttaggatggccaaaaggaaatgtttccaagaatgatacaaatgaatgctagtgcatggtatggaaatcttctcctttttcttaatctatgctcaatattgcatgtaaataacttgatcccctctttcctctctccaatacttgttagctattaattctgagaactgagatctgcaaataattgtaatttcacctatctaattttcatatctgaaatgaaatcttcaccaacataaggtaataaataaggcttctttgatctttgtcaacattgattgtaaagtagccttttgggaatgtttgtaatcttcaaagttgcttcattaacaatggaaattgacctccctataggcttcttgccatagacaaaaccgggcaattcatatgccatgttgatcttgctttctgagttttcattttagagcacaaaatatttgtcaatgtgcctttatataaatacagatgaatggttctctggcttacttaggcaattgggttggttttgtatttgcaaagaaacataagcatttgaaaattcacatgggtttgtcatctgactcatacatggacacttggttgtgactatggcatatgtatagacattaccaggtgaacaacctacaaggaaaccccacttgaaacaaaatgtatataccaaagataaaccactttggaacatatttgatcacatgacctaatggatccttcaactaacaagttttcttttctcatgtgactttcaaataattagggaagacacaaccatgtgatttcccaaagattaagtcactcactagaccccatctca

SEQ ID NO: 318713 - DNA, 3452 bp, Cannabis indica
agagtctttcttcacaagcacaaaattttcattatcatactactaaaatgattccctcccgccctagagttgttcttcgttggatctttttatttcttttgtagagagtgatcctgaagttgtcatgaattcattctattctttttctaagagtgtctctgagtgggttaatttttagatctattagattcttgttgtctgtcttttttagtgtatgtcttcaacatgtaatacaaaatggtaatactgtagcccatagtgagtaagatatgcactacgaatggaaaatgaggtttcttagttggaaaaaattatctccttatttaataatcaagactacaaaagtcagaattcgcgacggtcctaaaaacgctttttttaggggaacgacactaaaaaaattaagtaactatttaaaaccatttaaaaaattagtattcccgatggtttataacagtaattacaagaataagcgacgcttttaattataatttgtaaatttattaggccatattatatctgagggtttaaaactctagtaaatcccaacaaactctcacttgtactaatataaaacaaaagtgcatttgaatttaatctcatatacttgatgtcttgatcaaatgtagtatttggcataatatatgtaataggatatgataggttatattcaatatcaaccttctctactatcatattttccttagtcacaaaattcatgatcttaacactacgggccttgtctcgatttctatgttttggtactgcaagcttcgcccggatgaattgggttgtgtgttagtcatattccttaggttttctataagttcctctcatgcaatgcattttcgctatcaactcagttctcctcaactttgatcaactgaatgacaacttaattcagctcaaaacaacttttttcaagcgaattcagacaaattgcaccttgtaggaatggagagcttcagctcaaataactcacatgaagatctttttttcagagggcttaccaatggagtttaaggatttccaacaagatctacttccttaaactgagctttacaagagaagaataaaaaaattgaaaaaaatcaaaaatttttaatttattttcaccaaaaaatcaaagaacactagaagaactgatggaagcagtattcttaggctctctattattactttgggcattaatctcctatattccaaagccaacaaggagtagatttaaatttaaacttaaaaagaaagataaagagagaaaaatctgtcatcttttctcttttcccttcttttttttcttatctttaattttctaattttccaattcaaaagggaataggttttaaaattcctagtcccactagaagtcattgaagaatagaaacaattgttgagattgtcaaaattgatgtccacttggtagtttcaagagaaacgagattagttcgcgtcatcaagtcaacctcacgcaagtgtaaagttgacttaggggaaaaatatttacccagaaactgatcctggtgacgtggaaatcaatgtttgacacgtgaaaggaaagaaagcatcccgaagttgagtagtcccgagtcatagcattccacctgggaaggggccctagccttgcgcccaggttgactctaggaactctagaattggtgtttagatcctaccaagttgttttaaactcaccatctttcactattctaaaccaagaagacaagaagaatccaagtcaaaggcttgggaactgaaaaaagatgaaatagcaccccgaaagtcaaccttggcgcctagggttttcacccaatgcccaagttgacattctaactagggtctcaatttttgggttcgttttagtgcaaatagagcaaaatttgtactttgacatgaatgagacatgtcatgaacatatttgaggcaccaaaattaaaattagaacacatttaattttgcgcacctgaggcaccaggcgccttaggcacctagtgcacccaggcgcaagttgacatatttttaacctaggacacttccaatcacaatattgaagaagtatctcgagcatattatttttctccatccaaaacgaagaatcaagtgctttcgagaaagaaaaaaatcaacccagagactaaaacgaggacccagtgcccaggttgacctaggcgctgggcccagcgcccaagttgatactttgtcaaccaaggtcatctccaatagcagttcaaaaaaattcctctgggcaaatccttgttttcattaatattaatatttgggtgctttcgggaaataatggagtcatttgggacccaacgtgtaagttgatattttgtcaacctgggccacttccaaccagatttttcgagaagtcttccaggcatattctacatttctataaacaacagagatacgagtgtttccaagaatcaaacgaaaccaactagtggaaaaaagttagacctagtgcccaggttgacattttgtcaacctaggctatttttagtaatttttctcgaaaagtatttcgggcatcttttttattttcgtaaatgacgaagatacaaatgatttcgagaataaaatgagatcatctgggaattgaaactgagactcagcacccaggttgacgtgggcactaggccttgcacccaagttgacatgctacttggttcgcatgttttcgctcatcaaacacaaattcttcttggcttctctattttggtcaaaaacaggataggagacctcgttcgcaatatcaaattccttataagtgttaaaacgagccccaggaagcacccagcgcctaggttgacttatggcctagtgcattgggttgtgcttatcagaatttgattccatctcaagcatctaactatttttttcataataaacgagaactacaacttgtgacatgtcaaattcagacttcgatatttcatcctttcaacaaggtggagtatcggcaaaattaagaagtttcgagtctacctaatttcactaaaaagtgacatctctgagaactggtaaacaacttcactaaaactaagaaattggctaagtgatgtcagcatatcacttaagcatcaaaatatacaagtctaaaacattttttcacttacccagtgtttaggttgactccaggatgtcaacctaggcactagacgtcaacttgggcgctgggtgctgaatagtttttagtaaaatggtcataaatcactcaatattgatctgattgccacgattcaacttgtgttttaaaaatctttcaaagctctttcaagtcatgtatcacacttatatcacaattcttaatattttgagttcaaaatttgtgcccaagacaggtgtgatttttcctacaaatcacctgaaaacaatccaacgcacgagattcaaactccaaaattgacgattttcatcaagagtcaatttcactgttagattatcatcaatgg

SEQ ID NO: 318714 - DNA, 2018 bp, Cannabis indica
ccttgttcgaagtagtagccatgtctgagatagtgaacgaattttggcaaaagtatcttaaccaacttcatcttcatcctctcaggaccaaggtactgttttttctttaagtttcaccagttaattctgaaacttataattaataatttgattaagtattgatcatcttgattaatttcaggccatcacagcagggattttggttagatgcagtgaggtaatagcccagaagatctctaggatcaaaaagcttcaactaagaagattacttcttatgataataattaattaactatttccttacttataggaaggtacattctacactacactctattgcttgaaaattccttttaatcacacacttaatataagtgcacctatgtaatcttggatctaaaataaagatccttgaaatttatggtttaatgtaaatttgaaaatctcaagacatcttatcattgacacttctctttgattgtatattacaataggtatgatttctctttagtttatgatctgaaattacttttgttggaatcatgtcattgaaaggaaaagagatgatcttaaggctcatttgaaggttgttcgctctgtacaatttgctgaacccaaaaagaggaaggggaggttggtggaatatcttagagcttgtttggctgtgttttcagtttttagtttttaagattgtgtttttaaaagtgagaatagaaaacggttttttgttattttaaaactttaatggtgtttggcacaaatatttaaaaactgtttttagattttttcttacgaaaaaaaatcaatattttagcaccgtaccatgacattaacccatccgggtctaggttcgggtatagtttcgggtctaagatccgagtatgtgagcaaaatataaaatataatatgttagacaaaaaaaattgtttttgaaaattgaaaacagcattttgatgtgttctgttttctaattttttaaaactcaatttttaaaaacagtttttaaaaaatttttgtcaaacgactcctaatagtttttaaactgtaaagctaaacagcctcttattgtttctttgctctaaattttacaaataaagttaatcaatcggtcttttctttcaatattttctttatagatagaatgtgcattttttggtatggttctatcagttggtcattttttgtttagcaactatgttgacatgcataattttgtgcatgaactaatttgttatcaatgatatatacatgcaggaatggttttaagactattgcagtgatacatagaagttcggccttgtgtatgaatatgtgggagtgggatcaccattatctattcttacttatatgtataattataagcttcgacgctcttggttaaacttctttttcaataaaaacatttgcatatgatcaatggagtgtgagcaattatccttttgattattaccttcaacagcaacacatttgagtttgggagagtcacttcacttgaagacgaaccacaattccatcctcaaaaactgtagctttgcctgcaacattctcgatcagatgaaaacaagtgtaatctaaacttgaaaaatcaattaaccaaactcattgagaccaattcattgccgagaaccctccttcatccatttatcgtctcacattaaatcaattggaattttgagaaattcactgcaaatgtgttttcattctaatattggaacccaaattcttatccaacacatccacattctctgcttcaatcatcaaaatcctaaaataaaaatatccaaacaaattattaatccttcccacgaatacaaatattaaatatatattttattttaatatacatacatataattttagttatttctatttttttatcatatagatattattttaaatattttatttcaaatttataaactttatagaattagaattgaagtaggattccgttcaaaataaataaataataataataataataaaatgaattggagtaggattagatttctcatttt

SEQ ID NO: 318715 - DNA, 599 bp, Cannabis indica
ctcttcatcttcttcttctttcttctcatgtactttatattatattatattattttataacaactacatatttatttgacaaatataatacaatgtgattttgaaaaaaaaatcacacccaatatgccaactacatatttagttttgttatttttacaaaatatgtcaattaaagattttataataattttattagaatgacataattataataaaataataatattatgcccttgtacagaaattattctcaaagatgacacttgccactaaattataaagctagtgcaaaatttgtcattaaattataaaaatagtgtaaaagagtctctttaacactcatctacctataatttatattaattcatttttttagaaaaaaaaaaaaaaaccttaaaattaatattaaaggacaaaataacaacattgcatttcttattaaaatcactttcagggtcagccctgacaatttaggaccttccaaaatatatataaagaaaatattgaaaagagtattatggattcgaattaaggctcaaaagaagaatgtgcatatatttgcacatagaaaatatttaaattatatttctttaacaatc

SEQ ID NO: 318716 - DNA, 1074 bp, Cannabis indica
ttattttacaatagaattgtaataaatcttaattttcttccattattataaaatctctaacaataaacatttactatgtactttttgctaaagctatgggtacaaattatattagggcttaaataccacagccacaacaatatgttatgtaagtactaaagaaaacattgaatttcagttcttgttcgatcgattggtgagctagaaaattagcatatttgattgttgaagctgacattttttagtatcattttcttttcatgtgtggtctggtgatggtcttaataaattctacctggtttgaaccaatttcatcaacatatgaaattgaaaaggacacaaattaccaaataattataatatgggaatcatagctactaaatagcttggctgatgccagaaaaataattattaattacatccaaaagttcttaagctttaattccgttgcctaactaattaggcacacgaattagtagtaaattaggtacatatatacattagtagtaaattttgttttaaaaaaaagattagtagtagattaatactcaatcataaaaaataaaagacacaagttaaattattattatttaaagagaaattaaggaacataaaattttatctcattttttgacaccattgctaaccaattttcatctcatcattttcttcatttttgatgatcgtataggattctatagtaattattcttttgctatcttttttactaatgatgcaaaaaaagtgattttttttttagagagtgatatgaatcactctatgacaattgttgacgcagaaaatatccagtcaacaagctaattgtctagttaaagatatacaaagttagaatatgagtcactataaataaagcgactaatataaaactaaattatctcagaaatttagacaaaacaacttagaccaccttcaagaggcatatgatgtaaataacctaatgggccaaaactacctacaaaataaataagtataaaaaagtagaattagcatactatacaataattgtgctatgaatttttaaattaaggataaaacacaaatattatgtaaaca

SEQ ID NO: 318717 - DNA, 1048 bp, Cannabis indica
atgcatgggatttttacgtggttggagcaataatgagccttagtccacgagtctttgttatttatgagagtatttattacagagaatgttcttggtagatgtctctcctatttgctctctttaattcttatgaacccagaattctcgacccctgtttcagtgtggttggggggtgtttatagtattattcttggaggatccctagaactgcatcacttgtctttccatgcaggttccataaaggcacatattcctagcagatacaaaataggaaatatatgacctatatcgtaggtatcttaagagttgggtggatataatcttttattccttcttgattgatgtgatctttcataaagtagccgtcactaaccttattaatcacaccgtaatagctacaaaagaggggttacgccatcagtcatattacttatggcagttcaagtacgttttctcccatgcggccattaaatgcgaggtgactgttcaaatagagtccagtacctcccggaggtgcccgagcatagccctagcctccaggagtacgtggatccttctcatatcttctccgggagttatcttctcatcgacactcatgttgccaaagacttagtcgatttctttaagagctgagcctctcagctccacgtgtcgtctttatattggtccacgcattttagcaaaaaagaagggcaacagtaattaataatataatattattatttttattaatttttagcgacaatatatatatattatatatatgtatttttttgtaaagaaattaattaattgtcttaatttgtgtttattttgatgtttagtttttacagcgagttgatgcagttggtggggcgatatgggatcagaaaatggtcaaaaattgctaagatgctaagtgattgagtgggaaaacagtgtagggagagatggttcaaccatctgaggccggatattagggtttaattccttttccatctgtttctctccaccactatacttccttccatacatattttcaaccaaaaaacaaaataaaaaggaaaaa

SEQ ID NO: 318718 - DNA, 653 bp, Cannabis indica
gtaattacaatactttttgagatttaaaaaagtaaaagtagttttgtaaaaatgtttaataaattgataagcattaaaaatgtaaaaaagtaattaaatttggtacctagtgtaaaaatcccaataatatatcatagtaaaatactaaagtctcaaatttgtactaatattctcgtccttttaattcttgtcctaattataattttgcgaattaagtcttctatcacattatctgatgggagacgctcctcaactataatccaaaacaaaagcacaataactttctgatcagaaagttagaatgatgaagtgatccctttattttttggaaaatagaatagagattacaactcttatcaaaatgaataaaaaaagaaaaaagaaaagaccaaccaagcaatattataatattttatttaaaaccatacctcaccagcataaagatttccataagttctcattacaaaatctattttcctcaccgcccaactatttaagttataaactttgttaatatcaatgcattctttttgtattcttgctcttggcaatcttatacatcaactttatccatcttcagcatctaacttgcataagatagagcctgtaacaccccgattttccgagatgtcacataggatagtccgtataaa

SEQ ID NO: 318719 - DNA, 1187 bp, Cannabis indica
tttttgattcgcaggtttagatgattctggaagtcgacattgccggagatgaaggtggagcatggctaaccaaccaaccacttatttattaaaaaaaatatattaattttggtaatatagttttgaattttgtgatattgggaaaaaaaataaaaaaaaaatgggccatgatgaagagaaattgaccggttgacagtttgtattttgtgaaatcagattgagtcgctgcgaaagcggtgggagcaatggtggttcgtatcaccaaacacttaagtccaaagccaatagaaaaatgaaaaagaaaaaatgtcatgacatttgtggggaccatatatgggaatactcaaacttattaagaagatggcaaaggaaaaagagaaaacccataatttaatgtgtccacatgacagctggtatgagagttcctggttcatgaaattgcaattcaattttaagagactaaataaataaaataaaataaaataaaactttaattatttttattgagaaaagatacataagagtgaagatgaagtgtgaggagagtactaatgaggatttttggtgagtattagatgagggtcctcctccactcaagtagcactcaaaagggtggattccagttagtgacataaaagtgaaaagaaagttgataaatgccatattttgaagaagttatcctatgagttgaaattatacatatatgtccaagttcaacactatttattaaattgcgtatagttgaattcaaaactaaatcttacataatctcaccatctctcatataaatcgacggtacttttattctttttttgaaggatgactttgaaattaagttcatttagaaaataaattaggatgttcatggtatacggtgttcaagcattggtatatgacagttattttaggttgattagaatttttgtattgaactttaacctctactaaaactaaattgtatttttaaactttttacactgttaaaaatttatctaaattatttagagtattgaattatatgacttacattaacatttactatatgtatttaaaagtattttgaaagttaaaagtaaatacgtgaaatagtgagcaagtccgctcttaagcataaatgggttaagcccgtgcttacggtccatatttttttagggcccaaaataaaaaataataaaaaaatttattag

SEQ ID NO: 318720 - DNA, 1226 bp, Cannabis indica
atgattttcaaatcataaactgcttttacactatatgatatgtaatcaaatcccatgattttagggataattgttgtgaacatatttcggtcaactctgtaaataattgtccactatgtaattataaatagtggcaaacaagatcaaaaaagggatgaaaaaactcatacaagagaggccctaaaaaaaataatcagaaatctgaataagattgacccgtggactatgcagaattttaactacaaaaccacgtaaaaagccctgtgttcatattttttattcttatagctttaattttttctgtgtgaaatcaaagctcaaatttagttaacgaaaacatgcgttaacgaaaggattttttcctcaaaatctaacatgaataactttggatagtgtgtcctcatgccagactttaattctcagatggtctcctccaccttgatgtttttcagagtactttaaccagaggtatggttttctcttaaaaaattatccattctgtcgaggatctgaatgcttgttcctcataggataaatttgaatgtagctctttgttattgtaacttaggacatggggtttatctgaaacatattgccctaacactgacatatgaactacattgtgaactctgaacaacgctggaggtaaagctaatgagtatgctacctgcctaatcctttctagtatctcaaatagtctcgtaaacctagagtggttatcctttaggaaatttaacactgttagatcttgaaggataaatattttgtagtttcaatttttaagagctacattccataaatgactacttagatttgggttacatcgataaataatggtggaagctcataaaataagaataaccttgactctcacttaccaagataacattggatttttattttgattgaatataaggttgctaaaatatttttatttaactaatggtgtctttgactgttccttactgtaataccctaagttaagaaatggattagcaaaactttaattagataattatgaataattgaggaattatattattatatagttaaatatatgtgaattaatatgatttatgctatgataagaccccgttggtgagccagggacattttagtaattttgacccgagaagggtaaaataataaaattaatttactaatgtgcttatggaactaaattattatatagtatgtctgtgttgtcttttttaggtgtgttttga

SEQ ID NO: 318721 - DNA, 1894 bp, Cannabis indica
aggcagtgggcctgccacttggactccaccgagatgctcacgtcaagctggccagctgcggtggaccagacttgttacgctattgttatgacgggattcaccacattcgatagtattcagtggggatcacagttgtgactggaacccgagtgtctggatttgcaatctatgggtcttgagggagacctaaagatgcagatggtgtgacaggagttcttcttgtgttcaccatggcattggatcagatcacgatatccacactctcaattaaagcaccaaactgttgaccataaaaagtgatcaaccgacagcagggtcaacagatctgatgctttccacgtgtgtgcacaaataagaataagaaacaatagacaataggatttattatagaggtttggcccccttgtgatagcaggtaatgacctactccccttttagttgtattgatactgagggaatcactatccagatcgctctaggtgggatctgctatagtgccctttggattacaatatattgatgcttggcagactcaagtgttgaacaacctagggtgttgtgcaaccaaggcttgggcatgtgagagagtgaggaagagtgagagagtttgatacttagaggatatgagacttctagcttagaggaggcttaggcaactaaggtttttagctagaggttaaggcctttatattggaggcctaaacccaaggtttacaacttaatcccttaaaaatagtatagttagctagaatttacataagaccaaaatgtccctagattctagatacttctcaacctgtttgtttgacttttagggcccaatttgtagcccattcttgatgtgcatgtgtaggtgtgtcatgtgggacccactcagcaatccttggccgaccatggccttgtgctagccaagttggccatgaagctgtttcttggcctggcgaccataagagccgactaggggtggctggctagctctcgagagcgaggtggattgtcacttgaaccttgtctgagtgtcaaggtcttcgttggttcggatgctgacttgtccttccttttagtgaactgcattgccacgtggcacatgttttgtccacgttaagcatgccacgtaataaggacaaaaattgggataaaagtatccaatgtcataaggagtgggttggggccaacctagctccttatatagaacaaacatcgttgaaaggtacctgataccttctggggtgatctgtgttcgacacatcctgaagtaagtggcaatatcacaaaagtacaatgaagaggtaatacgagtctttaatcgatatggtactttgaccacgccatccagttgagggctagtctatgcgctagttgatctggaggaggtatcttacaatgcatattctcttaaaaattgtccttcgagagagacgaaaaaaggggaaatccatctatctccttgtgaacttgcatcgagaattttaggctcaagggattggaccaagacatggtccagactgagcaccgaaggctcaccgagccttttcagtagattaccattgctatcataatgacctaagggacaattggaaaggatgacacaaggcccgcgtctcttcctcctaaccagtacaactttctcacgattggactaagcctcgagtctctcattctcatgatcagtttcggagctaacgtcgacatgaggtagggtaaccccttctgcaatcttgataccaccccttacagtcgatctagccatatgaaggtcgtctggggtcactctacagttactttattttgtgccaaccatggctacaaggaaaacaagagacctacacagttgtcacctccccaattcaaacacctggcactacctgcatggaagagataaggggaggtgagc

SEQ ID NO: 318722 - DNA, 980 bp, Cannabis indica
aattttttttttttttaaaaaatataaattttttttactttttttttggctgtaaagtacccaaattaatttataaaatataataatacaataatacaaataccttttagctctatttagtgtttttttttcatttatttgtttctttgaatagaattattgtcacatgatttgatctgtcattttcggtataaagttttgagaagagattttttttttcttttgaataaaagcgtgcatatataaaaattaatagacctcatggtcattacagaaaaggtttgtcggaatggaagaaaacgagatacaactaaactgctagtgagtaaacactcattttgccatattatgggctacaaaattacaagatatactaatagtagagaaaagacaactaacaaacaaacgagagtctatacaaaaagagacatagttgtcaagcgcccaataaatctccttctcattaagcgcattgataactatcttagagttactctccactacaaaatttgatctgttatttttggttattattatttttacaatgaagctttaaaagctttgttagttacttttgcagctttgatagctttaattctataataatattactaactgttatattaggaaattcctttgaatcattccaagattacaaaatcttcatattctagaaaaaaaaaaaaagttataaacttatattgatagaaagcatgacatatttagaacaagagtaatttgaaactagagaacaaaaaaatataactataactatacactgaaaactaaaataaaaaaattactaatacaaatgactaataaacaaatcaactaaaattagcctaacaattctaataattaggacacaaaggaaaaacgtgtccaatgttagtgaagtgtatgtttctacatacagcttcagtatctccatctcctctattattgtgtctgttactccgacggtgactatgaatgtgaag

SEQ ID NO: 318723 - DNA, 1647 bp, Cannabis indica
atttttaaggatttttcattacccacaatatttgacataaaatatatttcataaaccaacctttagtactagctagccataaatgaaaaacatacagtactagctaactaaggtgaagtactagaaatgttgacacatgcttgcactactactcatcattgggtaatcattaggaatcatttgtgtattttaatattacttacatttaatccaataactgtattaagtgtaatacctttgaatgttgagtgtttatataatagattttttaatacgctacagaaaacattgtcacagtatgtgtacatccaaactttcaattttttttttttgagagaaaaagaatctgcaaaaagaaaacactacaaagctcaagcagctacaaaacgaattagaataattcctcgtgggcttcttcacgcaacctgaacgcctccttagccaacgaatgggccgttgtgttgaactggcgtggtaagtgcaacaaggaatcatcagggaagttggagtagagaagcctgatctgagaaacaagacctgaaagtgcagaatggtctttccaaacatcgttgaccttggacactaaattctgacagtcggagaagatgaaatcaggcttcaattgggaagcaatacaccaagagataccctgcatcagagcctgaccctctgcaaaaataagagtggacgcaccaggcaagagacggttttacgaagcaataattcgatgaggaccaatcttgaaagtgaaaccaatccccgttaagccttggttatggtctaaagcagcatccacaaatagggctgtggaatcctcatgaaaaccgtctattgagaacgattggggatggtgagtgagctgctgagagactggaactgaaagaccatcaagattgttgtgttgagcttcatggtaatcctgtaaataattaaagacaaactcttccacatttttagtagcaattgatcccttaaacaataaagaatttcttgtgttccaaatgtgccaaattaaaccaacaaaaagaggaaaatcctgttttgaaatgattttcactgcttggagatagaattcctgaatgtcagtccttcggtaatcacggtaaaaattttaaatcttgaaaagcttccaaatatgctttgctctgggacaatccacaagggcatgagtgaccgattcaatattattaccacaaattgagcaggaaggttgagggattacttttttatgaaacaaatttagggcacaaggcaaaatatggtggaaagctttcaattaaaatagatataaatgcgaatccattgtatacatatattaatcaaaacacacataaaagagatgaaaagcataacgtgaagtctataagtgtcagtgctttctttttaagggccaattttcaatagtaaattataaattgtaaaatgatataattattaagattctaattataataataataatattattaataataataattataaagatatcaaaatttatgttttataaaattttatttttgttatctctatttgtgttttcaaaatataaatttaatatgtatttgttaaactttagtgtcatttggtaacacttttgtaaaatatttttttttttgaaaagcttcaatccattaaactgccaaa

SEQ ID NO: 318724 - DNA, 1063 bp, Cannabis indica
agaagattgaatgctaagaaagaaaaagccaaagcagactaagctagaccctatgggaacgatctgagaaaccacatcaacgatcgttttcacaaaagagaattttcaagtgataagactcaacacctggaatgcaaagtcaaggaattgataagatcactgagaagatttctagaaagcaaagtggtgatgtgtcaactctgaggaagaagatacgaagccttgtgtaaaaagaatcattgatgcaccactgtcagagcatttcagaatgccacaaatggagctgtatgaaggatgtagagaccccagggaccacttgtccaaatacaaccgcatcatgcaagttgcctaggccagtgatgatgcaaaatgtttatgtttttcattaacactaagcatgtccacggaggactggtggaagaggttatctttgggatcgatccataactggagagacctacaagtaatgtttagaaagtagtttatagtagccaaagaatatgacttggaagacaattccttgaccaacgtcaagcaacaagaaggagaaatcttgaggaagttcatcaaacgaatgatggatgtggctgctaaagccaaggtcagcgatgacatgaaaatagtggccctaacatcaggacttacaactggatctttgttgtggggagatcttcaacgtaaaagcgcagatacattgactgagttcttgacaagagctcaaggatttataaacctagaagatccatatgctcaagcgtatagagtacttctagcacctcccactcatgtaacaaatgctcaaccttcgcaaatgacaactctatccatttattagatattaagtttagttggttgtttattcggttaattctattattttgtatgtcggttatgttgacataacaacttcagctatatatatagctatcttgtttgtattgcttcattcgaattcaatcaataaagactattctcctttttctctattttctctgtctttagtctttacccactattatggtatcagagcaaaaataaacaaaaaaaaaaaatccaaaaaaaa

SEQ ID NO: 318725 - DNA, 810 bp, Cannabis indica
atgaaaaatttaatgatgaaaaaaattcaaaaggaatatataatctaaagatttttttttaaaaaacaatataaatatactttgattaagtaacttaaaagaaaaatatatcatataatattattaaacaaataaggattaaaataatgtaatgtatatcatataaggtatgtattaaatatgtaaaaataattttttaaaaaattaattaagcacataatatatgaaagctataaaaactctactatcatcaaccaaccacattaattagccactagtaactgttccatgagtaaccacccttgcccattggtgacaaacaagaaccatcaagagtttgacattctaaagcaatttggtcacacctcatcagcatcagcaatataataacagaaaataaatatgaatatatatacttatcaaatatccatattaattaatgtgcacatcaataatgagaaaaagaaaaagaaaaacacatagatttacaatagtaaaagaatttactagaatttatgaatataggaatagaaacgaaaaatctgaacggaacctcgaacacgatcatagtatactttgattaatttagatatttttctccctggtcggaactccaaccacaaaagacgacgccatcaacgtagaagatgaagccacacactaaaaagatactgggatgcctaaatctcccatctctttcacccttctgcccatattatagaagtcttttttttttagaggaaaaattgctattataaattaaccaaagagtcatttacaataacaaaatttataggcggaggaatacaa

SEQ ID NO: 318726 - DNA, 1494 bp, Cannabis indica
aatagatattcacccaatacataattacgcattacataatcaattaattgtcttataagaaaacctgactttgatgcttcataaatcatcattaccacttgttgtccatgagctacgtaagtcactatcgttgtctgaaaaagcactcgataagtaagaaacctatctacagtttcaagggagtaattacttatttaattaacggtaatgaccgtatctttatccattctcaacaagggtaatgaccgcatctatccctcgatcataatcgagtcacaaattataataattgttacctcaatcatatttgagtcataaatgataataattgtttctaatcattaccttaatcataattgagtcagaaacgataataatcgtttctcacattacatgcttagcagtgcatataccttttgttacctcggtccaataattaggtgtgcgcaccgacttatgtgggacaaactcaatgatcctaagtcttatgtcacaataaataaacttggtaaataacttatccaaactccagaataaccttaattccataatcagacaactctaacttcccacagcttttaagataacttaaacatcattaaaatatcctaaaccaagctgtaaaaaaaacaccccaaacaaaacttgttttgaagccaaaactagggtttccttgctggcaaaacaagttgattggttttacaacacctgtaaaactggttaaccggtttcccctacagaaatagaaactctggttttttgaactaaaacccaaccaaaactccatcaaacatgttcaaactctccaaaacagttatatcagataaacacaatgtatacaaactatcaaatcatagtgattcatcaaattaaataaaacaccatagctaagtgaaattaatctcataaaacctcatctccaccaactcatgtctagtagctctatttctaaccaattcaagcttacgcaaaccttaaatcaaagttagaaatcgtgctcagaattcaattcaatctacagccctaaattcaaacaaaaacccaagaaagtttaacctaaaacccttacaaattaaagagaaatatgaggaacttacctcaacacttgaagaactcctagaccttgatagttcaactaggaaaagggtgaaattgctgaaaaaatacctttgttgctactggactctagggtttcgaaaaggaagaggtagaaggaaggttgtaggctcttttgattatctcctaatttcttttctctctattatcagaataatccttagataaatattataacctaataataattacaattcagccaacacttgcactaaaacaattaaagacaaattagggtaaaatgatcattttaccccctcccaaaacttatatgtaagtataacctagggggattttggtcttttctaacttccccgaatgaactaacaacttgactttgtaaactagtctggtataattccaacataatacaactct

SEQ ID NO: 318727 - DNA, 1098 bp, Cannabis indica
taattccaacataatacaactcttattgtcgttacaattctgaccactccgttgagtttccacatttgtcgaacccaaaaatattttattttgaaaatagtttctacaatacccccataatccgataaaatctctgtaattaataaactaagctttatttaaccgtttactcgtatttcactaactaactcgtaattaacttaagtagaattacaatcctactctaatacccacttaatcacatatgtaatagaatatgtccaattaaatatcattatatattctgggatactacaataagtcttcacaacccctgattttttggctgccataacaacatctctagcaatatgctcttcaaggcctctgataaacttagcttttcttacagtttcaatggccacttcatcagaagaattgttagcaagcctgtcgtacttgatagtatatttagtcacagtcatgctaccctgaactaattgtgcaaactcttccgcttgagcaacacgaatgaaatcattataataattctcgtaaaatattgcctgaaatgcatcccaagtcatggtatacagattatgaccctgagaaacaatcttccaccatatctgggcatcatcacataaaaagtaaataacacatcgtacccggtcattatactcgacctgcataaagtgaaagatagatgtagtcatactcgtccactattctgccttcactgggtctggaccaccctcaaacataggcaaattttgtttccaaaatagctcataaattggttccatatgatccccctattaggtggcactacttgaggtgccaatataggtgcaaggtgagctttttgctctttcaggtctcggatctgtttccccttattttctaatcataacatctatagtagcaattacttgttcccaatactgaggtggtaagggattttcttccttgccatctatctcaagcccaaacagctcgctaagtggattgtttgattgctctggctacataatttatcacacatttaatcaacatcttctaaccatttaaaactcagacagatttcaatatcaaatatgtgtataccatacacatatt

SEQ ID NO: 318728 - DNA, 1140 bp, Cannabis indica
atatatatacaaaatgatgactcattttaatctgctagtccaattgttgctatttgtccatcttttacttttcttagcctacttcacaaataagatttgcagttaataatctaacttatgtaattaagaacttagtatacgtatacttggattatatatatatgtattaattatttacacaaagtataatcttatatgcgtgccatactgccatcttgaaacgtttcttaattaaactaccaatgatctatttattaattttcattaaaaacaaaatctacttattaatatttcatgactcatgagaggggtgagggtatacgtgatgagtgcagtcatgttaaagttgagtgcaggtactaactctcctaattttcaataataaaaattaaaaaaaaacaatattaatatatattacaaaaacaatattcatccttaatttaagatttaggttcacttataaaaaacaatattacgtacttctctgaaaaaaaacaatattacaaaaagtgattacccacacttatgttttttcgaagctgaaattccaaaatggccatttatttagaaaatatattaatcaatttttgttggtcgatttgtttgggtataagcattctttttaagtagcataatcatgtaattaacgatataattaactagacacatcttatattattttacatttaatacttttttttattgtactatgacatggtattaataattataatatatttatataaattaagaatgacgcaagaaagatacccaacagggccaacacaacttcgaactaaaaattaaatacaatccactgttatgttttccattaggtataaagtaaattataagtaatttaccatatatgttatttcaaaataaagttaaacaataaagtgtttaattagatgtactaccaaacatagtattgtgaaacaaattggtaaaagtatataaatatatttataggtactagaagaaagttacgtgcaaggcacgtatatttagttttatgttaggtgttctataatttaattgagaaagatttaataaataatcatataatttaaaatgatttaaaaattaattttaattagtgtgtggggttatttgaaaatcaatagtgaaaagtcaaat

SEQ ID NO: 318729 - DNA, 719 bp, Cannabis indica
ataaaaaatcattaaaatttttctcttgttacattagaatgatctttccttcctttttaaaatagaatagtcattccaccaaaatggtggaaagagcattctattggaatgtcattctaatactttaaaatgcaaccaaacaaaaaaataaaattaatgaaaattatttccttttcattacctaattaaacgccaccttaattcaattaaattgaaccatgtctaattctaaaaaaacaccaaactaacatagctgccccatgaaatgattgctcacacactaaacaagaaaaaaaatcagagaaaaacatgccattcttgttggtcacctaccagtacaaccaacaccagaaacacatatgtttaagaatattcagtacatgtatctttatattgctttctttttataaaagaccacatgcgacatgcttaggtaggttcataattcataatagaaattttatttatttatttattattggaactaattaaggtggcatttagttggaaggaatgaaaatatgagaatgggaatgagaatgagaatgagaatgagaatagaaatggaatggaataaaatttaaaattagataaaaaaattattaaaatttttcaaatcttgcattggaatggtctttcttctatttaaaatgaaatagtcattccaccaaaatgatagaaatgtcattccatcggaatggtattctaatagttttaaa

SEQ ID NO: 318730 - DNA, 2215 bp, Cannabis indica
ctaagaaaacattaaaaatgtaagcaaaaacaaaactctttaaaaaaggatcattactaagaactctttttaaagacaacactcaaatggtactactaagaacttggacaaaataaaaactttactagtacgtactactatattccttgaatggtaatcagaactattcctcatcttgagtttttttcattgtttttcaactctttctttcattgtgtactcttcaatcaacacaaaagacccgatacctaaaaattaaatttaaaatatgcatcaactgttaattaacatgtttaattgagactaatcaattttctcaaattctttaacatatacataaccttatccaattaaataatataccgagaatgaggagatcactcggagaaccaccgataaaagaggaagactttgttggaccatcgagaaaatcaaatgaacttctaaaaaaattaacattaacaatttaaaataaataataattatagatagtttcaaacacattacaaaggtgggctgagttgacaacactatttaatgagtcattataaatttattatctaacctgagctaccaatatagtgtacaaagatgcacatagcttgcaacacgttcagccagttccttaacaggaattgcctcaccatacaaactgcaaaagtagccaatcaacggtcatgacaaaggaaaaatcataaacagcaatagctaaacatctacacatcactttcgttaactttcttcacatccaaagccaagctaatgaattgtttccattcattcagtttgtttcagacactaattgaatcaaattataaatggcccctttagaaggaaagcaccaaccgaacacaaatttaatgatatttaaatcagaataacttacctttcttaatctagcccataaatgattaaccgaaaaaaaaaggaaaaagactttagaaaaaagaaatatatatatatatatacacacatcattttgatctttaacttgtacttgtaagtgcatattttcctagtaaaaattgatctttcaactgttcttcattttgacaggaactaataaactacttccactcattcattttgctcagacaccaaatgcatccgattacatagtgctttgcaaagaaaaacactcagttattctaaactcagattaacttatatatgatagcctagagacctcaaattattaacccatgaactgaattgaaacttccaatataagatgtcacccataaaactaaagcaacctggccatccatagtaatattaaaaaagaaagttaagcaaataaaacaacaaagttttgtataatttgaccaaatttactggagtaaaaatttaattgggatggtaacacctaacttggaagaactatttcaaatttctaccaatcgcaatatctcgtgcaattaattatgttgattaacccacactcgcagtaaatcggcagcaatcacgacaaagttctcagaaatttctaaatcaagaagaccgaggaggcaaaggtctgcaaacagattgaaatcatttgtcactataagtatagaaaaagtcatcaccatcgtggacacttttgaagtttcctaagcttctaaaactaattacactatgtaaataaactaattacactatgtaaatatgtcttcttataagtgatgatacccatcatgtaaagcgaaatatactcataatcacaaaaacaagtgagtgatgagatcgagaaaaaaacaaaacctttcattgttaaatcgctggtggaggggcggcggaggtgcgtcgccggtggtgtcgatgttgcgtcaccgtgggagagagagagagagagacgaagatggatggagagatctagagagagacccgagtgagtgagatcgagagagcgatggagggagttactgagtgagattgagagagatggacggagtgagttgctgagtgagattgagatagatggacggagtgagttgctgagtgagattgagagagatggacggagtgagattgagagagatggacgaagtgagatcggagaagatggaggcgcgagggtttcagatggagagtttgatgggttcgagagcaagatagggggaatgagtgagatcaagaggtgcaagggtattttaattttttgagacctatacccgacggttttgaaccgtctggcaaaattatgggccgcgttttaaaactgtggcgaatactt

SEQ ID NO: 318731 - DNA, 962 bp, Cannabis indica
tctctctctctctctcaaaacctatctctaagtttgtgattttacttgagaaattcttggaattcaagattggattttggtggtgcttaggtgtaatctttgcttgaagcttgaggtagctcttacaactttgattcttgattttaagtgctcaaattgaagttgaatgttgtgattttgagctttagatgttcttgatatgcatgtatgatgatattgggttaatcttggtacctcatgtgtgattgtgttaaaaaatcaatgttggatgcttgggtaatgttttgagatgattttagggactttattatgtttgtatttgattatgcagttgggaattttgatgaagtatttaagttcttgaagttgggttcttggtgaatcatgctttagttgaagcttatgttttatgttgttaatctgaattttgagggtttatattgttgggttttaatgcatgaatttgtgttttaactctttgattaattagtgaaaaacctatttgatagtttgagagtttggttaggtttttaggcttgaattggtgtgattttgcatgtgaattcgaagctgaaattgagattttctgggttcagtttggaacccaagggccgcggcccgcctctgttgtgtggcttgggaattgaacccaagtgtcgcggtcccatgtgggagtgttgtggcccgccctcttgtttatgggcagagtcaaatgcaatctttgaatattcataactttgtgatacggactccgtttctggagttctatatatcgttggaaagctcgtttcgagccctatttgattatttgtattttgaatgccaagtttatattttttgaaagtggatttagggattaaacctatatttgtgaatcctggaagtgtgactaggattaccggcacttggtcaggagcacccggggatttggaatctccacacttgcgggacatcaggtaaga

SEQ ID NO: 318732 - DNA, 816 bp, Cannabis indica
aagtaatcaatttcaattaaacacgtttttcaattaaattaaaaaataataaataataataaaaatagttattttattaaataatttttttgtaaaaataataaagtgttcaatgtgtgtggtgggtcaagtgtgaattttcacccatttgcacaaaactcacttgcccttggggccctaacccaagtaccaaaattgcaaccccatgtaagactctttttacttcacacactaaaatacttctatattttattaaaatattcattaaagtttcaataacccatcttttttggggagtttgaatttttctttgcacccaaaaaggtatgaatgcactatatctaattttcctcttccttctcacattctataaaaataggtatatataaaataaaatatatttttcaacaaaaaaaaaaagtaaaaataaaatatacatttttaaaatatatttataaaaaaaaaaaaaaaaacttattacaattatcacaaaagaaagtaaatgaacaattaaagaaagtattaaaaatcaatttaagtcaaatttttgaaaattcggatgcatttataaattcttgccctttttttttcaaccaaatggccttgtgtttaggctaaagaccttctagaaatattgtttattagtttggaaaaatagaatacccttcatgttaggacatagccatgaaataaacatttgtctcaaaggccttcactataatcccactcacaacctagagggcacaaacaacacactatcacccattgtcaatatcagttaggtttctttaaaaactatatctatacatactgata

SEQ ID NO: 318733 - DNA, 944 bp, Cannabis indica
gtgtctacttgctcctggtctgcgatttaatgcctcgtacaggctccctcccacggacgatggccctctcctctctctgtctcctaaatcctaaatcccatcgggttggggcgaagcatagcttattccactccttctaggtatgttcttcatctcctgccactcaattttttctaagttcattttctttgttattgatgaattgtgtcagcaaaagatacacaatttcttttatcttcttaagaaattttagagtttatatgcatattgtcgatattttctttgcaaaatcatatataacgtacaccaccctaattaaggtttacttgattactaagaaaattcaaagtaatcatcattattattgcattgtcacttccaatactcacatgcggttgatcttaatttctattttatgctcttttgggtgttgaggttgaagcatgtaaatatctctaataaataaagactcacttactatatctgcaatacacattgttttagtaagacatcaattttagttcgataatttacagtgtataaaataatattttccttaatttagatattacagaaaaatgtaattcattttgctttggataaaattgactattttttaaaaaaaaaattgataaaattgactattgatcaaattaatccatttgttttttttaattctatgtgtgactactctcaatattttttttttattattttaagtaatctcgtagactctaagtgcccggccataaatatgatgaacttgatttttgttcttcttatatgtgactaatatatgtagataccatcaattttatcctcttcttattttttctcacagagactaaaatacaattgccatgatctataaagttgaacaactcatggacttttcgcacacatatatatatatactaggtgaatgtacgtgccgagccacgtat

SEQ ID NO: 318734 - DNA, 908 bp, Cannabis indica
tagagatcgttaatccttgaaccacgtaaaaatccttctcattcttatttttttttttctatttctttaattttattacattttaaatcggtttccaaaaatctcgacaataaccattgattattgttacggttgatttgtaaaatacttttttaaagcactgaccaggaatgaattggaatttagcatttaaatacatgtatatcaaataataaaatgatttctgttggtttatttatgtatttattatttttaccaaacttattgtgttctttttttattttttcaaagtaacctttattcatagaacaaacattacagaggttctgccatatctgctgatagcccaattgagcaagatgaaagtcaatacaagtggaaagcccaatagctatagattgataactcagcccaaaccgtaagtgagaagttgatagaagaagaaagggataataacataaaacaccaattttttttaaatttttatatctttacgtttagatataatttttttatatttttacaatattctataaaaataatatacaaataacaaaaaaatagtaataaaataacaagtgtataatataaactacaccaaaagaccgtattttatataaataaaatttaaaaaactataaaaaaaaatattaaaaattccgtatggactgtattttcgtaattttttttgttattttcgtatttttttgaaattattctgattagggataaattaaaaaaaaaaaaaaaaaaaaaaaaaaaacctaacttttatatctattaatcaaaatacccttatattatattaaatatagcccaatatacactcactctctacttaaatctagtatataatttacattaaacctaagagatctaatggggacattatctataaaagtggtata

SEQ ID NO: 318735 - DNA, 577 bp, Cannabis indica
acagaaaatgattgacaagttttgcatgaatgaagcaaaaccagtaagcacacccctagcccaatacttcaagctttcacaaagtcaatcacctaatatagaagaagacaagttgtacatggatgtagtgccctatgcatcctgtgttggcagtctcatgtactgcatggtgtgcacaaggcttgatttggcttatgcactaagtatggttaatagatttatagcagacctaggtaaagaacactggtctacagtgaaatggatactcagatacctgcaaggcttaatggagatgggacttgtttatgacaacaattctaaggaagaggtagaagtgaatggatatgtagaatctgactatgctggaagcatagacacaaggagatccatcactagttatgcattcacagttctaggtggatgtgttagctggaaattaaacctgcaaaagtgttgagttttgtgccctaaataaaacccatttcaatataattagatttactaatttataaagatcagaaatcattctatgttgtatggttcacatgatttatttcatgattatgtttaatgtata

SEQ ID NO: 318736 - DNA, 1488 bp, Cannabis indica
tttattttaccaagacactgaaaaaagatatactttttggcatagtgaagtagaccacatcattgattatcatgcagtataaattcagtgcactgataaatctcaagactaaaataagtttgaagcatataatcgcaattatttttccactgtgatgatgtcactataattatgaataacaatatgttcaggatttaatagagattatatattaaacgtataatcacgtaaataaacatatgaactaaataatagataaagtcaaaatatgatttctgaactttattgattataataagattaaattgaaattatattttatttaggacatgaatcccaacaatttagggaccatggacctatatttttaagctctaataaactcgagattaccattaatctcatcaataaatattgaagtttattaatttcattattactctactataaatgtgaaattgcactcttaaatagtataaaattatacttatagagttatttcttgtaggccaatgatataatcaatataactagttcatccttcaatttattatttcataattagagttagtcaaaattaatgtttttccatcctatttatctcttgaatccttaagtatcgttgattcataatgaacaattaatctataattcaattatagattttggcccaactgaattcactctaagaattaacactttaagggaactaatattcgatctttttagaaagtctggattccacttattgtataacatgtactcagtcatctatattattaagtttccaaaacagaaattataagaatcatctcttgagaaactttaatgagtaaataaagaatctaataaacacaaacataattttaagaatactcaggatttagatagatctactaatgatcatctttgtgatataaataattgttttatgataaacgacacattggtaaaagatatttgtttatattgatctagtcatgcataatcaaattatatacagtatctttgctaaatgtcgatctacatatgtgatccaaatcaaaatcacatgccactactaattagtgcttagtaaaccgttcctggtaataccatattaaagattttatattttaatacactaccgattagttttattcatatagtatgattttaattttcttgtaatctaacaagatcttacacatcctatatgaataggaaattttttaatatttattaattattttttaacaattaacatattcattgataatatacttgtacttcatatatttaataatatattatcttgtaattagattcttttagaacacaaaccctaacaataccataatcttcctcctcttccatgttgatacatacttggaacgtgtaattttttattatgggtttttttatttttatatctcaaaacagtttgtttttttttttacgaaaatctgcatagcaactcacatagcaaccaatggagcaacctaaatc

SEQ ID NO: 318737 - DNA, 637 bp, Cannabis indica
tcaaatatttgatgcatttaatgtattgatatggattattgtgccttaggggcatgcattgacgactacacttatgtggagtactcattgtcaaaaaatttttgggggaatcaataatttggattgggcgctcaaattacgcttatatcccttgacattcttataaaaatgaaaagaagtgctcattcggcacttgtacaccttttaagccttctaagtactagagaacaccccactccttttgattttcaagaatacatttagagacttcaagcattcaaccttcgatctcagctttgcacatttcaaccaacaactctaacagtgagtaagtatcttaatttatgtacatttttaacttattttcttacattcaacattacacatttttttgcaaaaacatatagatttatgccatacctgttcttcactaaattaaaacttgaatttatcctagttttgttgctgaatatgcttgcgcaggggtttaatttctgaattattgatcgtatacatgtttgctctgagaaaacttgttgaactgaggttctatggtactttggtgatttttgggtattttctcaatctttgagtcaagttcttcgtcatttggatggagttcttgttggaaattatt

SEQ ID NO: 318738 - DNA, 1433 bp, Cannabis indica
caggaaagtttgggtaaggctttcttggaccaactaatttgctaccatcctggagcgtctatgacttcagttctcttcccgcagcagcatcgctgatgagaatttcagagttctttctgcctttgctggcgggaagagcctccgggtactacagctcctttcgtaaccacgataagtaaagggtgtaaaataacaatatataatctgacttgacatccttccgtgattgtcatgtacaattcattcgagaatagggataacaatttgaaccatgtgtttaatattataaattattctaaaaaacaagtgaaaatatctactataactacaatatatatataaaaaaaaaattaattataattatctaaagtagtaaaaaataaaaaacgttaacttgtataatttttctataagtataatatttactcatcagtcactacacatctgtaatttacagtagtcgtccaaataaaaaattatatcttaatcattgctataggaatgaatcccctctctttcttaaatcacctaaatttgtcatgtaaaccatgaactccacaatttttttcttcacatttatgagacatagttactctatttttcaaaaatatatatatttatatatatataaatacatatatccagcagggattgaaatttatgtaaacattaaagaaaatgtgtactacatttattaagagtggttgaatgatcaaaatcatgctttgtctttatgtgacagaagactgttatatttaaatggtataatatatatatgctcccaacttttatgattcagacgaaaaggaagtcttaacaatattttagttttcatatttcatattttaataagtttcaactaagaggaactgtttagaagcttttcgaatcaatccatgaaaatgttcatattatgactaaataaataggattcagttttgcttctctaaatggtttgtggtatgaaacatgaggaaacacagatatggacaaaaatatataaattgatataatctctaattatatttatttatttgactttaaaattataaaggtaaccattagcatgtctaactcatatagtgaatttttcaacctctaggatttgtttctgattgatgatgcaattaatttggccaatactacaaaatgcataaaaggtgaacacttctctctagttacttgttaagatacaaggcaaaacaaattcttatgcttcaacttcaacaattaatctttgaatgttctaaacaagaagaagcaaaaaattggccataatatcatgagactttgaaatcgaggaattcaaaaaaaaaaaaaaaaaaaacaaaaaaaaaaaagaaaaaggacagcagtgatgcttagttttatgagattttctagggtacataccattttggacgctgtgttttgcaaaagttacagattggacc

SEQ ID NO: 318739 - DNA, 1263 bp, Cannabis indica
atacttacttccttgtgctcaaaagggggcgcggtcccacgaggtaagttctgggcagtttttctatttataccagctataatcggcccattaggcataacaatttcaattggctcttttttctttaaacccggcccagaaaaggaaatagccagcccaatagcacaatcaataggccctagtctaatacacatttcattcccactagtcaaccttcggtcaacgcaattcaaattaaaggagggatcgaactcagactcctttctcgtttcaaactctccagaccgaaacttattacccagaaaggaagatccaggcttgcaaaaggcagactgtattttgggaacccacatcgcatggctcgacagtcccgcctcctgggatctacgtccagtcgttatcgaagcacgtctcgaatagcgagccaccgatttcagtctaacagttccaaacgcactagcaaccatggccgactgaaggtgaccggcacggtacagaccaggggaagggctagccgacgaaaccaaagccagagttaaagagtgggagcgtcctcttctttgatggcccaatcttccacatttatagcagaaaatacccaacttctcataattgaagtgtaaccaacaatggctaccaggtaccatttcaaaataacacccggagaatagaggttgatgaaaattcaaaacaatcaaaacttttgagaaacttactcatagggccggattacctccatccaactcaaaagcacttaccattagatgaggagatggtggcatttaactatcgccattacacccgacatacatagacaagtcaccaaactaagaaaaataccaaccacaaacaaaccctcagaccaaagaaaaactacccaggataaaaggatcaaagaaccacaacacaagaaattcaaaagtggtgagaaagaccacagctcaacagccaaacaatagaaaacagaaaacacaagcacatagagagagatagaaaaggaaaatggaagaaaagactcaactaagagagaatgatagaagaccattctctctaccctctggcgtaattgcttcaaaattaattgataatggaaagagtagctcattcatcttatacattctatcacttttccacacatattagtaataagagactctttaacaccccctcaaaatgatagttattttatttgtttaccatgttggacaactcgatcataaatgactcttttttagctcattatctttgatcacaagtgactct

SEQ ID NO: 318740 - DNA, 880 bp, Cannabis indica
tttatataataattattatattgttttagaatggttgtagtcttgtagatggccaaacaattaaatttaatatttaattataataattaatacaagtatgtatatatgagtgagagacataattaggggatagcgaaagaccaaatatccagctccatccttgtcgagaatctacgacacctaatataacaacaccatctttggtcgatccaagagaatctcacccaataatatacacattacacacaccattttttattttttaattttaagaaaatggtccccaaaaaaaccagctataaagttgaattgtaacaattcttcattgagattttaaacaagtttttgattaaatcgagttttattttcagcagagactataaaaaaaatgtataaaagctaaagagagtgagtgagggaccaaaaggactcatcatcacctctcatgccattaacctacaaaatgtaattgatgatttttctcttttgtgggccttttcttaattaattaaattaatgaccccacaaacaaaattaaccactactttatttattccacaatattaatcttgcttagtacataaaatattaaaattaccccacctagttagctagggtagtgtgtgtgtgactgtcaaagtaaaatttttagatcaaggtcatgacttgcatgatttcctagttaatttgcaatattatgactaacatttggctacctagcttgtaattagaaactcaagatgggatttgaccctatagactatagagtgtttaatggaataaatatttatagagtattgttgctagggaaaggagcgcgaattgggggcatggcggagattaattcaaaaatatgagtttcttttcgataaaaaaatta

SEQ ID NO: 318741 - DNA, 635 bp, Cannabis indica
attaattaaaaaatattttgacaactaaattaccaaaaaatacctaacaatcaaaatataaattaaaataatgtatacatactttagatcactcgaatttatataaagcattagtaaaatatatattattatcttttatagcatttctaaggatagtgcattattcccaccaaaatagtggtgaaatcttcacactattctactctaacaatttaccaaattatcaaattataaactaaattaatatgtactaaatttcagactattaataagaaaattttgaatgcataactttttcttttacttttaagttttaactttttttttaatttaatttgttttaaaattaatcataaattatttttaatgatatgcatagttatataagtataaaatgtgaaattttgtaagtaaaatatatatatatatttaatgtgatatttagtgtaaattataaaaattgttgcactaaatggtaatagattttgtaccaaattagtcaaagtagtacaatcattaaagaaggtcttactagctagttgctaggggtgcacaaaatatagactaaaccaattaatttggctaacctaacttatttttttttatagtaaagggttatgttaagagtaggtcat

SEQ ID NO: 318742 - DNA, 805 bp, Cannabis indica
tatatatattttgtctaacattttcttttttacatttttcttacatacttagacctaaattttggaccgaattccgaacccctgacctcgaataaaccttaggacctagacccctgacttcagacccgaatccgggttgattcgaagtctgggatttggattcgagtccaggctagggtccgagcccgaacaccaattcggggtagaataaattcatgtcgtggtatgatatagaatattaattttttttaataaagaaaatctaaaaataattttaaaaaacctaaaccaaacaccattaaatttttaaaagacaaatattttatattcacatttttaaaagcacaattttaaaaactaaaaaaccaaaaacacaaccaaacaacttttttgctactgaaaatttttaaagtaaacatattgaatgcggtaataattcaagaaaaaaaatcttatttatttgaaatttgaacgtctattgtttgattttatttttaagaaattaaggtgcagtttgcaattaatgtaataattcttttttgcagcaattaatgaaataatttttaagttgcacctctattgtttttagaaccaaccatgtttacccagttattattttgaatgtaaaatttcagtaaaaaaaaatataaattaacttttacttaatttattattcaaaatatataataaaactcaaactcgtctcgtgaggctttaagcccctaaaatatctttggcaacaaatgaacgatctgtcacttctgaaatggaaaacgatgcatagatatcatctaaacactttcaa

SEQ ID NO: 318743 - DNA, 1576 bp, Cannabis indica
ttacaaatgactttgaaaaaatagaatctatttttttctggggggtttatgtcttcagaaggaaaaaaaaaaagatttatgatgagggaaatgaaattttgaaacttaagatgcaggggaaatgaaatttcaaatttgaaacccgttaattctaagcagggaatgtcgcctatacattgcctgacagttttaaaccgttagcaatccccattaaaaatacacaggtttcccacttaaaaattatcgcctatacatcccgaatgtttaaaaccgtcaagaatacctattttttcctgaccgttttaaacagttgcttaattgttttagcaatggttccccaaaaaaacatttttaagactgtcgcgaatatctctttttgttgtagtggccacttgattggatcttttagcactctcaatagcttctattttgcaaggagaaatctaatctttcttctccatgtcctgtaatcaccaattccatcaaacctatcaacatcaatttttatactactcatgttaacactttcacaaacgcaaataaagatttaattagaggtatttctattggatcgttcaaaggaacatctactatgtcttcaatgtcatgaactctctgttgaggatcaattttctccatcttttgcttgattcttgatcactttttgagttgaattttcagccaaaatcttgctctaataccactgttagaattagatgactcaatccctacaccaactcaacatatacattagattattaaggtcctaactgaccttagcattcaatcaaataattcacaatcatgacatactcaattacacacacacattcgaattctaaatctttaaacacaaactaaattgaacaacctttgaagattcaatttgcatataaaccagttggaattagcaattcaaatgtgaataaacaatgcaatgatagtaaagaaacataaacaacaatgcagaaagttaaagagatcaaatacaaagttttttccaaggttcaccctaagaattagagttacatccccgttaagctcgccatagaaattggtctactcttgcaatatctttaaatcttgaattacattgatgttgtatgagattccaactcacaagctaactggtaatctccttgatcttactttctctctttacaatgtttctttaaaactttttcactcccttcgctcaaactctcttttgtttttctcactgaagaatctcttctctctagttctctttggactcatttcgcacgttgtattgtattgtgttggattatattttattgtgatagattgtactgcattatattagttaatggtgttcatcaaactactcacaccgcacaaaccgcccgcaccacaccacataaaaaatatagtttgaaattctgcaatgctgttgtggtttgcattttttgtcaaaccgcgtggtgcagtacggtttgtgattttgaatttaataattgaggttcaaaccgtaccacactatatattacaaagttacaaactttacaatataatttttatttatttttatataagaacaaatatatgtgtatattat

SEQ ID NO: 318744 - DNA, 4615 bp, Cannabis indica
agcaccacccttgtagactaacacataattcctaatacttttcatatatttctgaatatacttaactgcagtccaatgttcctctcctgggtttgtatgatacctgctcaccattcctactgcatagcatatgtcacgacagttgaagaagccttggtttgaccagacccctccgagttcccccctttggaactcttggattttgagaccttctagactggagggtccacaatagtcaataccttagagaggtcaattacttcaccggttggcaccttctccttggacgtaacctcattacctctaaatctcttgggcgggggagtctggcccgagctgtccccaactctcttcttcaaagcctggagtaccttctcggacatgactgcatgaaaacaacataaaaaaagttaaaaggcaaatatgatgcaaagcatgttatgaagtaaataaatgcaagtgaaaaattccctacacgtgggcaggagcattcacccgaataagtaaagacgaggcatcatcatccaaagagtcttcctcatgctccatcaagatggctttttgtttttcctccactggggcggatggccagacaggcatatcaggttccctaatcgtgatagcacgctccactggtacttggtcactaggaagagtcttcttcctcttcttgctcggcttctcctgtttggtcaccccaaccttgctaggcttttccttcttcttctcattcacatgcctcatcacaaagtcctctgggaagagtttgcacttaacataattggcctcagtggccagaagggtgatgttccaagcaacatccggcagttggagaattctttgtgccctctccctgagccccaatgtgatgggagggcagcagtatgagggaatatgctggaaccgagtgtggacagtatccttaccctatcttgctaaaatcagagtccacggttcccgtcagccaattctactcgatttgagaaaaatagaaataccctgacctgctctgcttggggttgatttcagatcaaaaagccagtttatgttgtgcggggatggttcgccccatcactttgaggcataaagaatgaacagggcggataaatatttgatgcccttcggagtgaactgggttggaaaaagatggtagtaatctgcaattcttctaaagtatggaagtaagggcagcatagcatcctacttagtgtgagcgcccaaccaagcgcagtacccctctcttagactagttgcccagtggtttggagagggaaggaagaattcgacatcccccaagtaaccgtgcttctgcaaattcttcatttttgcttgggtcactatggatggaggagaaacccaccgagctcctgctacactttgtcttctctaatgagcaacctcggtgtattcctcaataacatagtcttcatcgacctctagaatttttccggcctcggacacaggttatccattttcattaaacccaccaaagggcaacctccgagccgcaccttcttcctcagcttcagaaggagtgtcagggcggacctcgccctgatcctccatctctcagactttagcatccccttcaacatcttcctcctcaacagtaggtcgagcctgctccgcactcggcattgtggcaagccaagctacgtgtgggtacgacagagaagacttttgcacttttgtttagtgcgtgccatcatcctattcctcgaatgagcctgagtggtatgtttggcaatagttacaacgaatgtagcaatgggcgtacctacataacaggatttggccagcctacgggtaaagtatctgctgtatctggtcagacaatatatgtccaattggatggtaaatatctcctctacccctttctaagctcccagatgaatcgtttgtaaccttaaccttcgatttgaccggggtaaaaatggtgctgcacttcgggttctagagaaggcgtaggttcgctacttatttcgcaatcttcaaagcttgaatttgatagaccgtcactagatgaggacgaactagcacaaagatgaggatgatcctcgtacagaagttgaagaagatcctggtcgataagatgttcgcttccccaaaactcactagggttcatctacaaaaggtaggacacaagatgagtatttggccgggataacgaagagaaacagattgcttacaccaaccaaggaatcaaaaatagaaattttacatgatattgaggtttacaatccagaatttcaaaacataaaattaatgttgattttcactcagccccaaatgggaaagtgaaatttaatattttggaattgaaatcaaaatgaagttataatcaagcaacatggttaagcatagtcaagatttcacattcctaaacataaattttctagggttttcctagagcaagttcaataactatcaaattttttgcagtggaaacccagaaaatcaaatattcaagcataaaagaggaaaaagatgaacttactcactgttcaaagatttagagttgctcgaatgacgctgttcggtgtctcatcgtgattcttcaaaggatttgagagaaaaaggttttcttgctttgattcttcaagaacgaaaaatggctaaaagtggttgattagggatttcagccctatttataagctaattggtgaggcaaagtaatcatttcaaattttgaatacatcgatttcctcccaaaattgtacgttgagcactcaattaccggaatggtaaccgtcaaaacgtgctaatttttaggcgtggtttgatcgacatgttagtcagcattaatgagctgaaaattgaagagacccttggtcagagtaacgtcgaattatcaagcgacacttcgaacagttgccacccattcagatagggatccagactgagtgaagtccacgtgcgacctcaaaggtctcactcatatgtgctgccacatcatagtgcaaatgttatcccattttttgcactgtgatgtggcaccacatatgagtgaaacgtgtccaacattccttgcatctgggtggagatgaatatcgcgaacatacttcaactagcacacttgtatgtataacgtctaattgcccgagcagggtaaagggaagactacccgagcagaggcatgtttggctttccaaactacttaccagtacttgactacttcaaaatgatatcgtggagtccaagtacgaagataatccctacaatcatgggattgaattaaagggataagacagtctgtctcaatcccctattttgtgtattctatttatgtaatcaatgttccttcctattatagacattgtaagcaaaagagaaacattccctcatgcattaaggctctataaatagtgagctagcgtcactaaaaaagggatcgaaagaattgctttagagagagatctaagagaaatactcacatatttcattgtaagagcttagaaagaaaacattgtgttctttgttctctagttaatacaatctaagggcagtaggctattatcgtactaaaggggccgaacctcttcaaaatcgggtgttctttatcacttattgggttttgctctatttttattatattcttaatcgcttcataattgactcactgtcattgactaaaagcgaggtcaacaataaataatacaactaataagctcaacctaaccatattaggattaagatccatagacctatgatgaaccagtgatatttacctagaaagatataatgataatttatgatatcttatcaaagatatccaatgtgttctccatacattcgatactggtaaacttttccaataccatggaaaggacataacacttatccaatatgtaattatactttatcgccgattaacatgtcaatcaaaatccagtgaactaactagtcatgggacttaaacttttgatgaacatataattagaattatattctactgtttcaacaacactataatcatgaacaaatatatatgctttggactttatagaatttatacattaagtataatcatgaaataaatcatatgaaccatgcaacattaaatgatttctgatcttttattaattagtaaatctgattatattgaaatgagttttatttaggacagacaacccaacaccagtgaggtttaaagtaaggtactaggctaatggttttacttagatagaatgtatagacctaaaatcttctcacttgtggtaaaatacaggattataaggttgatgttttccttggcagcacacttagagtttgaagctaaacaacatgatgttaagactactttttttaatggattcttagatgaagagatttatatgaagcaaccacctggttttcaagtgaaaggcaaaggagttgaattagtttgcaagcttaatagatacatattcgataatggaataaatattcgatacatacatgcatcaaatcgggttcaaacgatctgcattcgatctgcttatattttaagaatctggagcaacctgtagtcgtgttcttattgctctacgtggatcacatgctctgtaacgccccgatttcccgagacgtaacactagctagtccgtttaaaaccatttaagataaagacaataaa

SEQ ID NO: 318745 - DNA, 1555 bp, Cannabis indica
aaaattctaaagagcatgaaaatatgatttgtgttggcattactttattgtgtgattctcaaagacaatcaagcttttgataagacctttgtttagttattttagattagtttatattatcttaatttttaattttgagtttttgttatttaaatagtttgctaagggattagcaaaattttagtgtgggggaatttgataagtgcatatttttctattaagttgtgttattttctctcattattgttattaaattaattctttaaacctttaattagtgtaattttaattttttaagattttggaaggctaatcatgtgtttaaagtattttggaatgattttagcatactttggtaaaaaatatcaattttgtagagctcaattttacaaggcagaactagacttgaagccaggggcagagccaagatgagatgattggggaggccaaactatatattaaaagaagtaataaaaattttcaaataaattattaaattcataataactaaaactaaaatataaatcatctctcttgcatatcacaaaagacatctataagtgaatcaatactagatgttttagcgatttctctttcaatatagactaacaaacaatcacttaaaaatttatctataattttgttgtgaagtataatttttactatattcacagttaaaaaatatcactttgtggtagctgtaaaaactggaagtgtaataataagagttaccacttttatacacaagtgaaaaaacttctacttttgcaacctcgcatcacgcttctcaggtggatactcccatatctatggtcgcaatcctgggtcacgctccaatgagttatatcgaacccttctttgatgtcaattcttaaagattttgcagacggttttctaaatttgcatgataaatattcacacataaatttgatgagacattagatatcgaagcttcaatattctttctcttaaagaatgtgtcaattgttactgcttttttcatctgaaaaaaatcaacttcaatacatcttattttctataatatacctcaacttttattttccattaagatttttacctttaatcattgctcttggatgtggaatgcttcaatttattcctgcaaaattgtcactactaattaattataaacgctatttttgttaaaaaaaacaaaaatatatttataattataattatatatattgtcaaaacaaagctcacaaaaatggcggttggcgactggtgtgactatggctaagtttggtctgaaatttaaaagaaatagaaaaataatatacgagtagttttgaattttttaatcaacttttaatatggacaatattactctactaaccatatatattattataattattaaaagaaaaaaggaaaaaataatataacgaaaaggaacaaaacttacttaaagtttgactttttcttagagggggctgttgtcctcaaaagtgagtgttttaatatttatactcgcatgtgcacgaatggtttcggaatatagtgttcatgtaagtgcaaggtcgaacccatggga

SEQ ID NO: 318746 - DNA, 537 bp, Cannabis indica
tttaaattaaaaaattaaaatggtaaaataatgaaataagaaaacccccatcaccccgaatcccaaatccctaatctccattgtttctagcgaggtacccaaaaatcgaaggtttctataaatcgagagagagcttcaaagattcattcgtggaaggttaggatggacggggagggttcttacagtagctcctgtcgtcgaaggtcgaaaagagtggttggttctgcttatcgaagggatcctcaaaattgttaatgtggcattacgtggatcgttagaacatcatggacggaagcaaacccatgacgttgttttaggaaatgcaggctagcatatgtaagtcattgtttttcccctgtattttattttttgttattattgtttatcttaaatagttgaaggtgaaaagttttaaatttgtccacgagaggatggtagagggtgtaagttttttgaatgggtggatgttgattcttgtataaagtgcggagacttaataccaaaactcatgaggaagataagtaagcttgaagatca

SEQ ID NO: 318747 - DNA, 1644 bp, Cannabis indica
cataagggcccaaattttttttccctatgacacactttgtttcagggccggccctgatccaaaccaatctacattatattactcatagagcatccaatctacactaagtgctgatttcatattttgaaccgaatccaatgcacaaatgtgcaaaataggtcagttattttagattggttacttttcaatattaaattatatcatatttatgaaaaaatattttttattttcacataactagcaacaaaataaagtattgttattttatttctccaacaataaattaaaataaataaaataacaaataataaatttaaaggaagaaaaaaatgtatgtataaagaaatattttattttgttttaaattgtatgtaattgtatgtacaaaataatatatataaatatatatatatataagaatggaatatacatttgttctattaagttttgtaatatatttgtaatatatgtattagattttgaaattactattttctttagagaaatttgtggcaaaagtcccttaaaaattcacattgatgcagattagtccccaacttctaaaaatagcagtaatagtacctaagttggactttcgtgtttgtccgttcataccctatcatttagagtgactaacggtacacatgtacgcctcttatttaatctcctttttattttattttatctctttcttttcataaatgaaaataaaatataaaacaaattactaattgagaaaaataaaatattaaccaaattacaaataaaaaaataaaacctaaaactagaaaattaaaatggtaaaaaaggtaaaaaaaatttgaaatcagaaaaccccaacaccccgaatccctaatccctaatctctagcctaatcgaaacccaaatccttcgacaattgattcagaaaaaaatcacaaagatccaaccccattcaacgattcaaaacgcacatcactttgttgaatcgtgacctaaatccttggagcttgaagtcgactgcttgggaggtactcagaaatcgaaaggacgatagaggatgacaatagaggaggtgcaatctcatttccacctttatttgatgttttaattgtaatatgttgggattgtgattttttagaacttttatttttctttcactctttatgtttgtttaccctcactcttcatctgaaatgaaaatagttttactgttaggtcgtgttggtgtgaatgatattgtgttaggtgtacacatttatttgatgtgttgagattcttagagaatgatagtatttaaggcattttgatagattttttgttgggtgaataagtcaggtttcacttagttttaatgtggagctcttttatgtgggatatatatagtgctgatgcgttacagtttgttggccttgatacctattaagacttttgcgcttattttaatgacttgcccctaattacttagggtagaatggttaaatatttcacgttttcacggggaattaaaaaattttgaaataaaataaaacttaacattttattcaaaaaacttactttgtggtatatttccatcaagttaattggcttattactaatagttaaaaggataacacttttggctagttatatatgtttaagtttttttatttagtttatatttta

SEQ ID NO: 318748 - DNA, 1175 bp, Cannabis indica
tcatgggttgggcctcaccaaattggcccaaatattattatattattttatttattccattagtggacaaggtgtacatacaagaaccctagcactataaatataagaaaactcattcatgcaaaaggttagaatctcattccttgagtgctcaggcaaatcttgggttcaaacacttgtgtaaatcataaggcttttccaatcttaacacaataatattgactcgtgggttaaggctatttaacgcctcaaccacgtaaaaaatttggtttcattatttgtttgttatatttctttaactttatcatattttataagtttttgaaaatctcggtaaatattatggtgctttcattaagagttgaagaaagagtgataccaacaaagttgtatattgcaaccatggtagccacccaaaccaccgtcggcaaatttggtcttcgtgatggagatactcccgtggacgatgtgaattctactactcaggcgaaagcaggagtcgatggagacccgacagaagcgaccggtcgtcctgctaagaagactcaacatactgaaaaatatggtgatgaaaatcacatcattgaagatgacccaaaaaatttagaagatgatcctgaggatgaagatcctaaaagtattaaagaaaaagaagatgagtattactatgagccaaatcatgaagtcattcgaatggctaaaaaactcgtcaaaaccaaaatgaagctggcagatcaggaagcattctccccgcaaatacgagaaactctatcaagattagaggccataattgaactaggaggagtggctcactatgaaaatatacctgatgatcttgctcctcatgaaaacaatgctacgaagaaaataaacttaaaagaccttggaatttctgatcctacaagggacaaacaaaaaggtgtcatgagagagcctacaaaaaaagactgctccacagcataacatgaatgttgacaacccttcaaactcaaattttagtggtaaaaccctttaaactactaaattgttagcaaatttaaaatgtcatttatttttcacagtttctgccagcatagaatattgtttatgtgtacactcttgtacatgtgccacgtttataatagtatatctaaaattattatttaaaaatcataaaaaaaattatttcaaaattt

SEQ ID NO: 318749 - DNA, 2359 bp, Cannabis indica
ttgtaacatttatttaatttctttgttggtccttgtattatattacaatagagttgtaatattttgattttcttccattgtaataatatctctaacaatttgttctttggtggagtgataataatttttaaattttttgaaagttcaaaggttcaattctgtatgaatacacttaatatatttctaaatatatatagatatatactgtgggaaaaattataattaaaggtgtaaaatcaaattaattaaattttaaacaattatcaatgacacgattatcaaatcaccatcaataattaaagaagccaagaatgaacaaagcattaaaattcagaaacgattaaagtagtaaaacaacaaaatcagcaccaatatatgttagttcaagttcaatagatcgatgtgatgtatagctttactccagttttggaacaccaccaaatcctctttattgattgagcaatgacgagtacaatacagtcgagatcgattatctgatgagttctctcaaagtgtttcacctctcacactcttactcaagaatcttctccatctacagaagattcttcatacaaaacctaaccacaatctctctcttttctctatacatttttctctctactctcaattttttatctctcaactcaatttgatcgttgtatctaaaatgataagcattggtgatatttataagcttaggatcaagattctaaagttggtggttgcataaagtgagattgttaagttagttaggcaataaccaacttaactaactctcctttgagtgagatatccacgtcagcataagtatgagtgcttccgggagggtatatgagggtttccgaaatcacagaccaaggtactcactgaaggaacttttcaaatgagaaaaagctaattagagtcgattattcggaactcctttccattcttgaggacccttcccgaaaggacaagaaagccttcggaccaactttcgcgagtcaacaacttttttcaaaaaagataataacttttgaagacttttttatttttatttgaaggaactattccatatatataatatataagttgggaattaaactattaatatttcctaaatgacacttttccactgcactaaaaaaatattttagtgtattatcttactatttaatattttgttcatatattaaaattagggtaaataccattttagaccctatattttgcaaaaattatcaattggactctctgctttgttaaatgacaaaatagactatgtatttttaaaattgaacaaatagaaccctgaactcattttttgtgaaaataaaacttaataataatctgatccagagatgttgtgacaaagctggttatattttttgtatatgtttgtgttaaaaattgtcttaaaattggttatattaaaacataaaattattaaaaattgagtttagggtcctatttttaccattttggaaaatatagggtctattttgttatttaacaaaacaaagagtctaattgctaacttttgtaacacacgggatccaaaataatatttacccttaaaattattattgcacaataaaatatttgaactttagtttttattattataaattattaatttttaaaaaattataattacttctaaatagtataacatatacgatgataaataaaattaaacaaaaaaagaataccttgtatcttgtatgtcgaaatgaataaaagtacattaaaattcttttatcaggagctaaccttgaattttagtggatgagcttaaaaaaaaaattaaagctcttatataagaaaggtagtatttttaaattaataaaaaaatatatgtaactttttaaaaaggttaatttttttttttactaattaattatgtgattatgagtgaattgttaaatttttcatattttatttttatagataatttgaaggagtgtgtaatgtttgataatattcaagagtttacagaaaacgagattcacatgatcacatgtataagtttcataaattcaatatttgcctaaaataataataataataataataataataataataataataaggctgtatcatctcattattctcaatcaaagactaagacaagacgtgccacttcggcacttcctttttacaatgatggacgcataaattataaaatagaaaccaactttttaattgtttttttttttttcctaattagtaattttttttcctaaactttgacatatagtaaatcatgccccctgaatttttttggccgttaaaaattccccttgaactattaaaattgttaaatttaaggatttttatctaattttagtaaaaaaaatctaatatagatgaaagt

SEQ ID NO: 318750 - DNA, 2274 bp, Cannabis indica
taatagaaaaaaccataaataatgaacaaattaaaaattccatatttaccgaacatataagaaaagtacatatatttgtaaatttctcaaatcaaaatgaagatagaaattttacaaaaacaaacaaatgtgagattactaaattaattttacacaaaaaattacaatttgttgtcactaaatgtgtttttagttacaatacttgttgtgattaaaactaaattagtgacaacttatatttaaatactatgttttagttacaagtaattttttgttgtgactaaaagtcacatttagtcagaaatttgtgttgtgattaaaagattatcactaaaagtaatttttttatagtgaataaatcaattttcattcttttctaacgagcatactactgaaattaaaaaatatatatgtacttataatttattttatttttttgtataatcgtatatattattactatctaagactaattataaatttttttaaaaaaataaataacttacaatgtttaaaataaaatttaaatattttgtaacatgacactttattagaagtctacagaaattttttatagtaataataaatgttgatgaatatcgttttaagatctaattaggtgatgtataactgctaagagcattatgaatattttttttttagtgaaagtacttgttattataaattaaacagagagttcatctacaataacagatcgtaaataggttgagggatatcctcaaaccaaaaacaagtctcatccacccctaatgcaaactttgccaaaccatgagccgtatgattggcagtgcgtttgacatgtgatacaattacatttgggaaaaaggataaaagacaagagatgtctacaagtatatcattaaaagcagactttgaattgaagggagcttgcaaagctgtagccaccataagagcatcagtttcaacgttggacaatggtagttgttgttgtatggcccagttgagactatggaaaatggctaaagcttccatttcatattacttgaaattgcccactaatcgcttggaaagtgcagccacaaccgaaccagtagaagttcgaatgacagcccccacacccgtgaagttatttgagcagtcgacagctgcgtcaacattgagtttgaaggcaccagcaagaggaggcagccacggtaaagcagcaggtggaggcagagaggatatattttgatgccgaggctgctggtttgaagcttcagaagttgcagccgtgtgatatttagtctgggcagatttgaagttggtcaaatatgtaatggcgaagctagctgtgacctgtgctggtttggctttgtgattatgaaccacttgattccgctcagtccaaatagcccaaagagtgcacataatctgttccatttcatgtttagagtaaattgtagaaagatggcatacgtaatcacctttggacattgcagaagagagacgccaatcaaatgacattccagagtgccgccaaactgcacgagcatacctacaaccgaaaatagcatgtccaactgattcccacacttgtttgcaaaccgagcaggttgcatctgtaatgacctttcttttaaccaaagatgtggcaactgggagtgcatcatgtatcactttccacacaaaaatcttaacttttggagggagttgcatagaccagaaaaaattccaccaagatgaatcatttgttgaagtggaactttggtctttatcttcaaaggcagctgctaggtgataccctgtactcacggtgtagttgcctgaaaggtggtggtgccatattaggagatccctgctcgagaagaagctaaggggaatagtcaatattctatccacatcaagagtagaaaaaaactgctgcaaaacagggacattccattgcctctcatcagttattagattggcaacaacaccattagatggtccggagtagtgaataggaaggaaagagttatgtcctggtatccatggatcaaagccagagcgtactgttcgaccatcaccaattttccaacgaagccccttcaaaagaagctctcgaccccaatggatcccttgccaagtgtacgaaggcgagtgacccaaagttgcatcaaggaaaccattttgagagaaatatctacttttgagaagcctaccaagaagagagtcaggttgttcaaggagtcgccaagcttgtttggccaataaagcttggttgaagtgaacaaaagaccgaaaacccatgccaccatccgatttggacttaca

SEQ ID NO: 318751 - DNA, 607 bp, Cannabis indica
aaaaatttaaagacttaaaaattttaaaactaaaaataaaaatttaatttcaccccaaactaaagtgacacattgtccccaatgtgacattaaagagagagaaaatagaacttacctgagcgccacattagtatggcagtgatggaggtgatggctggtatggctaccatggcggtggctgcgagaagtgatctggagcatcgacgttcatcctccacatagagaaagtaaaattcaacttctgaacatgcctttgagcaaattcatgccgctgctgaagataggagttatagtaagcatcttgggcttggttggactggatgatatactgatttttcctaataatgtaatccagtctatcgtaggtgcccggcgttcgggagtccagtggcggtgcaatctggagaagaggcagaaccgtttcacttgcacctgcttctgcatgctcctcttcctcatcattatctccaccggatggagtgtaatatcctagaattaagaaattgattagcaaaaccctaattagataattatgaataattgagaaattatattattatatagttcattatatgagaatttatttgattaattatatggtaagacc

SEQ ID NO: 318752 - DNA, 2192 bp, Cannabis indica
tacaagtcgacctaagcggcaaagtagaatttatatacaattccctattagacccaaccctagtggtctaggttggctatgtacaattcatcttcaaaactctcaaacttatggctaacccgacactgctttacccttgcctgcacaataaagagccaaggcgcaacaagaaagaacaataaaacagtacgaataattgttataatcatatttcttacttttggcccctacgtatataattgttccaccgcactatatatcaaattatcttatatccgcatcaaatttctatataacatagacctatgtgttactctcacacgtctcttttacatataaggcctcaataggatttatcttaagtttagttactgattctaacctagttatgccttacgcgcataactcttctcatttattcatataactctttatcatatatatattacaatatgtactaattagggtaataatcctaactcacgatttcatataaacaaccatataatataaaattgttccaccgcgctatactctatgtgcttagttcactgtgttacaaaattttcaatgtatgagaagaattccaatctaaatgtgatattgactaagtgtcagtattcctagtcacaatgtctcgagtttcacacaatagggttaatcctaaaattacatttcatcaaagttcacatttaagactccaacactggacaaagtaatagagctcaaaacgagctttccaacgatatatataacgttcaaaatagagttcagagtcaaaagttatgctcaaaacaaaattgactacaatagcaagagatgaaataaattggaactacctcaagcgagattgggtaggggcattccccaatttttaggtgaagcctcgccgcgatgactgggcttaaaaacctagaaaactcaattttaccaaatctgaaaatatactaattcaattcaaacttcaactaattcatgcagtcaatatttaggcttcaatcttagcataacaatcataaacacaattatttctataagcttctacacccataaatataatcaattccatatttttaaaattctcaaaatcaaagcttaagagaacttaaacaaagttcatgctcacattcaacaaagatagccaagcaaacttcatgcttaaaattcactttattctcaccaaaacatgactaaaaagtgacatcaactcagattcaagatcataaggcaaaacacaagcaaatatctagttttaaccatagttttcaccttacaaccatcaaaatacatcatgcaataacatcatagcaatctaactttattaaatcaaaacagtaagagatgaaagaaattggaactacctcaagcgttcctcaagcgttcctttagcttgctccaacaattaacaccaaaaactaactccaagagctaacttcctctcaaagatttcaaaagataacaaagaaactttaaaggggaaagtagaagaagagagggtcggtggtgagggggttatagctacaaaaatagtattctcattttctaactcaaccaaaaatcatatattcaattttagtaaaagatggtcaaatgaccatttttctcctagggctaataaaatacataataactaccaaaggtagtttactcattccacatcagacatattcatcccatataatcatatacatattttatgttattaccctaagcacataactcataaattttgaccatgaactcggttcgagccaaaatgctcgattgtgataaaaatcacttgcaataagacaaaaatcacctccctaacttgtcaaaaatcacctgcaataagataaaaatgaacatactatataataatataatctattagcacaatatataataaaattataattttacctttcttgggccaaaattacaaaaatactcctagctcataaatgagatcttaaatgtaataaatttcaaataattttacataattaattatataataatataattcttcatttataataattaaattttatttaattagggtttctaatccatttactaatcttaagatattacaattttggtggttggggaatttgaaaaaccgtgtttttacaaatgtcaattatatatacgaaaatgtaaaactgtatgcgtctgcagaagcaaaaagtaattctgttactgcagaa

SEQ ID NO: 318753 - DNA, 826 bp, Cannabis indica
tttatttagggcacaaaaccttacagggttgtggatgacttcgtccgtgtataagctatctaataggagtatattgtttataactactcatatcgcaattgtagtttttttttatctctttcatctcttttgtatttttattcatatttaaaagaaagagtgtctttgctatgtgaatgagagtgtaattcgactctacctttgcacttggtgtcctagtgattattttgagtcattaaacaagtcagcaaaggagaagaacaaagtgtaaagccttcgggcgaagattctccaaaccttcaagaaaaggtggttcaagtcttatctcgagaggaagcaaacacacttcaagcagattgtaatatcctgataagtctaatggtaaataattagggtttatatttatattatgggttaattagataataagtgggattatgatcctactaatttatttcactataaaatttaaattttgctataagtgagtaaataattataatttgttaattacggagatttatatagcatgtgtgaatgtaacatgagctatatgtggaataaaaatattttcaggtttggcgatcctgaagactcgataagtgaatatataagcgtaattcgttaattacggagatttatttaaaatacgtggatgtaatatgatttatttgtgaaataaaaatatttttaagtttggcgaccctagagactcgattggaagccaaaaaatatcacaacagttttagttagaattattgatgggattattatgataaattgattttagaaataccgaagtattttggggtactaggagtcgacc

SEQ ID NO: 318754 - DNA, 1392 bp, Cannabis indica
aactgaaacccatttgtcatctttcaagatttgaagtcccactgagctgcctttactttcttgtagaactgttagggcacttccatctgaatgtgggcttagacccaaaacaaggtcaggtcttgaacatggtgggtaatagttcatccttatggcttggacagccacaccaaacatctcagcaaacacatcttctttcaacccaagagtcatggctatgtatttcagcaggttttgacatagtttccttacttcttttgaataaagatccacagtttcactgaacataaagaaaagaaaagaaaaaagaattataatgtttggttatgaggttattttacgggcttatttactaagaatcacgatatctcagtaaaattgagaattaattaggacatatgttattttatttcatattagaaaatttatagaaccccaagatactatattgcatataatttaaaacactatgaataattcaattcaatgatatagaaaatatacgtgatggctccataaacataatttgagacataatatagtttggtagtgcaatactaacatattaagtctttctttatagatctataaaatagagtagacccaatagatcaattaagacatacaattgtaataagacaatatgtattgatagagttagagaggagacctaacaacaaaaccctagttgcactggcctccttatcaaaagcttcggtttactaaaaaatttcacacttctacttcaactaaacatgattcagatgttaagaccactaattatagatcacaaacattatgtgttaaaatgacaaaaaactaatcatcaacccatattttaacaaacaattaaaactttgtggtaagtctacagtatactcccattaaggggtgttttagtagagcacccaagagaacttttagtttaatttttttttttttttattgattgtgtatgttatagttatttaagattacttgtagatttttagaaaatttctagtagtttacaatgccgaaaataaaatttacatattttgttatgcgcgcgactgttttttcttatacgtatggtaagtaattgtttatatcttattttcggtattgtaaactattcagaattttcttaaaatttacaattagttttaaatagttacaacgtacgcaatcatgaaaaaaattaaactaaaaaaaaatttagatgtcgaaacagataaaaaatctaccagaacgatctattgaagtttactagtgaaatttttaaaactttaatgtaagatcatataaaagtgtaatatatattaatattaataatactaaatatatgaaagggtaaatattattttggaccctctgttttacaaaagttaccaattggaccctgtgttttgt

SEQ ID NO: 318755 - DNA, 1651 bp, Cannabis indica
tactttattgatatagaataatctggattacattgaaacagagttttatttagggcataaaacccaacagatcctgctcggcagttggaaacgtggcaagctggaccccgtgagggtcagatgcattgactttctgcatcatcttctttgtgcgggccatcatccttctcttggatggatactgatgtgtgtgccatacaacagtaacagcagggacaactattgggatgcccaagttaccagaacttggacgaccaataggaagagtattaacaacacctggttggacaatatacgtccagttggacgaaaggtaacgtctcaaccccttctttagctctcaaatgaagtaaccgtacccttctcctgtgatctgcacagggtaagagtggggttgcacttcgggttctagagtaggagaacaatcactactcacttcccaatccttaaagctcgagtagaaagtccgtcactcaaagaggacggactggcacgaagacgaggttgatcctcatacagaagttgaagtaaatcctagtcaatttggtgtaaaaacgcacaaaaattaagtcataatccaggagttttaaatttttgcgttaagggttaaatttcaagaagtttcgaatgagcaaggtgaaaatcgaacattgggagattaaagtaagaatgtcataaataacgaagccgtatgaactattagagagaaaactacaaagttttgagcatagattttctatgtatcttctacaacaagtcaagaacaaatgtattttctaaaatggaaaccgaaaaatcaaagataaaagagaaaaagattggaaacttactcactgtttgaagcctaaacgtagtccaaacgaggcttctcggatagctctactagaaatctcacgacaaactcgaagaaaattcctttttgttctaagttggttttgtggagaaaatggtgaaagtagtttttgaaaatcttcaactctatttataggagaattcgtgaaaaagggtaatcatttcaaaatcccttagacactttgatttcctccaaaaagtaaatattgggaattaaaagtaatcaagtgcctcaagggaataaccgtctaaagcgtgcaaaggaaaccgtgtcttgaggcattaattagtcagagcattaattagccaaaaatcaaagagatgactggtcacactcacatcaaatcacgaacagacgcacccaacacgtgtcttccattcaaatggaaaagtagctcgaataaagtctacatgcaacttcaaaattcccgtacagacttggggggcaaatattatcccaatttttgcactctgacgtggcatcacatgctggtgacacgtggaaatgattccccatatctgcatgaaggagatgttccaagcagagcactgtgtatacctgtacggatgaggtcctcccagccgaaaagtggacaacccgaatagcataccaagacttagcaatttcagcacttgcatcgtgaagcacaagagccatccctataaatttgggattgtatcacagagatatggcaagctgtccaaatcccacaatcagtatactctatatatgtaatatgtaatctgaccaattatagaaattataagaaaagggaaaccttccctcaagcatgtagcc

SEQ ID NO: 318756 - DNA, 897 bp, Cannabis indica
cttattgcccaaattcaccccaaacattttaggaagaggagaatacactatcacttctagaaaaaattacacacttgggggacatggtaagatttctatatgataatttaagggtgcataatttagagtgttttaaggataataactcaaatattaaaaattatgagagttgtttgaataatgtagaagaaagattaattgaacacgtataaggtattggtcctataattaaagaccaagatccctttgaagtggtgttaactgaaaattgggtacattggatgcttgttcaacaagtgatgattttgatttggtaactgaagcaacaccaaatcttaatgaagaagttaattgatatcaaatcacagtcaaggttgtggattttcatgagaaaaatggagaagaagtttccttggagggtgaatcaattatagttgttgatttgagttcgtcaatattattacattataaactaccaatggatccttattttccactaatgtcacctacaccatattacatcctctacgagctaccaaaggtttctcctcaagcatattatctaaagtctagtgttgttagtgctacttagaactgttgttcatattcctggatgcctactacgtggaaatcataatagggtgtcactgaggactatctgcaatatgtatgtattttttacttaattaaattggatatgataatatatttcgaaactcaatcgaaggtcctcaatgttagcgaggaaggaaaagactccaatattctcacaatccatccgcagttgtggaggatcaaagtttcttagagccacaagtattccaaacaggtagtaggtgttggaaattattttaccaggatctatttactatcatgtatgttggattaacaacctaa

SEQ ID NO: 318757 - DNA, 1179 bp, Cannabis indica
tccagtgattagccctctatgtgctggttcgtaattagttttagttaaaatactattttaccatctaattatttcttcatcctttagttccattaatacactagtagaggtataattcaagatcccatccgaatttttgcacaacattccagttcaagaattaacacataaaatgaaccaacatttgatctgttaggaaagtcaggattctatgattgtacatcatgttcccggtcattcatattattagattctcaaaatagaaattgtaagaatcatcttctctgagaaactttaacaagtgaatcaaagaaactaataacatgaacatgcgttcatgataactcaggatttaggctgatctactattgatcattgttatgatataaattagtctttatgataaatgatatgttaataaagataactttattcatatcagtccttgtcatatataatctctattatatacagcaccttcactttgatgtctcactacatcagtaatccgaattgagattacttacactgaagaatggacatcaatgagccgaactagcaaccattaattaaagattttataactttaatatattgctaattgttttattcatatctatgtggtcttagtttattgtacagctacaagccacagcctcatatatgaataagaaatttttcgatatttaatatcaattattcaataataaatattaacaatttaatattcacacatatatcaaatgtttaactctttatttaatagtcagaaatgtctttataagctttttaggacataaaccctaacaatctcacacttgtcccaaaagcgaattgggaatctcccttaatcccatattaacaatatgacccataaaagatttcactagtagtgtctttatgaatggatctgccaggttatgttctgaagtaatcttcaagaccgtcacatcacctctctctactatattccttagtaaatggtacttcctctcaatatgcttgcctttcttgtggctccttagtttctttggagttggccaccgctcctgtaataaccaaaatatttacaatttttctatagtacatagttttagtaatctcgttgtggagatagaggagtgcttagaaatttttttttttcttcattaaataatattttactaagttctaagaaat

SEQ ID NO: 318758 - DNA, 539 bp, Cannabis indica
taaaataatttccaacagtgctgaccagcacacacgatctcttccaaatctccaacaatgacaatattggacaagcgcaacaataatggctttggccaacataatggcaaaaaaggaaaattcaatgattctcgtaagccatgaagtctaagggagaatgaggaggaggagtgtgcatgctctcctaccaaaactcctaatgcaatgcatgccaacttgccatattgacaggtgtcaccaaaacctaaagcacttagctttcaagctcggccaatataaggccacctgtcaaccttgcatggccttaaaaggccaagctcttgccagcttcatggctaaatataaaagaatatctcgctaaatccctcaagattcgagagaaaagtaagagcaagagaagaagcaagagcaagagcaagacaactcaacttagaaggttcattgaccacccgcttgatgaaggcatggccctcagggcacctgggggcaatggctggacgaagcaataaaggtcaatttcaaagcttctaacaacgagg

SEQ ID NO: 318759 - DNA, 710 bp, Cannabis indica
aatattatttgtaaccaattgtgcggcaggtagaatagaagcattataattataacagctgcatttgatatgaagtttccaccatcagaagcgaggaagggagaaacaagcatgtaacgacactataatcagtcattagcaacctataatcatagctttatacataataataataataataacaacatcacatctaataatagcatttctttgtttatttttgtttccatttgtaacaaacttatcttattccaccgaatgaaaagacatgaaatatataatatataatcacttagtaatttaatttcataattaacattaacacaacttttctcttagtattaattctgctccctctagctcattcataactctaatgcacaagcatatactatcattcatagatctagattaataatagatgtgtttttggcccttgattaataatttattggttcattttcattattgttatgtaaggacgtgagattttaattgggttcttagctgttggaatatcattatagtcataacaatttagaagagtcaactctactaatatctataataaagctccagttgtaagttgattttattgagtaggaataaaatatgtatttaattaatttttgtatacgttgtaactaaaagtatttgttaacatttttgtctttaaaattttattttagaaaaataaaattgtgttttac

SEQ ID NO: 318760 - DNA, 1400 bp, Cannabis indica
taaaataatttccaacatcattaccatttattgtgaatgagtaattactcgtttgaaactgcaaataggttttttacttatcgtttgctttactgggaaatgatagtgacatatgttgctcgtggatgaaaagtggtaaggatgctttatgaggcatgaagaataacttgtcttattagacaaatagttgtcacgcaatgtttgattatgtgctgtgtaaacgtttgttatgaatgatgaaattgtatgctatgcattgttatgatattttgtgttatacaatgtttgtgattatttgctttcttgctgagtctttgtgactcacgggtacttcgcggtgtagataaagggaaagaaaaagtggatcaaccatgagtcagaggtctcccagcgatgtacatatcaaccgcggtgtctcagcttctagtggatagaatctatccttttgattatgtttgaaaatgtaaccctattttggaatatcggttttgaaaccagttgtaaaagtttataaacaagagatccccatattcagcagtattttgtataaaagttatgttttagtttaatccaaaagtttttaattaagccacacttttcttaaattgatagtttaattataaattaatttgtaaaagcacacacgtggcgtccctgtggatcaggacgttcattaggcattgcctaaacttgctgaacattgaagaacactaaaagtcctctatttttcagaggcacaacaaatggaacggtaaaagctttaaaagaatacaaggatatgttttaccaagtgactaaagtaggtggatttgtgggtgattttagtaacttggtgtactgctatgctagtctcatctagggaccctgttagatggagcaagtttgtctagtcagctcctgaattagtttttgcagttaactaacccaagtacccctcttatcgagttttctatataaggctttgtggactacttctttatgtgacgatttgataattatgtttgtaatgagtgaggagagttggcatatcatatttctctcaagtgagttgatttgtaaggtgcaagatacctttatgacgagattaactttgtattctcctttgtattcatctattattgaagattgaataaagcttggccaaaagtcaatttcttctgaggattagttaccataaaaaggataataaatctcgttatatcttgtctttatttcaatatttgattcagctgttctaattcttcaattcttattttattttgaatgttaattcatcacagtatggaccgaataaatatataaaatgtttattttttttaaaaaaaaaaatcataatttttgcccaaactataattaacgtgggccatgctatttaaaaaaaaaaaaaaaaacgaaaccta

SEQ ID NO: 318761 - DNA, 589 bp, Cannabis indica
gatgagatcaagaggtggtttagaatggctgtgttccaaacttatgtaatatttgaacttcctaacttgttctaattgcatatttttattgaagttacatgttctttaaaaaaaaaaaggttactacacaaattacttgataatcgttgaacacttgtcaaatctatattgacattttatagaaataaattggtcaccatcaaaaattgtgtcgctacgctaactatagttggagttatttgacttgtggtactaaaaaatcaaatcaatatttgatgatttaatgtagaagcaagcctgatgtgatgtaaatacaatcaccacaaatcttgttcatactagaatagtatcaactttatttggtaatctttttagtttcatgaaaaagtctttactctctagctactattatagagaaattgtagtaaatgacttaacaatatagtgttatataagtaaatattttcattcaaaaatttatagaaaaaataatatttttacattatttgttatttaaattattttttgtcacataaaatttttataggtattacatttttaaggggcctttttatttttacacttcaaa

SEQ ID NO: 318762 - DNA, 1175 bp, Cannabis indica
aaaattgtccaagtacgacgaccccctttctttgggttagaagtattttgcatgttgtctccactttccattcctgtataatacaaaatattgaaaactaatgacatatacaatatctgctaattgaagaaacatattataaaattatatataactaataaatataaacgtatttttattgtataattcaaacaaaagtctaaaccaagcagtcatataaattcaacaatactaatcaacaacattgaaaagaacatttaatacaacaaaatactaatatctacgacctctacttgctctccattcattaaacatgtttgttgccaaagcatctctccaagtagtccatagtccatgcatcggatgattcaatagtgggaataatatttacatcatcaagagtttggttttgtgagctatcttgtgcatctaattctgcttccacaggatcatatgacatttcctcctaataaggttatgaagaagacaacaagtagtccttattctacattgagttttgattaagtaaaaagaagggcttctcaatataagcaaaccgaaacaacgctctataatatttctagtagatgaatttttcatgttaaaaaattctttctcatttgtaacttcacatccatgttgccattctgaaaaatgatatcttatttctctgtatggtgcaagaaacccttcacaattggtataaccagcatccacaggataataataacttaacaaagataaatatatataatattgaggactctatgtagtttaaggtataaattaaagtgcattgcacatttcaaaacaaactctaccttcaggaactcttaaatcgtatgctctagatattacttctcgtagaactcttcaatctaatgtcgaaccttcccaacccagtaaaacaaatataaaattcatatttcgatcgcaaactcctaacatattgatggtaaccttgccctttctatttcgatagctcgacttttcagtttgactaacatgcacctcaatatgtgtctcatttaatgctcctaaataattccttacaaaatgaagccacaaactattaatttgaatataaaactaaatttcagtggtctaaaatctaataacttcttagttaaaaattgttaatacaccttgaaccatttccatctatcgtcattgca

SEQ ID NO: 318763 - DNA, 1241 bp, Cannabis indica
aaaaaaaaagctataaaaaatgcattataaatctaaaaatcccatatttatcactttattattttttttatttattaaaaaaaaacatattatatctaatttcctctttcaaaaatttgaatcaggttacataatttggtagtttcggaaagtaacacttaaagtagtatatttttagaaaaaacgtattggcaattttaagaattttaagattaactttgtacattttttatgaattttaatatttgtatgaggtcttttttcatattttatttcttaaaaatggataaggtaccctgttactactatgtcaattttttcttttaaaaaaaatagtcagttaccaaatgtcgaattagttcttttaaaaaattatcaccaaaatttatatgttttttttttaatttgattagtaataagaaaataataaccaactatcacaacatcatctttgttaatttttgaaaaatttaccgtatcaaaaataaatttaaagttttttgaacaaatatgataaacttaaatattagaaattctatttttagtattgtaaattattcaaaaatttacaaaaattgaaataaaaaaatattttggcgtgtaattttaggcgcaaaaatttactaaaacactataataagagattataattagcactactttaacttatcctctctcacactacactcacacccaattacttagctatcgaataacacttattgtaatagtttagtaatcactagctttccttttcaaaaaaaacctaccatacatatgtagtagaaaaaaaattagtaaaaaaaaagtgactatattactgtcataaccaaaaaaaaaaatatatattatattattattgagaattttgagtgagaagtcaattttattttattaatttattttgttttaaaaaatctaccccaatttctatatgagtaataatatatgtatatatacaaatttgatacacacttttttttatgtggtgattaaaatcacacataattaacaaagtagcaatctacaattagcggcgacacttcctcgaaccaagatatagctcatcgtctaaccgaagaacatgttttaccaaacaatgtgcagcagaatttgcatcccgagccacatgggacaaaagtgcccccgaagtttagacaataaaactataacatcctcaagtagcacacccagctcattaaagaagacccttcctttgtttacagctgtgaccagagaca

SEQ ID NO: 318764 - DNA, 1749 bp, Cannabis indica
ataaaacccaacagttttatcatatgtaacaaacaaaataataacatggttatttagccaattgtaatattagttctatgtcaacgctacgtgtgtaattaatttcaaaaaaaaaaatttaaacttaatcttacttaattttcttaaccattaattgattttatatttaataatttatttaaaaaattataatttttatttttttaatatcaaattatagacgtggcgttgatgtggtaattggttaagtaaccatatcatcattttgtttgtgacaaaacttgacaaaatgatcaatttataatactttgaataattcaagaactatttataaagggctcaaaacttcaaaaaaaacacaataatacagtcaaaattcgagagtaaaaatcttaaatagtctttacaattgtatatatttttttttcagacacttttatatccttaatatttaatttaatttctttatttcttttttcaaaaggttaatggctgactagacatattaagttagtaaccctatattttaatgatgttgcaaaagttatttaacaatcttagtccatcttcaggaaaagtgtaaaaattatattatttttggcaaaaaaataattttgtaatatatttgtatcaatttataatattgtaatctaatacataactacaaaacttgataatgaaattcaatatttaattatgttttcattaaaaatataataactaataaatttaaggaaattatcccatatactatttttttaactttttttctttttcaaatttacggtttgggattgtttctgcgataatttctaagtgggttgctatacagattttagttgcgatttaggttactccgttagttgcactaggggtttctatgtaaaattccgaaaaaatgcaacaaaaaaaaaactgttttgaagtgtaaaaatgaaaaagccccatacatttattataaaatttttcattattttattatgtaaaaaaataacaaataacaataaaaaatttatagtttaataataaaataataaaaataaatataaaagcaatacatttattatgatgtaaagtttgcaaaatttagattaatttttgcaatgtgacaaatttagataaacttttagaacaccattgtagcaacattttacgaaaattagttatatttttaattgttgaccgagattttcagtaacttgtaaatcttgtattaaagaaattaattatgagtagagaagagtacttttacgtggttctggtgtttattaaccatagtccacaagtcacttttattttattatttttttttattgaacaagtcacttttataaatgagtaatatcgttattaattgagagtatattctctcttacagcttcagagttctctttctccttcattttttgaatccctgtcctcttacattcattttgtatttataggctgagaaataggatattctttaactgatgggtacatcttccctttacctctaggctctacatggcctttttaataggtgtaggaaataatgtttgttgtgtgtacatatggtaagcttcgaagtaggagtttggcaagaaaagacctatcttgtatgcggctgatgggacaatacaaggattaggcgttaattagtattcataggaaaatataatgtcagaacagtatggactaaatctgaatgacatctccatttggaaggcaagtttactttaccacctgcgtgttgggttttgtgcccta

SEQ ID NO: 318765 - DNA, 2243 bp, Cannabis indica
gtgtaagtaagctttatcgctgactatcacatcagtataaatccagtgcactgatgaatcatgagacataaagcatataatcacaattaccttccactgtgttgacatcagtgtaattgtgaagaattatatgttctggacttaacagaaattgtacacatttaaccataaacataaataatacatgttaacatagatgacttctaatcttctatttataacaaatcagactaggtttctgggcccctaaaatgcaaatcatatttatgttatgttttatacttttcttactgagtttgtcgacttacaaatatagttttatgtgtaggtaagggcaaggcaaaggttgagcaacagtgagtctaaagctctttagtgattgtacatatcaagatggttagacctgaagggttcaattcttcaggacgacaatcttatattttgtagtcgttgtacaaaactttttgcgtataatgtattttgaaatatttaaacgagatcccataaattgtaagtaatatatttatgaaagtaaagtttattttatttataaaagtttaaataaatcacatttttattaaaactctttgattagcaaaagtcaacacagtaatttagaaaatactgtagcgcacctaagcaagtagagcgttacaatttggtatcaaagccttcaagttatttttcgaagactgtcaaaatatgtacaatcatcatcaaagataagctcgactcacggttaagtattcctttatgtgttttagtactttcaacttagttcgacatgatttgaaaagcatgataggaatgttagtaatatgttactgaataatgcattgtctaaattttgatgtatgcggtattaaatacaattagaaccatcgtccatcctacctgatgttgatcgtgaacctaggcgatttggtagaaatcacgatatagtagctagggctggaaatggttaaaacagatagattttttctcttcagttatggccatggtgaaggtcatggtagaagtgttttgagtggaatgtagatccacctcaattttgttttcttaatgatatttttcttatgaataatacaacttaaatattttattttgtaggtgatccatacaccaaaaataaagaagatttaatataagtagaagcacacttttaataaggttaatttatttttcgtagttgtaatatatgaattgaaaagtaattgttttttctttttaattttcctttaaatatagaatattttatttttaatatcaagtgaggtacggtgatgacattgagtttaaatatagagataacaaattacagataatgactcatttcatcaatgagggaagaattacaacaaggtaatagtaatctctaagtgaatgggagagactatttaaccttttttttagttacacctaattactcctcatattatttatagaaaaattatatgaaaaattagtaacattaaaatttgatacaattttattactttattattattaaatagaagagataatttattgcatatatataatttaaaaaaatttaaatatctatcgtgaggtgttaattatttattagtttgatttataatagtaagatttagacttgagtagtactagatagtccacatttatattgatactagttggttaacacgtgctttgcacgtgtgttaaaccttttataattttattaagtttgtaatgtacaattaaaattaaaggagaattaaaatttaagttaaaattaaagaagaattaatttgattaaaataaaattttattttgaaattaaaattaatattaaaggagattaatttagttcaaattcattttgaaaaacaaacccgaccttaacaatttataatgccatgagttttatttttcaacataattaataaaatcttaattaaatcacaattttattcaaactattagtttattattagaaactaatctataaaagcactgatatgttattcctgcgggctataggatgttacagtaacatacattttgtttattgaatgtaataatgtaaaattatatgtttttctagtatattaaataattaaagaaaaataaagatttcttattttagtataagcatttggaaaatttcataatgcatcctcttaaaagggatgcacccatatatctctatccgtttaatatctgaaataatgttttcgtcaaattttttctcatgaacatgtatattatagttatttaag

SEQ ID NO: 318766 - DNA, 726 bp, Cannabis indica
tgaaattgatctcctcgaatctgggcaggcccccaaacagcatcagtaaaggcatgaaggttgaggggatctggtgttgcagtatggtagaataatccttgccctggggaggtttagaggtagttgacaactctgaatgcagcttgtaaatgaggttgtcaaggtgcctgaagatattgacttaatttgttgacaacataactaatgttaggccgagtaattgtgaggtatatgagcttgtctacaagacttatgtattgcttgagatttgggagaaggtcacctgatttactacttaacttaagatttggctccattagtgtggaagcaggcttcgagccaaggtgacctgtatcttgaagtagttgcatggtgaagggtctttgggagactgaagttcccttgttgcagcgcgcaacttcaagtcccaagaagaaccgcatgcttccaagatctttgagcttaaatgtagagtcaagagtagcaataaattggttgaggacatttatattgttggtagctacaataatatcatcgacatatatgagtaaagaaagaaaggagtcgtgaccaatgggttttattttttattttttatttttaaataattttgtaatataagattaatttatatttatatttaaaatataattataaaaaggataaataccattttagaccctgtgttttgtaaaagttacagattggaccctgtgttttgttaaa

SEQ ID NO: 318767 - DNA, 1599 bp, Cannabis indica
aacatacttgtgagtagatctaagatcctggtaaaataaattccaacattaatttgttgacaacataactgatgtcaggccaagtgattctgaggtatattagcttgcctataagacttttgtattgctagggatctggaagaaggtcacctgattcactatcaacttgagatttggctccaatggtgtcgaagcaggcttcaagccaaggtgacttgtatcttgaaggagttgcacggtgaatggtctttgggagactgaaattcccttgttgcagtgagcaacttcaagtcctaagaagaaccgtaggcttccatgatcttttgagcttaaatgtagtgtcaagagtagtaataaattggttgagagcatttatgttgttagtagctacaaggagtggtcacttttggaccgttggaagccttgtgtaatgagagtggagcttagtttagcataccactgtctagatgcttgttttaaaccgcacaagattttgtttaatttgcaaacaacattgtgtggtatcacccatttgggagtgtaaccttaaggtagtttcatttaaacatcctcatatccatgtgatgaaggtgccaatgtttgatggcaacgagggcaaagagtaattttagtgtattgaacttaggtacaggagcataagtgtcaaggaagtttataccttgttgtcgtgtataccctttagcaacaagccaggctttgagcctatttactgatccatttggattgtatttgatcttgtatacccatttgtttccaatagcatgttggttgggtggtaatgttgtgacaatccaagtatggtttctttctaaggcatctgtttcagcatccatggcctgtaactaggtagcatatttggaagcttcaacatatgattttggtctagttaatgtatgagatgtaagaatagaagccctgaaaaattagaaaatcgatgataggaaacatagttagcaattggataatttgttgaatgagcaacctcatcatatatataatcttgtaaatataaaggttttgtaatgttcctaccagacttggaaactgttgggggaactgtggtgctgctttgtgtgctatttgcaatgtctaaatgagaaatagggtccgttgggattggagagttaggagtattggttgctaaaacaggtgttgcagaagtgttgtctgctggtttagtagcagcagggaaaaattgtcaatgttgagattggggttgttattggtaagaggatatatggattcataaaatataacatctttagattgaaaaatgtggttggattgaatgtctagtaaggtgtaagctttcatatttttggggtagccaataaagatataagctttggccctaggggacaatttgtggctaatggtatgaggagaagcataagctaaacaaccatagtttcttagatgatcatagtgttgggaataatttaccaggatctagatttacttacaagtatgttgattaacatcctaaatatgaatatctctaaaacaatgaaattaaacatataagggtttaaaaaagccttacattgatagagcagaatataatgactgattccgttc

SEQ ID NO: 318768 - DNA, 1219 bp, Cannabis indica
ggcaatgagtggagtagcccatgttcttatatatggctcaatacttttacatttaatccatgtgggacaatgttctccaataggctataaggtccaattcgcaaatgatggtgttcagatcaataattgaagattgcactatgagagatctgcattgcaaatgagattttttcacctgggttgattgtagggatgaataacaactggtgtttgagcaccttgattgttacttttgcaatcttaaaatggagctttcttttctctagtgaggaggtatataataccattatggtatagatcataggctagtcttagtgatcctagaaggacaaaggccaagtgttagcactactaaaactctaaaatttttgacaattttacactatcaggtaaagaattcccgtcggtccataaaatcgttgcctatacgagtgtcacaaatattgggtagaataggcgacagttgaaaatattcagggaatagcatagccgacggtgtaaaaccgtcgcctctagcatttcattcatcacatgatccttcgtcttctccggtgagcactcaagatgggagttttatttggcctaaagagcccgaaagagtcgagatctgggccacggttctgtcgaaaccacaacctcgagatctccgatgatctgtgaaatacaaaaatctcaaaaatacataaatcccaaattaaaaataataataaagaagttacgagaaaaagtggacgagagagaagactgacatgttagaaatattttacaagaatctagatttactaacaagtatgttgattataattctataatctaacatcctaaatatgaatatcccaaaataatgaattaaacacataaagatttaaaaaatcttacattaatgacagcagaataatatgactcctttcgttcaaatctctaacctttgatcctttctgttgcagagtatgatctctgaacctggattctccttcaagtaacaaaaagacgacacaattttccacactattttgaatattgccttaaaatatgtgggcaattactcaatcactcaagactcgaaaattacaagaagaataagaggggaatttgaaattatgagagctttgtcttattttctattttgtctgaaaaagttagtcaaaatgttatcaaaataaaagctattatattttatttatattttaattttagggttaggtttagaatttaaaat

SEQ ID NO: 318769 - DNA, 936 bp, Cannabis indica
cacattactgaaaaggcgaagttggagaaataataaaaacaaattataaaatgcccaaattcacaaaacacaatatgatcagagacaaacaaaggggaagccctttccaggatatacgttcaacacaacaaagattcaatatttccatttccagggcatgtaaccccagaatcacagacatcaacaactaagtgtaccgtcaaagaaagcgtattgaatttacctcttctgtcatctcaaaaccaagagccctgttatgacacagattcataattagtttcttcatgagtaattaacttgtaagactacagaagtacatctgaaattatcttcatacctcatggcaacattcagctctttagcatcgatggttcctaaaaagcagataaggaaaaaaaaaatcaataaatatgagctgatacatacattattaagagaaacacatcagtaattaaaagtatacctgagccatcagtgtcaaataactcaaaagcttccttaatctcttgtttcttctgcggattcaacccatgatgcctcccctgggcttttcctttctgatggtcccctataaaggcttgcctatttgaagtaatagcaaatatgaaaccatggtctaaatttaattttaagagcaaaaattcagagtatatgtagtgtacaccaatagaaactaaagcttctctcatagcattttaatccacatcttcgtgtaaccaataacacggaaacccatcttaaatttgacattataaaagtgtgcaatgtaacatagagagaaacccactgatccaaaaggtgtctggatatagtatttgcttgtattattcctcaaccagcaatgataaatgtaaacaagtcacattatatgcgtcaaaactcaatgcaagagaacaaagatcagggcttcaaatctaccaaattactcttttttat

SEQ ID NO: 318770 - DNA, 1145 bp, Cannabis indica
gctgacctgtcacagtagaagggctagcatcagccttggcctgagttaaagcaaacacccaagcaggagcaagtgtattatccttcttttatttttgtcgcagcaattgtgggaaattcctcttcatatgacccctaccccagagtgaaaacaggctctagcctaacactcgctctagtggagcctctttcaccttggacattcacgaaaggtctgccagttctcgtttccaccgtgacggaaactttggttaccatgaaatctcttatttgggcctacagttgatggttcattaggccttttcttgcgatcaccaaggtcagtacccctaccagatccaacaccagatgtctgcttccatgagtctcttctcgcaatatttttaattcatatctagtcttctacaccctcagcagctagggccatttcaaccatctgagaaaaagttcgaacaaccccaggttgtttagcagcaattatcacatcccgtgcaatttgttcatccaatcctcgtataaactttgcttttctagtagcttcagtagcaacttcatcagaagcaatttttgtcaatcgattgaacttagtggcatattacgttactgtcatactgccctgagtcgatcatataaactcttctgcctttgctgcccgaatagactcactatagtatttctcgtaaaatagttctcgaaaagaatcacaggtcatgttatttaggtcatgaccctgagacacaatttcccaccagatacgggcatcttctcgcaacatataaatggcacacctaccccatcattgtcttcaactcgcataaaatcaaaaatggatgttatcatactcatccactgctccgcttttagtgggtcagcaccaccttcaaacactggcgggttctgcttcctgaatcgctcatacaacggctccaaatgattcccgacattcggtggcactaccagaggtgctgaaggaccaggattaagctttggaacaggctgagctcactgctccctcaactcacggattggatcaccttactgctggatagtttcttgcatggcagcatataattcttctaagttgggtggtggtagagggttctcaccctcaccagcaaccccgagcccaactagctcgcggttacc

SEQ ID NO: 318771 - DNA, 1460 bp, Cannabis indica
aattatttaaatatattaaataaaaaattacacgtggataatgacttaacggtgagtacctaccgagttccaaaaatataatttaagtattatattctttaaaatttaaattaaatatttatttacaactggtaattaaacttaaatatttatgtcgtaaattaccttttttcatatttggaaatagaccatatttttttaaggagaatgcattagaggggtgttcataataatccaatccataatgcgtcgattatatcgaattgaaaaatctattgcgagttaattcacacataaaaataatcaattcaatctagtaaatggtttgcaatgggaaataggaaatggctttgtaatgattcatggatttatgggcataataaatttccacctatcttgtatacaacagagttgaatgtggtttattttattactgcttaaaggggatgaaatttagatttgcttaaatgttcattttgctcctactgatgtcgaacgcatacttacaatatcactgcatttcttcccatcacaagatcgattgatttggcacaatactattgccggtatttacactgccaactaaagtcttcacttggctgctgatttagatgaagctgataactaccctccctctacaaatcatagagattggtgaaaatccttgtagaattaaaattttccacaaaagaaatttttttgtatggagggttatccaaagtgcattacctgtggctgctgctctccatcgcaagaagataattaattcagctgtttgttcaatgtgtatggaaattaattgggcatgccttatttagttatagatatgcaatgtctgtttgaaaataatcaaaattcactgttgacttcaacagagctcaaaatatgtgtataatgtgattatttgattaatttgtcatctctacattctaaatctgatatggagttgattatttgcctcatgtgcgattttggacgaaatgaaatcaggttttacatggaggcacaaggtgagatagtgcttatgtgattaatttttctatcacttatatggatcattttctagttgctcaagtaagtaaacataaaccaattgagactacccaaagtctaccctctcattctcgacccctagaggggatcccatggagaccacctgactcacaagatttaaaagtgaacgtggatgctccaataaatcatgaaacaaaagttctttatgttggcacaataattaggaattgttataccaaaattaaaaataatgacactggaatgaattaccgatagaaaattctagctgagtcgcgaataatgtcgctttttttaagacgtttcgcggctctgcccgaagtgtgcatgacattctagtaaccatggcgcctccaggataaaattgcctctgtatacgtacgatatgttctgcaccgaactatatcgctctattacaccctaaattt

SEQ ID NO: 318772 - DNA, 652 bp, Cannabis indica
actatcgaaactaccactacaacgtatttttcaaatccatatatcgcacaaaaaattaaacaaaactcaaaccgaacttaaaccaaatttaaataaatctaaatctaacaaacaaataaatacacatatatacactaaatctcagtcccaaaactcaaatctgaaaacccttaatttatttttcctcaatcattatgttttctcaaattacaaaaacaaaaaatacaataatacccaaatagcggtattcatacattaaaatgtcaacaagcttgcaaaacatatggaaagccctagatcgggagagagaaagagggagagggagagagaagagataagaacaaatagagagatgcgattgagatcaggggagaagagattgagagagagagagagagaggtgactgagaataaatgaagagagagctcctgagatagagagaaaggaagagcgcgtgagagagaaagaatgtgaaagggagaaagaaggtgtgagacagagagcttaggtcccgtccccgtcaatggcagctagtggttagaaaatgcggcgagagagaaagagggtgaaggaggggtaaaagggttttttagggttactgaaatttgttttttttattctttcctttatattttttttttcatttagttt

SEQ ID NO: 318773 - DNA, 655 bp, Cannabis indica
actcttctcacaaaactaagatatgaaaatatgagactagaagataaaagaatatttggttactctctaggtcctatttataatatatagaaatcttagagacagtcacaacaagtttttacagctgtacaaaaccttttcaaaataagtcttgatttttagcgacaaaattacaatctatagtgaaaaatcgagaaactttccaaataaattcaatatcacgatttggactttaataccttccccttcgccaaaaagtaagttaatttttccaaaaataactcatttaatcaaactttctataaaaagaattttttctcttttatgaaaattttagagctacaaaatcgagatcacacacaagaaaataatatttaattcacattaaatatttataataaattaaataatattttgacaactaaattgtcaaaaaaaatttaaagttaaactatctgttcgtattaaaagtaattttttttccaagaattttgaccgttgaaatgtcctatttttggcgcaaagcctacaaataatgagattcggctatacatggatcaaaataacatttcctttcagattttgatagaataattccaccagattattttattaaattgaaatttataaaacaatcaaacaaaaacaaaagaaa

SEQ ID NO: 318774 - DNA, 821 bp, Cannabis indica
tataccaatacatgatgatagataatgatgaacttcaaacaattaaaaacaaaaactcacttatccaaacaaaaaatatggatgaaaaaataaaataaacatcacagctttttgtaccccctctctctctaaaaacgtcgtaactaatataataattaattaactacaaagtttggataattaaaacaagttgttttataagtttttgatgatgagaagatagtatatataatatattggatcatatcaaatcaactaaacagctagctgttgttgtgtttgatgagatgattgatcttgatcttcattgaagcacaagtgaagatttagtgattttccagaagtaataagagaagaagtagttagttgtagtggtggttgcattagaagcatttctctttggagataacaacaataggtttggaatgtggttggagtcacattcaactgaaaccctaccccaaataggaaatccacttcaagaaagttcatttcttttgtacttattcctcccacttttgcatagtatgcattgttgtagtacctgaaaattatcaaaattattcagaaaattaaaaaaaaaaactagtgtaatagcagacagcattcttttaggacaattgatgttataattaattcagctaataatatgttttgaaagctatcattaacattgtttggtggcctgacttttctattgtattcagtcaattattatagctttaacccacttttgagtttatttgctctcacaatatagatttttgaggtcttttttctcttaaaaaagaaaagcaaataaaaataagtagcattgtgta

SEQ ID NO: 318775 - DNA, 621 bp, Cannabis indica
agcagccctgacacgtccagaatgctctggtgtccctaacgtctatgtcaatatgtcattttggccatggactttaacttttccctagctaagtttctccgcaagttcaagttagtgcacatcatcaagcaattagtgtatgatttatatatattaactcattattacattatcagcgactaatacttacaatcattgtaacgctctaatctataaggacgtcatgtatgtgattttataaactggttgaaaaataatagattaattaatttttgaagactgtgataatattaaaaattttaccgaaataaaaccctagtaacacgtaatataatgacagtaaaactttgttccggggcaaagctacaaaaacattctcgaaaaaggtagtggactgggaaaaatggcttagtgtaagttgttctcctcgacaatttgagtctagtggtgaagacgactcgtcaaacgaacaccggaggtggccaaaaaacctgttcaaagtttgaacttccaaactttgacttacgatcccaggctaatagtagtaaaaggggcagtgccgcttgggggtttaagttgtcgatgcctggagagtgtgttggcttttatgccctaaataaa

SEQ ID NO: 318776 - DNA, 1278 bp, Cannabis indica
aatcacgtaatacgcctatgttagttagggtgttacaaggagatttagagactcgggaattagggtcctcctattgcacctcgtcctctgacaccattagttactattagtgttgtcagttgagcaacccactgttggtaatcgaatggaaccattgtatgaaaggttctagaacatccaatttttctgggaggcccagatgtgatgaaggctaagcagttgatgacttttatgaataaaattctaaattttatgggagttatcggtaatgaccgtgtgacttgtgaggcattctagttccaggaggatgccctagtatggtgggagctggtatctctcactcgggatgtaactataatatcttgggatgagttttaagatctcttcaatgccaagtattataatgaggtggtacgtggtaccaagagaagagaatttacttagttagtttaggaagaatctgtgccagtaatacacaactaagtttaataggctcattggttggcctctgggattgtgccaatcgatttcagtaagaaagagaaatacatggtgagacttaatggcaagatcaaacatgatttgatgatcaccacttatgatactactacttatgctcagatggtagagaaagctctccaagacgagggtgtagtgcagtttttccagcaaccccaagggactcagagtgttagtggggttactgctcctcctactttcaatttttgtaggggtagtggtgacttaacttttgatcataaaaggaaggctccattgccatctgatggtttgagtcagaataagatgttccaagggaattagtttcagggtggtccttggggtggctgtgaaggtcgttactcttatctagaatgttcggttggaagaaacatcatcagggtgagtacaaaggtagagcatgtttttattgtgttctgatgggacattacaagagggactatcccaagttgaagaaagaagagaccaagaaggaagctaaacccaccctagctcaggtttttgccatttcccaggtcgatattgaggctagctagtcagtggtgacatgtcaacttcttgtcaacaacattattatgtgttgtttgattctagagctaatcattcctatgttactgctagaataattgataaattgggtagaccttgtgatatttatgaactagggttcagaaccctattagctaatggagaattagttatctccaaaaggtggattaggtctatatcggttagggtggatggtagagagttaagtgc

SEQ ID NO: 318777 - DNA, 2037 bp, Cannabis indica
gaagacttaatcgaatcctcctcctggcctcgcgaactcaggatccccctaggtatccccactccttatccttcttactttatttggcctgatttcttaaaatgcgctctaaaacacttaaatcaaacacctacgccgattttaatagagtgttctgaggatcattcccgccttgcagagacctacccccgtcatcttccaaaaatgaggctatccgaaatgaccgctgaggagatcgaggcccaaaacgctacccgacggaagaggcttatgtcgaagtcccctaagtgcaaaagcaaagcgaagaagagcagggtggcgaggcttgaggaagctactcagtcagactttggcatgttgtctcagcatgattcggccactgacgacgccattgggaccctgcttagcgccctcctcaagatttcatcggccgttggtgagggcaagggtaattctggggggttggccccgacgggacctcccaatctggggcctcccaatctggagggaccttctcagcccaagaacctcttggctaccatggtaggccaaaacccgagtctttcatctacctctcctgctcggacttctgcttctcttcttggagcgccatcgtcttccgatctcatcctttttcctatcttcgcgcacccctcaaccttttctcctggccgaggctccccgcctttgtcaagccatcccccgcgggcccagactgaatgggacgagatccctgcttttaagattaagaaagatgtcccgtttgaggagtgggctgagaattacttcaagtatcttctagatgccatcgacgactttgaggtgcgcccatgctatgaaaattgctccgcagactgatagggagagggaaagcttggataagggctattctcgctataagaaaaattacgaggcagctgcttccgcaaaggtggttgccctcactaaagttagtgccttagaagttgatatcaagcttttgaagagtaaggccgatagtcttgagtcggagaagaggggctgggatcttactcgtttagctctagagttagagaaaaaggctctaagtgacaaggttgcttccctggagactagtttgtttgcggtgaatctggaaaaggccgccttgttgcaagagcgcgataccttccgttcggaggctgaggcaacgaaggacaaactctcttccataagttgcgaattgtccgaggccgaaaaggcgacatcacaggcccaaaaggctttggccgacgagaaagggtccatgactaaggagattaaaattctgacgagccatgtcaagaaggcgttcctcagtggaagttatcagtcggccttcaagctctactccgagtttagagagggcaaatctgctacctgggacctggacgagtttttcaagaagtatttcgagttcaagaaggacgaggatcttgtggaatcttctacagagtcggatgaagctagtgatgatgaggatgccgacggggcctgaggagctgggagggaatttttatcctgtttttattttatatttttatatcttttatttgcacgtgtggaacgaatttaaaggacagtttttatttttatggttttgtaaggattttgtgtttaattgatatttttaatttatttcccttactatagttattcatacgtgtatgacttttctcgaggcgtctctgttaggctaaaattagtctaagtttcgggtcatattttcggttagttttcactctttgtttctagttttagggctatattacgcttgattcttttgtttcaggtcctcgggcatttaaagaaagtatgaacaagaattgaggaaaaacggtgaaagaatcgagaagaaaaaccaagaatggtgtcgctgcctgttccagtcgcgacggggaatttgccagtcgcgacgggaactggcagaaagttttcaagaagttggagttgaactcccgtcgcgacgggggcttttccagtcgcgacggggaccctaatgatgggatttttgggcagtttcgtaatttcacgaatttt

SEQ ID NO: 318778 - DNA, 771 bp, Cannabis indica
taataataataataataaattgaccaaggaaccataccttatttgtcacacaaaataaaaaattattcattataaacataacattctaattgtatatatatatatatactaaatttcacacatgataaaattatgccaaattaaattcaacaaagaagcagaataaagaggttgatccctagttacattactaaactatattaaaaagtgttatcgctacaataaatgttcctaaagtacatattaatattaatggagatgcattgtacaagattctttacaaatatatatcacactacatctccaatatgtactttaatttaaataaaaatatgtagaatatacatatattatatatgatatatcatatcatagagtgatgaacattataacaagtcgtattgccaagaagattttgtggtaggttatgcaattcttttctgtatataataaatctcctataaatttatgaaaaaatatgaattatttataatattttaaaaataaaattgaaataacttgctgcataaaaatatgtacctgcaacaagttgttttaaattaaaataaaaaaacatatctaatttatatttaatacacatcattatcattgtatctgcaatttgagtaatatttaatcatgctccatgtctaacaaattctgaaaatgagctaagctacacaagcagagacctttttcttttttgaaaagaaggtaattagataaagggaaacttacaaaaatattagaatttaggttaatttttacaaa

SEQ ID NO: 318779 - DNA, 795 bp, Cannabis indica
cgcctaagatagttagggtgttacatagagcactttggctatctgtgaaaacagtagcttttccaacatagagttttagctcttttaacatgccttgaatccatagaccttctttgagagcttctgttgcagcaatgtactcagcttctgtggttgaaagagctacaacaggttgaatttgtgatttccaactgacacaatttcctgaaattagaaatacataggctgttgttgattttcttgagtctctatctcctgcaaagtcagaatctacaaagccttctatctgaactgtgtcttgatttcttttaaactttaatcccagatcagtagtcatgttgatgtatcttagtaaccacttcatagcagcccaatggagttttcctgggttccccatgtatttgcttagaacacttgcagcatgtgcaatatcaggtcgagtacagaccatggagtacatgagagaacctatagcattcgaatatggtatgtccttcatatcattcttctccttttctgtctttggacaatttttgttgcttaactgaaattgacttgacagaggttgagtagcaggttttgagccattcatttgaaacttgctaactaccttttcaaggtatttttctgacttagaaacagagtgttctccttcctatccctctggatattcatcccaagtatcttacttgcagcccccaaatctttcatttcaaattcagatttcagaatctctttaattctttctacctttgttctttctttgctaatcaatagcatgtcatctacatatag

SEQ ID NO: 318780 - DNA, 1104 bp, Cannabis indica
ggtaaatgatggtactatacccctcataaagtttagtaatctcaaggtttaaagctatgacaacttatgccaatttggaagtgaaaaaattaaaaaaaaccaatcacaatatttcaaagctcttatatacatttgttatcgagtattattagtgcccaataccttttataggtagcgcttacgattaattagcaatattttctaaaaattattatcttaaattatatgagatatatgatacttaattgtaccagcaacaatatgacactaaagataatattgcaagacacctatactattttttagcatttttcatatatacacatacaaaaagagctacacttataaatatatataaaaaaaaatatgaacataaatatatggttaactactagctagtgtggaagaaatagagaaagagataggttgagaaactaggaccattaaacaaaacgacacatcttgttttgatacatgtaattaaataaaaaaatatatatttgatttatttatttattttgtaaggatttatttatttactataaataaaaaaaaaagcaaaagaagagaagagaagatatgaaataagaaagaggaggcaagaaagcaaaagaagctaaagcccttactcactgtcccacactcatttcaaatcacaatcattactctcacaaaccctaaaaatataagatatatccatcttaaaaaaataatcaaataaaataaaaaagccaacgattcatttgtttaattactaagatcccatcatctataatgtatatatatagttaattaattaattaattaattactaggttatggtgttaatcatggaatcctaagtctattggcaaagctaaaagatatatattatagggattattttacaaatctaaaaaaataataataaaaatacatgttatctagaaatttaaattttttttttacaatttttataattttatttataaaaaatacaatttctttagcgtcgccttgatcagcatcggtagcgaatttcgtcaaaactaacgctgaaagggctaaaaagccgcctctaaaggaggtttttgtagtagtgcgtatttttgttatttttttttt

SEQ ID NO: 318781 - DNA, 2440 bp, Cannabis indica
atcctcaaaatgaggtgtctcggtgatgctttaatggctgctggccacacaatttccgatgacgagttgatcttgtatattcttgaaggattaggcagtgaatatgactctgctattgtcactctcacctctaaagaaatagtctcccttcaagaagttcaattcttgctacaaacacaagaacttcaaattgaacaaatggcatctattgctaccttggatccgcaaaatcctaatgctaactctgctgcagcaaacaagaaaggacctccattgcatggttctacaaataccagtcgaggtctccgttatgtcaggggcacaggaggtcaaaatccaaacaatcgtggacgccattgccccatttgccatgtctgtggtcgatttggacacacaattctgaaatgttatcataggtttgatttgagctatcaaggtgaaggaagctctaattctccagattcatccctgaagaaccccaagctatgcttgccactgcctcaagtgtgaatgatcgctaatggtacctggacagtggggcctctcaccatgtcaatgcacatgccactgctttgactgataaaattgactacaaaaggaaaggcaaattcacagtaggcaatggtgcttctctctctatttctgccagtggtactactttcctttcttcttcctctaaaatcttgatactaaagaatgtcttacatgttcccactatacacaaaaatcttattagcatttcttaattatgtgctgataacaatgttgtcattgaatttgacactaaccattgctttgtcattgacaagatcaagaagcaagtccttcttcaaggaactcttagtcaaggactatacaagttgtctctcccatcatcatccactacctccaatcatgtcaatctctttgtgtattctcctactatgtctttaaatacctcaaataaatttgcttgtactgtttctggttcatgtacaacttctgaatgtattgctacactttggcacaatagacttggccatccttcctctattattcttacaaaagttcttcaagaaataaatacaaagttgcctaaatttgatttacaattttgtgatgcttgtcaatttggtaaaaatcaattaatgcatttcaatagctcttctttaaaaactactcaacccttacaacttgttcactcagatgtctggagccctccccaaaccctactgctgaagggtataagtattatatattatttgttgatgattttacaaatacagttggatttatcctatgaagagtaaaactgatgctcttcctatctttctaacatttagaacctttgtggaaaaacaacttgatcataatataaaaagtttacaaacaaattggggtggggaatacaaaaaattgcaacctctcttacaaagactaggcatcttgtttagacatccttgtcctcatactcaccaacaacaaggtagagtagaaagaaaacataggcatgtgactgaaatgggattaaccttgttagctcaagcccaaatgccattaaatttttggtgggatgcatgtgtttttgttgtttatcttataaacagattacctactgtagtcaatgagtttaaatctccttttcaatgtctctttggcattaaaccagattattctttctcaaaaactttggttgtgcatgttttccatttcttagaccttataaccagcacaagtttcaattcaagacatcttaatgtgtcttccttggttatagcccctttcataaaggctatagatgtttacactcctcaggaagaatctatattgcaagaagtataaacttcaatgaaaaagaatttccatactccaatatgttcctcaaaacacatactgcagcatatcacaaaaattttcttgcaccagccttaattattcctattgtgactccccctgaccactcttctcagttttagtttggttcacttgatttccattctgattctccaaccaacaccatatctgaatcatcacccctacagcagtctaatgacccacctgatgcacatttggcagcaaataaaaatcctggtgccactcctactgtagctccttcatttaataatgaagcacctgcaacccgtacattagaaattcctacaccagaaattccttatcctccaccaccattacctcaaggccatcccatacaaaccagatcaaaatctagtatctacaaaccaaaagtatttctggcaactgcttcaaaacagcagctttatgaggaaccaaaaacaataaagcaagctcttagtatgcctcattggaagaaagcaatgggccatgaaaacatggcattgataaggaagaaaacatacgttctggttcttgtactgctgatatgcatgttttgtccaacaaatggattttcagaaccaagtacaacaagatgggtcactag

SEQ ID NO: 318782 - DNA, 1088 bp, Cannabis indica
ttttatttttagcatttagctttagtgtgttagttagtcattcttggatggtcctttgatgtggataagccttagtaacatgttataagaatttgttttagttaaattaaatccaacttaataaaacttttattgcaatgtttgcttttttattttagtttatctgttatcccttgatcgtttaacacttgcacagtacaccatttcttaagaaactcgattactgggactaatgtcactgctccttaaagttatctttaccatgagagtactaacacagatgtgtgaaaataattttgaatgctcgtgtaacatatggctttcatataccataacataacctatgtgccccccaagtgatcaagaaagtaccttcattggtcacttacaatacataatccccctgagccttcttgatcattgctcttgagtggtgttacatgtgtgagcactctccacttatttgaggattcatgagtggcagtgtttaactcactaaagaaagaaccaaataataattggagagtacaaagatgataagaaaaaaaaaatccatcaaatcaagcttcttatccacccggaatgtatgcacaactaatccatgagatgtcatggaatagggatactttagaaaaattggtaagtaaacttgtaaaaacgtataatgatcatacatcggtgtaaagcatagagaaaacaaagctcaataccaaattacaatcaatattgaagtgtaagtatagaccaaacaacaagcagctactccacactcgcatcaataaaatttgcttgaatgattgtaatagcccgtaaaaaaatatcatggcaaaaataagaatccaacaaacttaaatatacactataaattaataaatttaaattgatttgataaaaaggaatagaaaacttatctcatcaacaagatcttcgaatcttcatttgaatttttgggatagacaataaatctttaacattatcataacattgttggaattattttaccaggatcttagatctactcacaattatgttgattaacatcctaaatatgaacttctaaaacgattataagtaaacacatataaagt

SEQ ID NO: 318783 - DNA, 1674 bp, Cannabis indica
ttttgtgagaaagataataaatttctaggattaaaaaaaagcataatgtactgactgatatgcactgttttgtcaaggcgataatgtatgattttagttaaaattttctaaaaaaataagttttaaaatgattaattaatatttcaaaataattttttattagttttattaaaattaattttgattaattaaaatggaacttaatgaaatattagaaaaagaaaattcgctagaaggagggttcgaacctccgaccttgtggttaacagccacacgctctaaccagctgagctattccagcttttgtgtcatgttttcttaagttaatgtaaaaatattaataatttgaatcattaagactaacctaattgagacttttaccccataaattttgatatatacaaaatcatgatccctgaaattttctgaccgttaaaattctccttgaactgttgacttcattcaattttactaattttctggccccttcattgagtttaagattcaacttttatccaatttcattcaatttatggactaaattttgacatatactaaattagggttcttaaattttttttaacctttaaaatgtctccttgaactattgagattatagttgaatttggcagtaataatacttaagtttaactttcgattgtaaataacacctaagtttaattttttgtgaaaataatacttaagttgtattttttgaacttttatagatacgtgaccgttaaatgacccaattatttttaagtcataaaattgtaaaaaaaaatataaaaagataaattttttgaaaattcccttccaaaaaattattttaaaaatacacatttttaatagtaatttttgaaaatactacaatttttttaaaatgacccaataattttgttgctacctaggcccaattaatttcaatccatgttgtcaactatatgtgcaaatcatgaatcttaatcttaatcaaaataattatgtaaattttttttttaaaaaaaaaaacctaaattaataagaaataattacataaggcaccatttttttgtaaaatatttacatttttacgttcaaagaatcttgttttacatttttacggtttttcaaaaaataatacgaaaataacataaaatcaacaaaaaaacaacatgaaaataacatgaaaataacatcaaaataacaacaaaaaaacaacaaaaaataacatacatataacaaaaattaacaaaaatgaacaaaattttaacataaaagaccgtattttatgtaaataaataaaaaaaatcgtaaaaatattaaaattccatgaaaccgtattttattgtttttgtgcatttgtgaaattaacccaattaataaattaactaatccttttctatagttaataacaataaaattattcctttaaaaattaatggaagaaactatatataagaagtggaatgttgcatgttgtgcaatgatgatgtttgagtgaaaaataataatatcaaactttattataaattcaaaccaaaaagtcaaacaaatccattgtcacatttacatagagaaatttgattttctatacttacatgtacctaatattttatttctaaactaatacatatcatcattgaaaatatatgaccactttatctaaaacccaaaaatacccttctcaaattt

SEQ ID NO: 318784 - DNA, 601 bp, Cannabis indica
taacaaccatttgattaatgactagactcaatctaacagctagtacaatcatggattgtatacccaaaagtacaataacggaacaaaatcatatccctatatatacatatcgattccaaacattaatatctattatttttccaaagtgatattattttttgtaatatatatatgatatgtattgaaattaaactctagctcaaaaagtcttgattttccatatatatgtgaaaaggagacctatatatagctacatatatattttgtatatatatgcttgtcaatttatgaatatcaattatggttatatacatatgccaatttgtgaacatctctataaatattgtgataattataggtttgactagaaaaaaagaacacaaacaaaatggaaaataaagatgggttcaaaatcattttggtgtgaaatgaatggccttaataataagttaatagataattttttttttcttttttaaagaaatatagacaattaaaataacatttatataatagacaatttatatgtataaactgaaatatatgtatgtgtatataaaatgcggaattaaacaaatatatacactatataacttaagga

SEQ ID NO: 318785 - DNA, 772 bp, Cannabis indica
ccaattataaaggcagaaggagtaagacaaatgttctttccagttactgtaccagcatattacagagttcctcctgttcaatgaggaaaaataagacaccaaatccaaattcagaagtgtaacatgtaaaagcagaggttatcatagatgtaatttacttgtaacacaatttagttgtagcaatcaacattggttctcatccctgagcaaaacgaaggatatggggtggggatcaatgttacacttcctaaaaaagatatgctcttattttttttatatgtattgtaaaagtttgttgcaaggaatcaatatatgttttataaaattttgtttattcagatgaactgataatcatattgaaattttgctggacaaaaaaaattcacaacattagatatctttttaattcgaacaaatactattttgaaccgtgtattttgtaaaaactactgattgagttgattatttattaaaatgaaacataatgataattcgatttataagttttattacaagactagttatattttctatatatgtctgggagaaattaattttcaattggttatattaaaaaaataataaaaactgatttcaaagtaagcggtcaatccctacaacaaactatataatttaaattattttaaaaaaatataaattaatttataatttaacagaataattaataattttagcaaaacacaaaattcaaaggccttcaagaaaaaaatgtagtgaaatgtgtaacattgtattatggagtaactatatt

SEQ ID NO: 318786 - DNA, 4186 bp, Cannabis indica
tagtcggtgtctagatctgggacttagaccagaacacgaaccaaaactcgaactcaaaccaggacctggacacatacccagacccagacacaaacccgggcaccaaaactaaaactttaattggaacggaccgagatcttggaacgggactgggacctggacccaaaaccatacccaacctcggaccttgagcgagattgacacgcaaacctaaacctcgccccgaacccaaacaaggacctgaacccaaacttgatccgaactcgtaccccatgacttgaaactggaaccaaaactagaaagcagatcgggacacaagaacaggacaaggactaggacctggacccagacccaaaactgtaactagaccaggaccctaactcaaacacagacccaccctgggattgggtcccaaagctatatccaaacctgaaccgagactagggacctaaactgagacctgaactcatacccgaacatggaaaaggactcgagacctagaattaggatcgacacccaaaactgcaccctagtctcggtcacggacctagatcgagacccagactgagaccagggacatgaaccaaaactagactgggacacatgattgagatacaaatcttgtctcacgatctaggaaccggggcttggacaagacccatagtaggtgtcttgatctgggactcgaacaaggacccaaagctggacaaggaccttgacccagaccctgacatgggacccaaaactaaaacttggaccagaacgtgaccagaaccaggaccatgaccaggatctagacgtggaccgacacccaaaactagaccataaccaagccttgaaactcgtgctcggatctagtcccgaaccttgtcccgaaccttgtcccgaacccagactaggactgacactccaaccccaactcgaacctgaacctaggactcgatccttgacccagacaaggcacttgaccgagacaaggattcggaccttgaaatggacacgaacccagacctggataggtataccgacccagaactagactggaatcgaaacatgggacctagacttggcccaaataccgacccaaacccgaacctgtgacccaaactcaaacgtgacctagcccaagatccgaaaaacccgtacacgaacttggactaagacttggaccccgactcctacctggactcataccctaacccgcaacaaaactcagacccagaatcaaaactagaactctgactaggactcggacttgagaccaagaccaaatccaaaacataacccaaactcggaccagaacttggaccgagacgttgactaggactcggacctgagactagagacctaggacccaaacctagaccgagcatagtcctaagcccgcgttgggacctagaccaggatcaagaccctgacagggacccaaacccgaacctagatgaagattgggactgagacctggaccggaacctggacagggaccgagactcaaactatgactcaggacccaaaccaaaacctggacctagaccaggaccaaggaaccggacttacatgggggacctaaaccatgcacctagaccccagaaccaagacccaaatcaaaatttgggactcgaacctgaaccaagacctaacctggaccaaggaatttgaagtcagacctagacccagacccaaactaggacaggaaccttgacacagactgggaccaaacctaaacctggaccaaaacccaaaatcagacctgaacccagccaaactcaaacccagacataaaatcagacccaaacatagacttggacacggacccaaactcgaaaccagactaggatcggaacccaggacttagacccagaactaaacaaggacttagatcgagattggaacttgggactctgacccagacccaagacttgaacccacacccggagcctgatccggacctagaccgaaatccagacccaaacccaaacttagaccataactcaaaccccaacccgaacacgaacccacactcaaactcggaattgcaactgaaactggaactggactaaggataggacaaggacctaaacccgaacccaaacccagataaataccaagaccgagaccaaaaaccgaactgagactaggactcaaacctgaacctagaccaggaccctaacccagactagaaccgggacctagacccgaattgggatagtgctctgggcaatggaactaggaccggtacctagtacccattttcagattgggacttaaaccttaaacccagctcgtgacctggcaccaaaaatggaacaagactaagacctgacattgggatccatatttggacccgaggcttggaccgaacccaattggtgtctggatttgggacaagcctcaaaaccgaacccagaacaggacctgaacccagtcccagacaaaaacctggaccagaacccatacctttttgacctaaaattggaataaaactggaagtagactaggacccaggaataggaccaaaactagaacttggacctggaaccgaaacccgacctagacctagacctagaatctaaccggaccaggacctggactccaactcagacctagacccgaaacgggacccagacccagataccaacctagatctggactcaggacctaaatccagaccaaaacctaggaccccgattgggacctaggacctggacctggatgggtgacctagacctgggcctcagaacccagactcaaatcgaaactcgcgactaggacccgaacctagacctagacttgaaccagaatctggacccaaaccgagataggaaccccaacccagactcgaactcaaacccagatcctgacccaaacctagacccgtacccaagacttaggtccgagtctgagtctaggtttgagttcgggaactggaatttgactaggacctaaatcgagacctggactgggacgcgaacccaaatcaaaacttagatcaagactagggacatgaacccaaacccagacacaaacatggacctagacccaaacccaggttccggtgcgagattgaagactcagacctggacctaggaccctcacctagatttgggagccaaactcaaaactagaaccagaatcggtacccaagccatgacctcggtctcggtcctagaccaagacacggatcaggactcatgatcttaatcgaaacgatagtggaacccaagattggcatccagatcttgacccaagatccagggcttggacccaacccgtagttagtgtctagatcttggaattgtaccaagactcgaacaatttctagaacagttgccaaacctagactcggacacaagtcacaaaatcggtacaagaaccggaatcaagaccttggaacatgaagtggacctggacccaaaaccagatctagacgtaaaactgaacacggacccggacccaaaccgagattgatacttgcgacccaaaactcagaacccacgacccgtgacacgggacttggaccagaacccagacttgtactggaacatagacccagacccagaccaagactcgaacagaaacacggacttaaatccagacccaaacctagactcgtaccagaatttggagtcaaacccgggactcagacccaaatcgagatcatgacttggacccagacccagacactcgagatctgagaagtggggcttggaacaaacccgtagtcggtgtctagatctaggactcagactaggacaccaacccggaccaggacccaaacccggacctagacctagacccgggacctgtaattggaacctagacaagaaccgccaatgtaggaccaaggaacaagactaggaccgtgaacaggacccagacccaaacctagaactaaactcagacctagccctagacccaaactgagaccaaaactaagacaaagacacggtcgtgttcccagatcaggaccgagatttggacacaaacctaaatataggacctgatcttagacacagactcagacctagatagggatcccgatacgaaccttgactcagacccagacctagacctggatcaaaacccgagacatagatccagactgagatcctggctcagatgaggacctagacctgcacccgggacctaaactcagacctggacccgaacccagacctagacaagg

SEQ ID NO: 318787 - DNA, 1312 bp, Cannabis indica
aaacatagtgctcaaagacattgaatgttgaagacttggagagcatgccaaaaagtattttggacattctttgcaaattggacaccattttcccaccggcattttttgacataatggttcacttggcaatacatttacctaaagaagtgagtactttcgggggaccagtacactagtaggtggatgtattcaatttgaatgagccatgtccgtatataaacaatatgtaaaaaaatcgttctcaaccagaaggatcaaatttgtgaagcttatgcagttaacgaggcattaagcttttgttctatgtacttttgggatgttgaaactcggtttaaccgaccaaatcaaaatagtgatgtcatcctgaataagcctgaaagagaattctctatattcaagcatgttgggcgacccattggtaagagaaccatcgtgcctttaccaatgcaagaaaagcttaaggcagactggtacattttgtacaatcgtaaggaagtgaagaagtatatcaagtaagatactttttgcattcttaatttagttttctagcactcatgaccgtctcttacaaaaatctatttgtgtggtgagcataggaacgcgctacaacttaggggtgatcaaaatcttaacaccgttcaaaagaacgatttttctagttggttcaagtctcgagttagtattgctttatactaattttgtcattcaaatacggtttcttgtactagtattgattacatttttcactcaatgatagatcaattaactctgatcagataaccctggggaagtatcagatgagttttacgccatcgcatatccctctaatccagcatgttattgttatccttgatttattattaacagtgttaaattcctagttgaagattagaatgacaatcgtaacacccaaaacagtggtattttggttcctagagaagatggtaaaaaaatttatggcgtactcaaacaagtctacgagttgacttatatgaaggattgtagtgttattatttttaggtgcaagtggtgggacacaaacggtaacaggatagaaagtaatggttttttcactagtgtttgcgtcgcccgtcaatggtaccaaaacaaaccattcatacttacatccgaagaaaatttaatatattacatttcgaacctgaagaatgagttgattggaagcttatcaatgtttacacctgtgacagtcagtagtcccgtgatccgtaaggggaaaaacactgggtaagctgtgcaatcctacgtcgcctggggaaggtcaagtgggatgattctaaggctgtgtaggtat

SEQ ID NO: 318788 - DNA, 3068 bp, Cannabis indica
ttatcacaaaagtaataattgattaaaactaattgttgactggatttttagtcaatcgacgcagaatcgtaataaatgaaaaattaaccaaaattctaataaatgctaataaagaacaccaaaaattaaagaggttcggccccatatgatggtaatagcctactctcattgtattatattaatcggagttgcaaagtcaagaataagctcttgaatgcaaggaatacaaatggcagagtttctgctctttaagtgttgattttcggatccctttcccaagtcatgggtgaccccttatataggggggaaatgttagtgcttctcgtttcaggagacgcgaccattgcggagatatctcaaccgtcttcttagtttttagaagtggctgaagtctgattcttgtgattatatcccgctactttcgtggatttgtaactaccttgagcttcttgcgagatttgaatatttgaattagttactgacgataagagttcttcccagagggcggtatgaccgcttaactttccctgggggccacttctttgaggtaacacccccgagagccattctgaagggggctgatagtcgtcaccttggggctaccctcgagaccccttccacttgatcttcgacattgtgtatagtcttgacgttatgaagatgcattatatcaaccatgtcttatgtaggtggaatgtgttacttggaccatgagggtatggggagtttaagggcacacccttagactaactccatcaccttttgagtagattgttatatttgaggtagggtagtagtttataccccccctagagtggtttgactctcttaggtgtgtggtgatcgtctatcccgtttgtgggggtgctagtccacccttttccccttaggggtagtcactttgcttaagctagggcaaaatgtgagcgtcagacttctcttccaatggtaatgactttacacattcttcatcgattcagtcccgatattcttgcgccacgtataatcatttttgccacatcaccatcgtcaaaattgggttaaacattatttttagtagttagactatatggtagaaactttttgtgtagcccgtgcttcaattttgttgttgatgattgggtgagacgatgctgggaataccatgcttcatggtggaaaaaagggacaatttaataattttgctttatttttctttagttaagttagtagattttagttagataatgatgttaattagttaatatagctaattttttttattgtacttatccaaaatcaaagaaaactaaaattagaaaagtattaccattttctctctctttcctttggggttcgaccaaagcaaaccctaagaatcaaggatttctttcaagcatttcagaccaagttagggttatttggagtaggatttttggattcaaatcaaggtaaactcttcctcctcttatctttgtggttttgatagtcatagtagggttttcttttttgttatgggagttcagttactgtatgttttggagttgtaaaaatttttatggatcatataactaatatgggattgaaggagatgcccaaattgcttttagggcaagtgggagattgttaggatttacgctttgaaaaacatgtaaagacatttctatttataaatataagttgaacatttaataaatgcttaaatgttaaattattaatattgaataatttatatatataaatatcagattattccttattcatacataaggttgtgacttgtattgtacagaaaattaagatcagttaaccatgaataaaacagtcagcaacatattaaagttttagaatctttaatcaacgattgctagtgcggttcactgatccccgtcatccagtgcaagtaatctcgattcggattactaatttagtatgacatctatatgaaggtgttgtatataatagagattatatatgacatgatatgtaattaagttgtctttatcaaacatgtcatttactacaaatacctaattcatatcataaagatgatcaatagtagatcagcctaaatcttgagtaatcatgaactcttattcgtgttattaggttctttgattcactcgttaaagtttctcagataagatgattcttacaacttctatttttggaagctaataatgtggatggctgagaacatgatctacaattatggaatcttgactttcctcactgatcgaatgttggttcccttcaaatgttaattttagaattgaaaagttatgcacaaatttagattgaaactaaattatactttcactagtgaattaactatactaaaggataaagaagtaattagaatggtaaaattataatttgactaaaactaattacgaactgacacaaggagggctaatcactaaaattgattatatcaataaacactacagtaaaattaaataaatataattctataattactaagagttcaattccatatttatggtggagtaatcatagaattaataatcatgattatttgattgatgagattcaataaataatctaatttattgaagcttagaattataggttcatagtccccggatcgccaccttgaaacactatcaaaggaagggataaaagttttatatggaaagtaatgatttatttttaataaataatttattttttcaaatttattaattaaataaattggggaaaaaaaaagttgtctggacaaaagacaccaccaatgtcttgttaagacataggtagtgccactatcattgtgtcctgatgacacagtaatagaggcctataagatagggttgtccgcactcggtttgtgtttgggttggttaattaattaattaaggaaaattatagtaaatgggcccaaatcataggagtatgttagtttatgtcctcatttcaaaaaaatatagcaaatggccctaaatcataagactatgttagtaaatgtcctcatttcaatttttttatttatttatttattttttttagaatttagaagcaaattatttaaacattatggtatatcaatattagtttgttaaaatcttttt

SEQ ID NO: 318789 - DNA, 821 bp, Cannabis indica
atatatataaagttaacataccaaaagtaactgagcaaatttcattcacaaaaaattaaatgcattatgaaacttctcaagcttacaggaactttctgaaccaaattaaaaggagaatctaaaatgtctggtaactaagccactagttgtcatgttcttaaaacggaatatctgagctgaaaatggcaaagccagaatcaaaaatcctaaacacaaatccaagaatatctaaaagtacttgttaaagattcaatatattaggttctctaaaaatacaagtgccacaaataaaattgcatgcatgatattgattccaaagtcaatttaagaataataataataatataggacaaattaaaagttacaatagtggagaaaaatggaacgaatctgttactgccatctgttggtcgtgggatttttgggtgctgctacaattcttcatttttctatgatgttacatacattaaaaagcattttttttttcaaatataaaataaaacaaaaatatggtgataatatatatatatcttatgtcgcatgtgggcataattaataaattgcaagtcaaaaaggagagaagaaaaaattaaatgataaattagtttagaaattttataggtgctaaattgagcaagtgggataaggtggtcgttgtctaggtatttatggtggtatggtgtgggggtctacggcgtttgtttggttttgggtcaataatatatgacttaagtcgggtcgaatttgacggcgggtgatccattgggtctattttcttaaatgggacccatccactgaaactatacattatattatataag

SEQ ID NO: 318790 - DNA, 2803 bp, Cannabis indica
tcatccttagagtgcacaatctgaccattaacatcttgtatacttctgataacattattagctttccttgaagaagccttagcatggaaaaattttgtatttcgatctcctgaagtgagccattccaccctagaacgctgctgccagtattgttcctcatttgccaataattcatccaaaattgcttcagccgaggtaatgtttttagaaaaatcactgcctggtgtggggttattatgcagctgttggactcgagattgagcttcttttatatccttcttcatatgtccaaaagtagtgttatgccactgctgtaagctctttgcacaatcagtcaaactatcagtcaaggtagcaacacagtccccatctgatcgatttgtcaaccaagaatctgctattaaccgcgaacaatcaggagaattcaaccacattctctcaaaccggaatcgagactttctcctttcaacaatatgctgtgtggagaaattaagcacaaccgaaagtactctatggtcagaaccatagtaatcttcatgagaaaccattggaggagataaaatgtctaaccacaccgaattgacaaagcaccagtcaagtcgttcctttagtgcagtaggattttttctactttttgtccatgtaaaatcatcaccagtaaagggtaattctttcaaattgcattggtctaaagtagatcgaaaagccaccatatgattgtcatgtcttagaggcccactgtttttatgtgtatgtgaaaaaatttcattgagatctcccaaaagtagccaagggtcaagaggagaaacatcactaagtcttttaatcaaagtccatgtgtgttttttattttgagtttcaggaaaaccatacactgcagagagatgccatcgaggaccattatcacacaccaagtaacaatcaaagtaattaacattcattgaaagaagagttacatccacaggatctttccataacaacatgataccccctttcaaaccagtcctagggacttctaaaccacaattaaaacataaagattgcttaaagcgagaaagagaattaacaggaacctttgtttccatgagaaacaaaacatgaggattttgctctttaacaagcaaacgaagtcgacggaatgcactcaggttccccaaaccccgtgcattccaacttatgattttcatgatgagccgcgggattgctgagcaatcaccgcggagttgtcaaaaacatcagcagaatccacagttgcagaaaccgactgactcaaactagcagcttcagacaaagaagcagcagttgcagaattagtagctcgacatcgcttcaaagtttgtctcatagagttggtatcaaactgtcgtttgaaaactctattggaatgagcattttcttggtcatcaacactggccttggacacattaatagcagcaggaacatttgtataaaccggcttagtaacagcagccgtggacaattgttgcagaggaagccttgggatagcattaggtgtagtgatcggtggatatgaagcaaaagtatttgtattgttggctgcagaccctatttctggtgtgaaaacatcaagcaaaatagaggtagacggggctgaactcatagccattatgcttttccctttatctttaggagaggacactgattcaaagtttatttgggaatgggtgttggagggaagattaagtggagggctaaaagagatatggtctagagtggaaggtaaaaagatagatgtatttgtttggttggatatgggcctgatggggattgaaggattaatattgacagtttgagcatgatcaacatgatcagcatcatggacagagtttgaggattcaccaacaagtaaaggagatggttgaggaataggtaaagatttaagtttagggacagccgattgcaaggaagttctggccaatcgagtaagcagtggccatgcattgcctttaggtaaatcagtcctatatcgatcatatggtgaagttggaagtttggaacctttaatttctggaccatatggcagttcaggctcaatattcagatctaatttctctagaaaaattggacatttttggtagagatgaccaattaatccacactccatacaatagtccggtaaccgctcataacgaaattctacccaaaattcatccttgattctagggagtgtaatcattctaccccgcagcagtggtttattgagattaaggttaacccgaaagcgcaaaaaaggcccccaaccctcattcagagaatcatcatgaaccgcaataaactcaccaagaatagaagccaatgctttagccaaagatcgagacttactgagaaaaggcaatctataggcttgaacccaaaatggactatggatcatgatgtctggagtaacatttaagtacaaagaaggatcaatgaggacaatatggtggttttgaaagtgccatggttccttctccaacactcgagcacgatccccctcacatccgaaacatagcagaaacaaatctgagtgatgatccttaatgttaactttaaaacgcccatcccaatggtctgccatctgcctttggaaggtggataaccagatttttttgcttgttaatacacgagcaatgagaataaattctggggaagaaataacatcagagccatcatcagtaatggccagaatttcactctcattttcagtaagagtcattgtcgatttcattttatcaagaagtggattcattgtaactgtgtgatattaagaattagacaggatgaagttcagtgaagattgatc

SEQ ID NO: 318791 - DNA, 1018 bp, Cannabis indica
tggatccatccaataaaaaaaaaaagaataaaattttaatgtcaatttttataggaaaacttacaaaaatactaattagttcgattggatgttggatgtattggttttttggacaccccatccaacatttgatctaatccaattagatatatatattcaaaaataatatccaatctgatccgatcacaattagatatccaataattggcggtcggttataattgaagtggtcggttgttattggattgtatcgatttatgcacatccctaactaccaatatataacctcatagttaggttataattttaagtatttctaatttagcccctcaataaattagaaatatcacttaagatatctacacatttaactcatcagactttcataccaatgacctacaattactaaaataatttattttggatcaaactttaatccatcaaaacccaacattagttgtaggttgtccaatgcatacagtggatgttgttgctgtcattgatgaaaaaaggaataagattgatttcggagtagtagtaagaaacagtgaaggacaagtgcttgcttgactagtggtgccctgttcatggaattttgtttcatcaacgctgctgaaggccaaactttgttgcattccctagtggtgtttgttaatctctttaccaattttatatgctgaagtagctctaaggtgattgtggttaaaataatgcctcctaaggatattgttagcaagattagagcttctttccctagcctaattctcgtttatgtttcaagacaagctaatcctttagctgataaattagcaaagaaaaggtactatatgactagttaatgagttgctatggaataaaaatagtattcacattattcaactattacgtagtttacggtaggggtgtacatcaaaccgttcaaaccgctcaaaccgcccgcaccgcaccacaccgcaaaaaaaatgcggtttgaaattcttcgcggtgcggttgcggtttgaatttttcccaaaccgcg

SEQ ID NO: 318792 - DNA, 3925 bp, Cannabis indica
aaaagaaacctctggtcttgttatggtagcatactgcaaacctctaacaattgatttgtacaatgtagcatcttcgacaggttcactgccatagttaaagagcttaaagccactgtcactactagaaaaaacaggttttagtgacacacattgagtaactctaaaaatttttagtgacactccacacgtgtcactaaacccttttacattcacgttttgcgcgtaactatatgcgtatagagtcaggttttgtcagactgagaaggtaacagccacatgctaaaagtttcactatatcttttttttttaattttttattattatttttagagatacagtgacacacaaaaaatatcactacattaaatattttttttaaaaaaattatatttaattattattacattctttttttacaaaaacaaattaaaatatttttttttgctggaaagtaaacttcattgaagaaaaaaacaccaaaacagaacaaggttcacggttgcaacaggggtgcaacctcccaaaacatcaaacacacgaaaaacattcaaggaagccgctcgcacagcaagacgataggccaccccattatccctgcgagggatccaactaaccccaaacaacccccctaaagagaaaccagaaaatagagagagaaacacctgaacaagtttccagtcagacaccatccgcttcgtaaccgcatcaaaaaggacctggcagtccgaaaaataaattaaaatctattacaatattaaacacaaatttaaactaaaatattcatataaaaagtggatgacaaaaaaaatataaaaaatttacgtgtctaatgcatagtaattaagtatcctcaattttaataaaagcataacaaaaacctgtaggaagctgctattttcctcagtcgtatatctgcagaaagagcataaaagaattcagcataacacttttacattcattaatatttaaaaagaaaataaaatgaaagacagaataattgccactataaattacttgacccacaacattcaaattattatgtaatttataatgacaacttatcagtagttcaagcaaataaatgtttcccacatttcaagttatcaataattacataaagaaccctatgatttaatctttccaaaacatcttttactaaaataccacaattaattaaaaagcttgaatcttgatcctctaaatgaaatgcatgaaaatatagttgttcaatcatgaggaaacctcatcaaattatcaattaacaattaggatcgaatctcgaaaatcccattgagaaaaatccaataaatcttaccatatagacataacacttggagacttgatagagaacaagctccaaagcttccgtgtcctcctcttctactctttcttcatcatttggttagtctcttgttcgttgttgattggccttgggaggccagggatggccgcggcttcgtcgtctcggaggtggttcgtcgtcttggagaagaagaagaaatggcttatttttttggtaaaagttttctaaatgtaaaggttttctatgcatctcttatacctaaatttgttccctaaactaatacttataactattgaaaaaatgagcatactaatattttaaaacccaaaatgccccttatacacataatctatccctcttccctcgtcactctctttctcaaaacctcatccattttctctcctattctctaacaactcaaggtaatttttttagttgtaaattaaactctccaaactactacaaagtggtagaagttagaggatctagtgtgagactccatttttgaggcacctagcgtccataggcaaaaatccatgggtaagcgatttatttctttactattattatattaaatttagaatgttcttttcatgattgatctgtggattattgctgtttttcttttattttgtggtaaaatggtttttgtctggttggtcctgggtttttctgtatttttttcgtctagctcgataggggccggatactagcctgatgcttctttagtttttgatgttggggaaggtggcccgattaggcccaatgggggaacctgaattgggtttggcctgatgggggtgaacttgaatggggggtggcccgatgtgacccgattagtgtcccgatggttatgtcagagaaaaataaagcccgatggggcccgatggtttggcctcgatttggctcgatggttacaaatttattacttttaagacttttttattagatttttcgttctgaatttgtaattgtattttttttaatgtatgtgacaggttcaactattaatgcgtttgtaatgtataatgatgtttgggagcttgagggtgtagattgggtttattaaagggccgaaaatttgacatttgacattgttccgaacgtaagctactcaggtttggttgatcttttgtatgaagaactagatattgttaaagtgcagtatgacttgaaactggaagtaaattacaagtacaagaaaggctacacgtatcgtcctgaagttattggaaatgataagagtgcaaggtactttttgtctacacttgtaaagaagccagatgaatttactcccttgtttgtgactttgttaaagaagaatgtttgtgtcaatcctagtcccacaccaagttctggtaaggacaattgtagcgaggttgggagtttcattccagaaataaatctagaggtgttggtagccgatgtattacctgaattaaacactatgatgccgagtgctgatattgtagcacaaattcccttcattgatgggttttttgatggtttagaccctgaatgttatgttgagggcgatgatgaagtaaaagacaatcaaagcacacaggtccctgctactgtagctttgaacttaagtccactatcgtaccaaataccacccaggccaccgacacagaaaataatgctctgtagagaaaattgccaaacacctggtactagtagtaatcgtccaggcgaaaccaataatctataggaaccactgagagtttaggtcctaataatgctagaaagaccaatgatgctagtggtcctagtgatgctcgagggaccaatgtgactggatttagcgatccattttcttcttcgacaagttacggtaaattcaaggagaaaatgtatacaagagaagacatcaaggatcatagtcattatatatctgtgggtggcacaccgggcggggagttacatgtaggaaagttttttagagacaatgagcatttaaagatggttgttggcttgtatgcaatgaagaaagagtttgactacttcgttaggaagtccgatactgctgtttggtacgttacatataaggatatagattttgggtagagattaagagcaaagaagaacgtactttctaacatgcttgaggtgactacatttcataatgaacatacatgtgccattgatcttcgaggaaaagataaccgtcaagcatcacctttgatagttgcccatcaaattaaggataagtttacaactgacgactcgaatcatttggcctctgatataaggaaagatatgcacaaggattacgggatccaaatgagttatgaaagggcttggaggtgcaaaaagaaggcactacacctaactcgaggtacacctgaagattcatactcgaaattacctagttacttgcacatgtaaagttgaaaaatctaggtacgatcacgattttgtggtagaagatggtcgcttcaagtattgtttcttctctctgggtccttgtattcgggggtttaggtttcgttgacctgttgcatgcgttgatgggtctttcttgaagactaggtatggtgggcaaatgttgtgtgcagtggcactagatgcagggagccatatcttttcgatagcatttgttatagttgacagtgaaaa

SEQ ID NO: 318793 - DNA, 764 bp, Cannabis indica
ttcataagtattttgggtagcgtgcctaattatttagggcgttacatctaagtttaagaccaaggacaaaatagagaccgcacctggaatcactctaaggtgcacctgggacggggaagacatcacccccatattaggtatattaatttaggagttggtcacatccttaattgaccaaagaaaagccagcgactgctacaacacttcgttgacagtcgccaagaagacctcctccactgtaaagatgaggagatgatgaaaacctcatctgctctaaagttaaggagactatgaaggcctcctctgctgtaaagtcgaggagatgttgaagcctactcctgtaaagccgatgagatgaagaatacctcctttattgtcaagccgaggagatgttgaaggtctcctttgctgtaaagtcgaggagacgaagaaggcctcctccactataaagttgaggagatgaaaaatgcctcctacgctgtaaagctaagaagttgacgaatgcctcctccacagtgaagctgaggagaagatcaagaccaccttcactaaaacgtagttgagggaatgttaaggaactgtaaggctacaacctaagagaagacaaagtcttcatctatatctacataaacacaaagtgcgacaagagagacaatactaaaacaacagccaaatacagggtccaatcgcactcaaggaatattgacaataaaggaggagtgtcctatttttactattttggaaagtacagggtccattttgtc

SEQ ID NO: 318794 - DNA, 650 bp, Cannabis indica
gcctttgttgtttctattcgcaaatatttttaaccaatattattacagctttgtgtaataacttagaatataaaaacatgtgaagaatataaaaaatttctgattacttggaaaatttcattataataatcaatagtactatattaggttatactcccaatacttagtacatgtattaaaataaattgactaaatataaatacatgcgagtactattgataataatattttaagcttttgccattccatgctctcttgatcgctataccgtcgaggtctaataattggtaagtcgcattactgatttttcagcgattaggtacggtccttcccagttatcgccaaatactccatgtgctgagttacatgtgttaggcataaccttacaaagcaccaaatctcttactcacaggttttgctctttgaccttcaacttaaaatcgcgagctattgactgttgataggctgcatttttcatatgagcctgattgcgtttctcttccagaacatcaagttgtgacagctgatttttagtattattgctaacattgaagacatctctttccaaagatcctactccaactatgactagtgccatggcttcacacccataagaaagtgagaaggggatttcaccagtcgttgagcga

SEQ ID NO: 318795 - DNA, 1039 bp, Cannabis indica
taattagttttgagatgatgaaataaaactctataattctcaacaaataaaggtgcaaacagtacaacaaacaatttgaacattaatttgatcatgataaataatttaaaatttttcaaaattaattagtagtaaaatacactgtcattaaagaaaatatatatattaagcgactcaattagataccatatttaaacaatttttgtgcaccatatcttttatataaatatattatagttttgctaggttttggagattgataggaacacaggcagcatcagaagaagtagcattgaagcattgagtagcaagaaccttgtaagcttgttgtgttaggtgaaatccatcaaagaaaacataatcctttctatctctacaagtcttttgtaagctatcacatgtcccatatttgtttactccacaacatggcttaaacccttctttaagccctacaacaaaaaaaatagttatttaatacattaatttctgtatttataagttttaattaacgtataattgcaaatatactcaatgaaaagaaaagaaagaaaaagtgtaccgaattttgcagggttttgagctaagttgagataatagtgataatttttggccactacaaaagtggcttcactcattgtggtgttgcctaattgtgatatctttttatataacatttgattgaaattgaaaaccaaagagtttagttcatcaacacatctgggttttgctgggaaagccatatctactacaaatggcaaacaacccaaggcttcaacatcaaacacaacaaattttctagctcccaagttatacattctctgcatacgtaaattaattaacattaacataattaattagtagttaattccccaaatcaatatataaccaatgttagtaaataagaaagcgaaacgagtaaggataagtgcacatataaattacacacaattcttaacacaaacttatgcagccaaatatttcaaccaatgatcatttttattaaaaataggtctcatttattaaaagtaacttgctatta

SEQ ID NO: 318796 - DNA, 909 bp, Cannabis indica
attattttcttcaccatacagctcatacattatcgtaatcttgtttataaaaatatattcgttttattttgtcattttttatagaataatatgtgtacaactaatttttattttatttttgacaaatatatctatatatcttatgctagaaatgttcagtgtaaatatattcagactatatattgatcaatcgtgtcgaattacatgacagcactaattaatttattttcttttcttgtgttttcgttatcaatctgaatcatagggatcccaatgatatattcattattttccacctttcttactttgctcaacatctctattaatattattggaaaatcaattcactaatttattattattattattattattattattattattgaagaaaaactcccaaaagaacctacctttcagaaaaaccattttgaagaaatgaaggaagcagaacattattaatctcagctaaaacaagaatatgcatacaaataggaaaatcagaccaccaaacagtactaagtaacactaataaaatagtgtatttagctaaataatatactacaccatctataagatctagggcaatgaatttcttaaactaatctctcaaaaaataaatccttaaactaagataagctaaaggtaggaacaacaacatcgcttcagttatgcgaacgatcatgtttggaagttggtgtggtcgaaacttttacaccctcgatgttaatttttttttggtaaattagttaataaaatatattttttaattaatatacatttttattgagaaattaaattaattttattgtgataaattcgtgccctaattacttcatttcttttatgaaaagttctattcttggttgcaattgtttaagaaacttttcttgcaagagaagaaattct

SEQ ID NO: 318797 - DNA, 954 bp, Cannabis indica
ttctttgtatttccagtttttgttaagtgtttgtgttcccagttcgagtactcgccgttctaggttgaatactcgcacttgttcattactttattattattattattattattattattattatttattttggtgttgtaaaattccttcaacaacaacgtatataaatgtgtcacgtaaattgtacacatttactagatcagtgaataaaataaaattcaaagaaaaattaagtattattattattattattattttcgagtgcaaggaagctagtacttcatttacattttcatggggctttcatgtagtaaaataaattcggacaaaaatgtattattataatttttcaatgtgataatagttgaggagacaaatattctatttataatttcacatcctaataagattccaaaaaataaaagatgatgggaacaaaataaatcacttaaatatttggattaatcttctatttctaacgattttagagacatgattttttagtatatgcatgactcatgagtaatgatttttacttttatttttgtaaaaatatctagctaaaattggataacatgccttacaaaaaaaattggatagacattattgtacacatgttgtgtataatataattgtgcttattactctaaatatattgcaatatttttacatctctaatggtgttacatgtgggattattaatttattttagcaaagaaaagatatataaataattcaataaataaaaagagtaaattctttacaaggagaaaaaaaaagataaaacagagtaaatgaatactcgacttaattactaattctttctaaaatttaataacaaattttgcgtattcaaggaaaataaaaaaaaaaaaaaaaccataaacaaattaaacgtcaataagataatatatagatatcatgaatcactttaatacaattatcaaattcaac

SEQ ID NO: 318798 - DNA, 1349 bp, Cannabis indica
ccttagaagagtgtttttaaacaagaaagacagtgcagttggcatactcggacctaactgggaatgaccgtatcaagtagtagaagtgacagactctggagcgtacaagttgggacggtatgacgagaatatggagcttgctctagtaccaaggtattggaatggggaacatttgacaaaatactaccagtaagtgcataaggtatgatgaccttctcaaagtgcacaatgctcgaacatctactcttaagtaggtggccttttgagcggacctcgctcaaaggtttagataaaatgactggtactcaagttaaattaccatttctaaaagaacagtctaagaaataaaattgttttatgtttgaattagttaagaatcagttagatcatgtaatatctttcataattcaacaaatgtaagttactacggtaacaaaaattttcagaccaataaatgaataaagatatttatcatcattctaattgtgttaattatttttctttatagcaagttacagatttaccattaaaatgtgtacaaaggttctgcttgaacccaaaaagtcgaacagacaaaaaataaactattacaatacaagtgaccaagagtcataagtctattcggtcacttggaggtcaactatacccgtacgaaacaaaggtaaataacaagcttgaaaaatagcaatctgcatgtgcaattactaaaacaatggaaaatattcatttaaataaaaagataacaaagcacgataagtctgggataaaaggtcgccttgccagctagttatcttaaaacaaaataaaaaataaccaagtttaaaggctgcttgttctgccatattatactgaacaaaggcccatgagccgaaaggaaaaaaaaaagaaaaaggtcttatacattggagtccctggttctttgtatggatcaagttaacagattggtgcttttattgagagccttagtaaaaataaaactcgaaacacatctccccttttcttgttttaacctcacaggattcttataagatcatcacaatatttatgtgaacctaacatggttctcatagatgcataaacctcacactgttcttattgctgcatgaacctcgtgaggttattgatgtatgaacctcatggggttcttattaacgcaagaacctctcgggattcatattgatgcaggaacctcacgggactgtttttaatgcatgaaccttgtgagattcttatcgatacacaaatctcttggggttcttaactgtttatattttaattgatggactgcatgtgttacaatgattgcatactgggcattcatgtactaactgttgggttttatgccctaa

SEQ ID NO: 318799 - DNA, 1016 bp, Cannabis indica
tttaataaaataaaatataaaagtattttttgattaatggatatgaaaaagaggtattcctcaacttaccccatttcggaatttatttcttcacctacaaaactaataataaaaaagttatacttctatttattagtcataagactaacttctgcttcaatcactaaaaaaaggccataactttggtaacttcaactatattttagggatattaccatttaccagcaaagctacttaaattatacgatttgtgataactcgatttttttcggcaaaacttccaaatttttgttatgatacttacactttcgattaaaatgatgttgttaaagttaatgccaacttatattactgatgtgtacacaaattattaataaccaacaataactaatttaaaatatatatagtcaaccaataattaatggttatattttaaagcaaattaaaataaaacctaaaataaaatgaaaaagtatgtactaatttggtgtaaatttaaaatccaacaccattaataataatgtataatttggtgaattaattggtatattctcgatgtgaaaattagtaattccatacaaatttggtagaattgtaaacccttagagatgctctaatttttaattattcatatttattcatcgataagaattatgtataagttatgtatgtttatattgtaaaattcactataaaaaagtcgatgaaagtgacgtaagtgtttgatagagatgagaaaaatctcttttattttactgctgtataataacagcagaaatgccaaagtgaaattaggtctttacataatgaggtatatatacgacaaaggagaagacagcccaagaaacaaagtgggccgaaaaatagtgggccagtaatactaatagggaaatttacacccattactctttttttccaattttttttttcatttgtattgtgacatggtgaaatttacttttgtactgttttttttttttttggccagtatactgcctttgcaaactttaaataaa

SEQ ID NO: 318800 - DNA, 810 bp, Cannabis indica
cccctcactctctttctctctctcacacctaccctagtgatgtccaacacttgagttttgccaatattgattcacaccttgtaatcctatgggtactatagtagatcctacctttagcgatctggatagtaattccctcagtaaatacaactaaaaggggagtaggtcattacctgctatcacaagggggttgaacctctataacaaattttattgtctattactttttattcttatttatgcaaacacgtggtatgatcccgctgtcgttactcaatttttgaggtcaacaaaagttactttagaagctcaaccttccttcataagttaaacattttactaatagagaatcaaagaacaccctcccagctttggtcaacctccaccacaaaaaaattgccccatctccattatgtcctccttgcaaatttaactgggaaaacgcttgtcatgccttattctcttgcaattatgtcaggaagcattggaaaggtacacagttttactccatttttaaagattctgctcatattaattttttttgacataattgtttcttacattgtaaacttattcaccaaagaagatgtggagttgtttgtttgcacgtcttggtcaatttggcatgatactcaaccacaacaaaaggacttccagcaattcctcaaaatctcttggactttggtcgctctttgattcacgaatttaaggaagctaagtcattagattcaaagatagacgccccagccagacaacagtcttggggtggaaaattggatacccctgttggaagttattttaccaggaact

SEQ ID NO: 318801 - DNA, 807 bp, Cannabis indica
ttttttttaattgtgtttcaatagtggaccctaaacgtaaaaggagtgatatggttgaattgggcgagactaatggagttgatgtaggccaggcgaatgagaaagaagtggatcttgtgagaagaagttggtagtagaagagatggactaggatgacgtgagtttttcaaaagaacaagttattggtgggtactggtgtttaggccggctacaaattacaaatttattataatggaattttcgtggacattagagccaacgggctaaacaattcttaattaacctagtgtcttcaaataaagaaaatattttaattttgtgtgaaccattaggtggaagggatgtagtggatttggtgaagtttatgttaagctgtgtttttgtgttgaagcccaaggacatagtggtgggttggctcttgtgtggaagcacgaaaatgatgtcatttgacaagggttttctaagaaccatattgatgtttttgtgccactcattggtacaaatcagtggcgattaactgaaatctatggagaacttaggcccaagttgaggaggcagacttagggcttgtttcgtactgttagatattagatgtatattagctgtaaaagaattagatatttagtagatatttagtagatatttagtctcctagctttgtatataaatatgtattattctatgaaatcaacacacaattcgaatcactattttctacatggtatcagagcattgtgatccgaaattcaaaattcgaaattaggtttcattaaaaaaaaaaaaaaacgaagaagagagtttaggttt

SEQ ID NO: 318802 - DNA, 733 bp, Cannabis indica
taacatcgagatggcacctgagtcggtcgtgaattgggtacgagactaccttggcaactttcagagcaagtctaggctattagcaattccttcttcttcaaagtctttgctaagtactcatattgagccattgggtagtagatggattcctcctttagtgggtaatctcaaagttaacacgaatgtagctattaactaacttaataattatactgagcttggattaatggtagttcgagatgagctgggagtggtcaaggcgtctgtaagatggcagattgagggttgtttggttctagagatggcggaggcgttggctattcgaaatgctttgatttaatgccttttattcgggtatgataatatttgttttgaatcggattgtctaattattattgtcaaaatcatgagcaatgtgtcatttatttcatccttgggacttgttttaaatgacattttactctttgtaataagtactaagatgttaattttattcattgctctaaatcttgtaatatggttgctgtcttagcaaaactcactctatatgcggctgatagcaaggtttggtggcatgacaatgtaagttgtatttaaaattatgtgatagctgatgctattttctaatgaattctcgccctcacttttttagagcacttattgcttttggtattggtgtggttgagatcttctttctacaaaatttatattatttaatttataaataatataa

SEQ ID NO: 318803 - DNA, 744 bp, Cannabis indica
tattattattattattgatggtggcctttttgtgatcatgacgacgttggcgtatatattattatatcacaattcaatttataaacacagagaaaaaaagaaacaaaggtcaaagcgaagcagttgtagtatagcgtatagaggtaatgatttacagagatatatatatataaatatcagaaaataaatatatattttttctgtttggcagtgggaatagcagagggtgtgtgttaatgtatttaaagaaaaaaaaaaaaagaagagcaggtattatcagagtccttaaggaatttacagagcctcacaccttcgtcttttccttttctcgtgatctttctctctctaaaatcttccctttctctctcctctttatctgtgctttaaaattcttcttcttcttcttattctttttgttctttaaaaaactctttcttcttactcttcattcactgctgcctacctatagctatatatatatagttatatactatacctgaacttttcagactgtgttcccaattaaattttttcaacccaccttggtgttttgtgaagattttgtttatttatacttaaagaggagatcgttaaaccagtagttagtgggtaagaaaaacccatttcaattagagaagagtatattttctcttttcattttctgtttggggagagaaggaaaggaaaaaaaatatgagtagttgtggaagaagtggtgctgtaagacagtatataagatcgaag

SEQ ID NO: 318804 - DNA, 1269 bp, Cannabis indica
ttaattatttatttcttaagtttaaattatttataattggctttcaaaatttatgtaaacagaattgatttcaaatagaaataattcttgagggaaaatagtaattttgtataaattattattttgaatagttatgtcaattatgaattgaataattaaaatagaatttaaccatttaattttatttgataaaactatattaattatttatatacaatattatttagaaaagcttattattttagtaaaaaataataattatttaatccaagttacataagagattaatgagatctaatcaataattatttattataaacaaggcaactaagcttattatgtattatacttattgttaacgcatatttttgttaacctaatatatgaaccttttacgtaataaatatactaataaatgaacaccaaatattttaacttttgtagttaaaatctacatactcaatgcatccatcttattaggaatgataatctggatacagagtataattctctcaatcaatataatagataactttttctcttaaatttctcatcccttttaccctagattcttcccctatttataggtgtatagggtgatagttattttctttaggatctaatcattcataactactcatgaaacgtgaacattccccacgttttatttttatgtacgtgaaataatatttaataactacccaactactcttttatctttgtccttaaacggttatgctgactacgcaggttgtttctcactatgtacaagttgtccttcttttccatctttgtaagaaaaaatgctaagtatagatacaattctccttgcaatactcttttcctacgatggtattagcgaggtggttacttctacgtataaatggcgagatggatgaaagtagttattctctccatgtcacatatgtggatcaattagttgcaagctcttattccgaagtatgtggtgttggttttgtgccctaactaaaacttattttaatagaatcaaattttataattaataaaagatcagaaattgtttttatgtttcacaatatttatttcataattatatttaaggtataaattctattaagtctagaaaatatatatatatatattgttcaccattatagtgttgtcagcacagtggaatataattatgactatatgttcaaaagtttaatttccatgatttgtcagttcactggatttagactaacatgataatcggcgataaggtatacttacacctttgataagtgt

SEQ ID NO: 318805 - DNA, 581 bp, Cannabis indica
ttttattatttattaagtatacaatttcaaatttcccttcaagtattaccttcagtttcattaatgtaacaaacatttaaattaaatataataaaatattaggattatatatgatatataaaaaccatatatttctctggtatattattactgacattattttttgtagttttttttaagatacatgtatacaattaaagataaatttaatcatatatctaaactgtacataaacaaattgttaaataatgaataatattaacagacatatatatagtataatttctctaaatgaaaagatctctttaagactgtccaactaatagaatgttagctgtcttgttcatctgggagaagtctcgtggaatgatggttgccatcctgaagggagttcctggatgaccatcatgtctactccgggtatatagtcatcaggaaagctagacttccttcggaaaggagtttcagatggctagttgtccctcctagaaaatgttggttttatgccttaaataaaactctatttcaatgtaatcttttatatttatttatcaataaagaaacaaatttattttcattac

SEQ ID NO: 318806 - DNA, 1130 bp, Cannabis indica
ataaagtcaataataataaaatagtgttcatgtggtgtcgctgtacttaagatgacaaacatggttttattatttatgctaaggttaggggcaattatatttgtttattttatttgatcataatatcaaatatcaaaaacaaataaccaggaacacactcagcgagctaacaaactcaacctatatatctcaagctttataaaggtatttttttttcattcaacagcaatagtgtaatacacaacaaataagtgatatggtgcaactttttttcatatgtaattaatgcgcacatataagaaaagtagacaataacttcaaataataaatcttaaaattacatttaacctattttttggttgttccaaaggcatatacaaaaacatagatatcataaaggtaaaccacaaatcatagtcaatgatactatgcaattaaaaagaagataaagagaaacatatattaattgtcaaaaccaaacttatttaaatctactcatagtcctaaatctctaatagatacaaaagagaataagaaacttcataaaattgtaaacaacccaagtcataactgtaaggataaatttaaaaacttagaaacaatagttgaaattggtaagtcaatcgtagtaagtgtatgtttatacaaaagtcaggtatgcaagctcaaacattttaagagatgagacaattaaaaatagagcatcacagtacattattatgtaagctttaagtaaaacatggtagtaatttttgtacactgtaaattctagtaaaattgtgacaaaagaagctagaggctggataaaataaaatattttcatcattgttaccaaaaacaacatgtgtaagataccaatctatatatatctataatcctgatgttggagttggtgatgtggcactctatagcttttcaagaaactatattttctattttctcattgtttcaatatattttatttattctttcttattccttaagaggattaataagattgataagaaatgaaatggttaaaaattaatattattaatattaataatgatgtagattgataagaaaagaaacggttaagaattaataacaaatgttcattctttaattgagaaagaaaacacttttttttt

SEQ ID NO: 318807 - DNA, 1429 bp, Cannabis indica
acaacatcttgtatccaatagagtttcgatcaccataaggttcttgaagttaaagagtttgattgatggcagccattcctggagggatggactctatgtttagctcttacgagttcaactgaaagcttatagatctcattgtccttctcatcaagaagttttttgagattcttagcagtgtcctccagcttgacttttttagactctatttgctccttggcactattcagacctctaatatgcttagtcatatattccaactgcgcaaacatctcttcatatgcattttgtcttccattactgtcaacttataatgaagtagaaaacccatcatccttagatacaacagaatgataactttgagccatgaaagccactacctgtttatcctcatcagaacttttacttgcaacagaatctttttcttcgtcactatcgctctaggtggcaacaaggactttcttatttttgagagtgttgtcacactcagcctaaatgtgtctaaaaccatcacattcactatattgaattcccacgctcttattgtcacttggttgttgatcatgtccgaagttcccagtaggatttcttttgcgaacattttcctttacactaacttctttttcaagaattttgcatagttccttgttagcaaatctacagtttcatatgagaaaccaacaaacatatttgggacaaacttcttttcttctttgtgaatgtacacaagactgttgtcccctttttctttgttcacatccttctgcttttttctttcttccaccttgttaaggacatttcataattctacaaggatccaattagttcatcaagatccagttgctccacgtttctcatttctttataatggaggttactcaagacataaatatcctaggcaaaactctaagaactttacgtatcaactttgcatttgaataagtctttcccaaatcataagactcatttgatatgtcacacaatttagcatggaactcagccaccgtttcttcttcttccattgataaattctcaaacgcttttgccaaagcacaaagacaggatttctttactgcatccattccttcatttttgatttgcagtttttcccaacgctctttggccatctcacagtttgcaatgacctttaattgatttgtggacgctgcattgaatagagaatgcatgacctttgaattaaaattggccttctccatctcatctgcagtccacaaactcatacgttttggttttgtaacactattatccatcattgttgagcatgttcaaccatcttctgtggccatccaaactctttcattcactacccttaagaatgctcgcattttggttttccagtatgggtaactagaaccttctgacattgggggtcaatggaccctcttctctgaacatctccattcctgta

SEQ ID NO: 318808 - DNA, 1220 bp, Cannabis indica
tttctttttttttgaatgaaaattcgagatttaatattaaatcaaagtttcagctaccaaacatgaaagccagtcacatgaaacatcctccaatctgaaacaacaaccaggatagaatatagaggttttagcaaaaatatgagacactatattagctgatcatttaacaaaattaacaggaatattgtgcaaatcaacaattaaacttttacaatcattaatcacttggccaaaaatagagatcatttgaatagaattccgtaaagcttgtatagtcgtcaagcaatcagattcaaggaagatatgttgccaatgataatctttaatccaactgagcgcctcacgtatccccattgcctcaaccaaagctggtgaaactgacccatgaatgagctttgtgcatccttccaacaagaaacctttgtcgtccctagctacgaaaccgaaaccataacaactggaatcctcaaataaagccgcatccacattgaccttgatgctaccaacttgaggtgaactccattactccacaccatcaccaacctagaaactaggccatgatgactcaaggtccgagttttgagcaattctccattgattaaggtgccatttagcagaagcggcaatactagcaattctcatagttttttgctgccagacacgctcattcctagcattccaaatagctgtcagtaaacactttttaaccatatcaagcacatgaaaacaagatacacaagaaatagaggggcatgtcactagagcatgtacaatagactcctccccaattgggcagagtttttacgtatggcatcctcttcattttgcatggcaaaattaatgaaatagttaactccatcttcatactcttttaacaatctattctttttcatctaatctctatacatattaatctataattacctaaaataatttaatgctattacaagttaaaaattatatcaaagcaatttttaagcaagttaaattattttagtacttataaatattcaatgttattaaaaattaggtagaattttctctgtttctataatattttctaatttcataagtacctatatcaacaaataacaaacacaataaacaacacacaataaacataattaaaaattagacagagtttcctttgtttctataatattttctaattttacaagtacttatatcaacaaataaaaaacacgataaacaacacacaa

SEQ ID NO: 318809 - DNA, 2144 bp, Cannabis indica
aggatctcagtatactaacttttgagattgaccaaacccaagcaatgcattgcccgaattggacatgagccagcttaagatgcttagagcgtgagcaatgttcggtctagtgctcaccatcagatacattaaacatcctaagaccatagcatatggcacatccttcatttcctctttctcattcaaactgttcagacactattccttcgagaaaataaattaccccctaatgaaatagatgtactctttgcgtcttttatgttgaacttttgaataactttcttgatgtacccagactactttaggataatagtctgaatccttccgattccttgagacttcagtgccaagtatcttttaaactggtccaagctccttcatctcaaattctcttttgagtttgtctttaatagttttgatcacagatttatccttgcccatgatgagcatatcatccacatagagtaataagaacacgactgtagattgctccagattcttgaaatataagcaatgattgtatgcaaattgtttaaacctgatttgttgcatataagtatcaaatctttaattccattgccttggggactatttcaaaccatataaagatctattaagcttgcataccaactcaactcctttcccttccacctgaaacccaggtggttgcttcatgtagatcttttcatccaagaatctattcagaaaagcagtcttaacatcaagttgttcaacttcaaactctatttaagctaccaaagacaacatcaatcttattatcttgtactttaacacaagtgagaaaattttagtgtagtcaattccttcgacctaagtaagggtgttcataaaaactaaaaaatcaaatctgaccatcaaatcgactagaccgcaactgaattttcggttccatgtcatcaccaaatttggcggtcagtttcggttatagttttttttgacatggcggttggtttcaaattttgaaatataaaaaatagttaaaccaaaaaattgccaaaactgccataaaccgcccaaaattgcctaaaaccaccaaaaaaccgcccaaaactgccaaactaaaaaaccactaacaattcccaaaaagtgtacagttagttttatacggttataatttctaaatgatttgttacgattttcgtaaaataaaaaccgcaaacgactagtcggttataaatttgtaaaaactgaccataaccgactaatttttacccctagacctaagtgaagcccttagcaactaacctggctttgaacctcactagttcattttattgatttcatctttcatcttaagaatccatttgcactccacaatctttttgttctccagctttggtaacaacccaagtcttgttctttcagaatgaatccatctcttgtccatggcctgaagcaatttagacttgtttccacttggaattgcctcttcgtaccaccgagatcttcaattttagtttgttgtactgctagcagtgcaaatgctattaagtctgcttccgcgaatcttactagagggtaaatctctcttttggttccatcacgcaccaacttataaccttccagatttgcctatgtgaatccttttaaaacttctatttggtctttactattgttgggaaaacctattgcaattaaccacaatattttccctctttgtatgtcaaaagtgggatacttatcaaacaccacaacaagcaattattaaatatcaaccaaagcaccacaagcaatataaaatacacaaatcaagagtaaaagtgagacaccaagattttacgtggaaacccaatgcgggaaaaaccacgggaccgtagtccgctcaaatcatccactatcaccaaagtttaataatggggctacaaagttcttctctagtaaactagagactcacaacaacatcaagattaaacaatcttggatcaatacaactttactcatcatctcaaaagatggatacacaagtagaaaaagtttgggtctcaccaagtgggtattgtagaagagcaccttagagaggacaatcgccaaatcggaaccggtagatgggtagagcgtcttgcaaggattcaccacccaaaatttgagctaaaatggataagaatccaccacttgatcttcaa

SEQ ID NO: 318810 - DNA, 3866 bp, Cannabis indica
ctctcttcatcttcttacttctttcttctcatctacttaatattatttataacatttttaattaaatataatatttttatattattatattagttaaatataggtcaagaatatatatatatttaaaactataatattatataggaataaaaaagtaattaataaatgaaaagaagttttagtgtggttatagtgcctcacaaaatttgatgagatactataaacaatattatatataagataggttttagagttgggttgaaatgaatttaatgcttaaatctatacaaatttaacattatagagtttatttccattggagatgacctaaattattaattactataaataattatgttttaactacagcccctagtctgaagagtggctccagggggatcggagtgggagatatttggcttcaattttttggatggtatggctcgaagtaatttttcagatgcgtttgttgttgatattgtaaacgcaaaacttgatgctttggctgatttttgtttttgtctcatatttgagtaaaatttatatagtttatttgatggtaaatattatttcgtaaaagttaacgatcggattttttattttgttaaataataaattagattttatatttttcaaagtagtataaaatagtatcatgattttaatttgcgttaattttttttaacataaattacatgcaactaatttctagcatgaacacatagaaaaatgtaatcagtttggtcatagacacctctaggttaagttattattaagttttatttcgataaaaattaaactcaagtactattttgaaaaaatccataatttttgtaaaatacaaaatccaaaacagtttttacattttaattgagattgattgtatagtttaatttgtacaatatcattattataatgtcaatttcttctccaatgtagcactaaactcttcattattttgatgtatatattatagtgcacggcatactatagcacacacaccattttttttttaatttcttcattatttcattaatatatatttatattattatttaagtttataaaattaagaatttaatttagtaaaattttacaacgcacttcactttatgtgctgatgtacccctatttgtttcggaatcggagagacttttttagtctaattttttcatgttgtgaactatagcacacacagcacatcatacacttatatatatactagtaaacaggccgcgcttcgtgtgcggctgtttatataaattttaaattatatatgtgaaaattcattgaataataaaattgtatcaaataattttaaatttattttatgtataatcttaaaatatatatttattaaaaaaaaaatctatataaagaactcaaaaagtaaacttttttttaaaaaaaaaaaactcaaaaattttcaaatgtatattataatgaagaaacaaaaagaagaccataaacttattaaaaactatttcaaaataactgtcatcatcgtatctcacttatagtcatcattacatttaaagttaacgtcactatcttatgactcagcttgatataaatatatagatagataaatacagctaactaactaccaaaaattcgtaccgtagttgaattcataaatttttttatataaattgtttaaataatttttttgtggcaacacccaccactcttgtccactcaaaacaataataaagacattgttgactaatgtataaatacgttataagaacaatatttgtaaatgtaatctctcactaaaaaatttaaatatcaaagtaatataattgaatctacctaataaagtaggaataaaataacctttacaatgcaaagtaaaaaaaataagataaaaaaaataacaaattaacaataaaatatatgaatctacaacaataatattatcacgattatatatatatataaaagagatattatactactatataaataactatgatgataattttaaatgagatcaacatgccgtatattttagatttttttttaaaaaaaaaataaaagttattaaattatatgtataaatgtttttttaataaaaaattaaaatatttagagaattaagctaaaaaattaaaaaaagtaagagaattaagtaaagaagaaatagagttatttaaagttattttagaatgtcatgtcgtcgtctcatatctctcatttatatatacatatagattagtaaattcatatttgttagaaataaaaaaaaaaaactggaatttttctgttgttgtaaacgatttgtgattcataatagcagctgaattttctaaaaaacaaaataaaattatttaaacatattaattattcatattgtaaactaattgattaatatataaaaaaataaaagatagttgttatagatatttataactatacaagttttcaaaaaaaaaaaaacatctataactataccaaatatacaattgtaaattatttattataattattagaaacgatctcattttaccatgataacaatctatttagattgaaattacttcttctttatatcagtagatgtagaaatcaaaagagggtgagttcacttaccatgaaatcttgttgctcgaaacaattaaaggtagaatttccatccatgcctttaggtagggatgtaaacggggcggggtgggtgcagggattgctcccccacccccatacacgcttcttaaattcaccctcatactcgccccaatacctttttaaattaaagcggggcgggacagagattacccgacgggggaaggattcccatcaggtacccattacatatatagttttgagaaaaaatgatgtctcaaagagaattaaaaaaaaaaatcataaaaacttagtaaaacaataaacttaaatggaatagtgtgtataagtaaaaaaaaaagaagtatacaataaaaagccgaaagcatgaagttattttaattgtagtagttatgattttaaaacttaaatatatacatacatcatatcggggcgggttcggggcgggttcggggcaggtatctattcctccgcccccgccccgtttctgacttgggtataaatctttaaacccatacccgcccccgcccccgcccccaaaagtcaacccccatacccgtcccattaggggcaggtacccgcaggtactcgaacccgcgagtataattgacatccctacctttagggagtagagccactacttggtgcattgaatcagatcgagattgactccatggataggcctagaaaaaaaatcattattaatatataaaaagctatatatgtcacttaaaaaatctacattataaacacaaatagatatattatcaacacaaactaatggagcataaaaacatcatcaattgttaatatgatgatgtgtaaataaaagctaaaagttgattgcactgaaaataaaaatgatatagatgtgagaaaataattttccatacaaattaaagtgttatgaaattttgaaaaaaaaaataataggtagagtgagagaaagagatggacgagtgattgataaaaaataattagatttgacaaaagtgaatgataaaaaataataaagtttatgattatgaaaatttatccctactcggtgtaaatcatctatagaggatctttgatcattgggattagaacgatggttaaatgtttatagcgtatgtatatcgtggaacatatagagcgttctatatgactgagagttcatttccaagttttatggtggatgcaacaaggaattaataagttagggaatttacttagtaaatactagatctacttattggaagctcggttgtataggcccatggttcccgtactagttgaga

SEQ ID NO: 318811 - DNA, 1422 bp, Cannabis indica
acataacacataatatatcaccgctgtatttaggcgcccatacaccaatccacaaggcttaacagatgagtaagaacgttctttacatttggtactatcgaccatgatatcagccactaccagtgctatgatcgcactgcgggtccggtactatgttcataccgccatgatagcattaataatatccaaaagtataattaaccataatatcactcttaacaagtactatgctcatactaccgaccttgtactatgctcgaagtaccgctatgatagcgtcaattaatactttctagaattggatatcagtcaaacctagtactatacccgtactgctgacctgacacgatagttgtgccgttgtgatatcagttcataattttatgcaacttacatacatacatatattcatatataaatatgttcaatgctaatcttatctcattttggaattcaagtgtgttggtcgacttgaacagaaaatcatgtgctggatgaatgccctatgtcacatttacgtaaataggtaaataatacgctaaaacccgaaccaaggacctaaactcacaactataaattctgctatcgataaataacataaaaaaatttcctatttattgaggaaacaacaaactaaggctctgaaaataacacgaatcgacaaaatagatttttttgagaatcctgccactgatccggttaaccgatttacaggacatgtagaaccagttaatcggttcataccaggctccacaaatcagttcaaaactcactcaaattaaacccaatttccaccaaactttccaaaatacatgtgctaacatccgaaaatgatttccaaacaatagcagaaagagaaacaagctaaaaccaaaagtgccattaatgagtcaagtttaagttttcaaactcaaacaatctcttttcaaaccaacaacaccaacatttaacaaccaaaattaatttaaaacaaactcagaattcgacataaaatcaaacctaaatctaatagcacctaaaaccacatattgcaagccacaaccaactacaacctagagaaaataaagattaagggtttctagagcttacttttggcttgaactaccccaatccttcaaaaatcctcaaagaacagcagaaaaacaccaagatgtctcttggtttttgctagggtcgaaagagagatggggaacaagctagaacttcctaattgttcttgtcttttccttaattagataaaatccaacatcaaacaatagcataggctgaaatatattagtgccagctatcaaaataaaagctagccacctaaacctccaaaaataaatgtccaaaagacccttatgtccaatttaagcaacttataagcttaggggtaaaatgctccaaaaccataactccgcttaaacccaacattctaaa

SEQ ID NO: 318812 - DNA, 1576 bp, Cannabis indica
attttttatgttgctttgttgttgtttggatgttattttcttgttactttcatgtggtttcttaatgttttcttgtatttttataaaataccataaatatatataaaaaaaaactttaaatgtaaaaatgtaaatttttttacaaaaattggtatttcgtgtaattatcccatgtcacaagttatatccattactttataaagtaatcaattttgtcgttgtctaataagacaaccctaatccctaatccgacattcaaatataaccattgttgtctcaaaagacaatcttgatatctttccagcatccatatgtcactactgctacttaatgagataaccgacaagtaaaaaatctaacaacaattttaagttatagccgtgactttttttcacataatggtaatgatcgtgtcttataaatgataataatcgtatcttataaacaataataatcgtatcctaacgtgacatgctatgtagtacaattatacttttcttacctttaatccaaactcatgcatactggccaacctgagtggagtgacgcctgacgatcttacctctatgtcacaacaatggtaaaccgatcaacaacttaatctaacccattatagatcttaaatttataactggaagttttcctatcgataaatatcgtagtaataccctaaatattgagaaagcacaagaatcaaggttcccaagcatcacccaaaacagtagactgccatttttctggattccctttcaggaaaaacggtagaccatttagtgaaaatggcaagccattttcctgggttacctgctaggaaaaatggtaaatcattttctcagaaacggcctgtcattttctacaggaagcagaacttcgagttttccacaacaccacacccctccaaacctaatcaaatggtctcaaacttcacagggtaactccataccatcaatataacacaacccaactaacataacctaaaaccaaaacacaattcaaaacttaccattaaaactaagctttgattccaagaactcaagcttgctccacccatataaccagctacactaaaagcttggaaccctcaaaacaactctaattctgacctaggaacacatttcaattcatacttaatcacacagaaacaaatcctcaaaattccaactttgaaacaaaacttatcaaaaccaccaataccacgcactaatatcgttgtgatatttttggccaccaattaggtctctgtgtttgtcagacctaaaatattttattttataaataaaatgtatatttctcacatattctaataaaatctccgtaattaacaaattacgcttatttatttatttatagtaaaattccctaattccctcaaaaattagatttagtaagatcataattatacccattaaacctttatcaatccatgttgtgatattttgcacacgcaagtgtacgtatcattacaagtagtaaactcaccaggagtgaggtcgatcccacatggattgtagttaagtacgttgaaattaaacttttacttctatttggttaaaaaaaaattaagaaagaattaaaa

SEQ ID NO: 318813 - DNA, 3269 bp, Cannabis indica
gacaacaccaaataaaatattaagatagaattataaatgaaactatgtgattactccatctagaatggcgtgtattcaaagaatgaacactcaaacgtactggaaaatataaataacacaatggaaatatagttgttcagtcaaatcacggtctgcttagtccactgttgcaaggtttctgtcttcttcatttcatattggatcacttctttatatacaaagcaagtgtcctttgattatacagaacttgattaattatcaatccatttttacattgaatatcaacatttaaatcaatagaaacgtaaacataataaatggagaacagtttcgacccaattcactaactacaacaatgtatgcgaccttggttgtgcgagttgtctgttcatattctcacataagcttgcgggcttaagatgcgtacaagactaatcgagtcttacgtgtttaagatactacattctatttgagtcacgtatacgaatatcctgcaaaaagtcgataacttaggacatgcgagtccttatcaggttatagagtgcgttaggtcatccggaccagctccctgagtaaaaaatcgatctttacttactcatacgaaaacctttatggacatcgcatatatcttagtatatgcgagtcttgaaacccggtcttctgtcctgcatcgtgcgaggcgtaataatgaaactagactctgtcagggtcacctcatcttgttaagtctggttcgggcgaggtttatactcaattggtctccttctgacagctcagcactcctcgaggagagtaagtccacgtgtcatatttatgggagcctagtctcgagtttctaggtgaaaaatttacattataacacttattagtgtagtggtaagaatcttttcaaatttaagggagttgacaagtttaactccataccttatttcaagcgtaaggtggttgccccacttaaaattagaatcggtcgtaaactatttcgagcacaggtgtaaataattatttttgggtctttatacaaatatttttctagttaaaataataataaataaggttgcttagtgtagtggtaagaatcttttcaaacttaaaggaattcattagttgaacctgttagatttaatatatgaaaaataataaagcatatacatcgatatgaattgtaaaataatataaacatatcaagtgtatatgtgaacaatgaaagaaattgtaatatctccagtcattgatctttgagttttaatccccaatgtagcttcagaaatggaaatcgggcttctaagtccactaggaagaatacgcaaacccttcttctttgtgtaaagatcgaatccaacaattaagtctttttcgggtaattttgatacaatgactctgtgagtaacataacaacctgggaagaactgcaaccgaatcagtttgctgatgagttttgtgcaaaaaatacctccatttgcagcatgaaagtattgtttctctttcttccaatattcttttgaaagaatatcagggttcattatcgtgtatgatgctcctgtgtcaaaaaattctaccacttttatcagccctgcatattttattggaagaacttgcacagtgaggacaggggatggttgcatcatgtaaatagtagacatttgataacattttggagtgtctgaatcactccattgttcgagttcacaaagggattttgagttgaattcatcatctgtgtagaagattgactctatgtcgttttccttaatagacatcctagtcgtttgttggatatgtgatataagcttgactatttttcctttagggtactattttgcataatgcccctttttgccacacacaaaacatcaataagatttttttttatgaaagtcgagtttcgttcacaaaaattttattttacgtcccttgtgctttgagaacttgagcatcttgaacttgattttgttggggttttgtaagaacacgaagattcagaagggcatttgatgagtaaatctcatatactataaactttgcctaattttttggattgcttcataaattcctggagaaatttcttctaggagcacattttttcaagggcctttaagactagttggaaaatttctccaattgtagcatccgttaggcttttccctgatccagagagtagcctgaaagtttcttcgccaagaggctctggaatagaggaaaggaaggcttgctttagatttggatcatcaattccacctatttggtagaatcgtttagtcattcttttgtaatgcttttccaagtctcttttgtccattgaacaacacttgagcttgaaaaactctgctctaagtctttcagttacttgtgcatcttggccacaaaattcgacatagagatggcttagggcatttgcgacagatgggagttgcaggaaagtcatctgtctatattcacctaagcttgtccaccaatcttgcaaagttccagtgaatcttgagacaaaattcaagaggatcgtccccgtctgtgcctgtggtttttgtgtctccaagctaagtgaagcttggaattcttggaatctttctcgccatttagatgggggaatgtcatcaagagtaaaagtttgaaacttagaatatttactcatttgatggtgattggattctgtttctttcttcttcttcttcactttcatcctcacttttgacaataggctcggtttgagagtatgcttcttctgcagaatgagccataaaataagggggtacatcatcttcagaagtatccgagtcttaagactcatcactagtatctgaatcttgagactcgttactagtatctgaatcttaggaccaagtttcaaaattctcttcttggttagaggaagaagacctattgtcaaattcttcatctagttggtggatcatggcagaattaggattattcacagttcattgagccatgaatttctttggctctttttctgggaggatactcgtggaagagaaatatctaggctttcttttttcttaccctttttggtttttgttgttgttgatttttgtcaagcatctgtctaagtcggagaagtgtgtcttcttgcgaagagaccgagaaaggtgatgtcagagaagtctttagcatggttgagaactgccatggtactgatggtgtattttctccaaagagggttgtatttcttccaaagagcgttgattgagaccttgtagaatatgattctctttgaataaattgcttttttagagattcatactgggttttga

SEQ ID NO: 318814 - DNA, 958 bp, Cannabis indica
gtttcttttgcaggattgcactggactcctcgtcagtcaatctcatattcttccaactttcttttcttagatagaatgtctttcatgaacttcagataagttggcatttgttccaaggcctctacgaatggaatgttgatgtatagtttcttgaatatttgaaggaatttcaaaaactgcttatccagcttattcttgtgaagtatttgaggatagggaattttgatatgatgatcaatgctggtaagaggtgaaggctttttttgttgaagatcgtcagtagtcttctttttgtcttgtgttggtactagttcttgttgatcctggtcctctttaaccacttgttgctctacccttggtccctcatattctttttaacttctcaaggaaattgcttgaaactgttctttcagattaatctccgtagtaataggcaaattaccttgattttggttggccatttgagtagttaactgccccatctgagtttcaaagaccttaatggaagatttaatctctatcatgaactgaagtaacatattgtctgaagattagaccctccattagagccttgttgttgttaattctattgttgactatgttgagactgatttctctgttggtagaacccttgttgctgctgatttggaaactacccttgaaaattctatcgatgacccccttggttgtaaccatagttgttgctctgatagttcccaatggcttaagcttgcttcattggcaaattgtttagatccaccagacaagtatcataagtgtgcgatcccccacatagctcacaagtaacttgagcttgctttgcctgagcagtcaccaacttagttaaggcctccacctgggctgtcaactttgtcatggcatcgacttcatgaataccagcaacttttttagattggcttctttctgttgaccattgttggttattcatggccatctc

SEQ ID NO: 318815 - DNA, 871 bp, Cannabis indica
cactgcgtgtgtgtttttataaattttgtttataatcataaactcatagtttaagtaaagtgaattattaaaactttaaaatatttcttaaaatctttttcaaaatattactggaccggggatcccctctattttaaactcttactaaaatactattgtattcatttattacaaattattaatatatgttcaaaatactataaaagttggatcctgtcaactaagcataaaagacggcaaggtcgatatacattcgacgggagacctctaacccatggctaatctactttttcttttccttacctgcaccacaaaacactcgtgagtcacaaagactcagcaagaaaagcgagaaatgaaaatacaaagtccataaataaataagccaataatcaataacaattacatacttaaacatatattcacataaaacatcgcagcttaatacaataataataatcaattatttgtctaataaaacaagctattctcgatactttataaagtatccatcaaccctcatttccaaaaagtcagctaatttcactactgttgcctaatgaggcaatcgataagtaaaaaaacctaacaacaatttcagaatagagttataactctttcatattaacggtcactattgtatctcaacttatacatgcaaagtggtacaattgacttttctcaccttaagtccacatttaggtgtgcgggccgacctgagtggaatagtgctcgatgatctcaagacctatatcacgacaacgacaaatcgataaataacttagtcaatcctgttataagacttaaactcaaaatcgaacaaaccccttgttgggttttatgccctaaataaaactcattacaatctgat

SEQ ID NO: 318816 - DNA, 1056 bp, Cannabis indica
tggggcatcatgccaagggtttttatttttcaaacctaggtcactttttaggtcggtcccgaatggggtctgggcctctcgcacctatccctttggatcattcgacttatttatttcgagctggttcctcccctcggacagctttcttggggacgacgacaccactcttttaatgcatgcttttgctagggcagaattagattgtcagggtaggattagctttattgcttttttcttgcatgcacaatttcttgataatgttctaacgcttttatttgtctatctcttttaagtagcgaagccaatggatgaactcgtggacgccttgcccaggcctatagccccgaccccactatgcctcaggcgcaagacctgacggtgactcctgggaggtcttcctccagccatccctcggacgaagttgttttaattgatgaggatgaggaggaagctaaagaagaaggcgagatgttccctccattagactggaaaatgaaaggaaaaatggtggagtccgaggttgctaagaagccaaagagagtagacactccggctcctagttctgattcggggatcccatccacaccgtctgaggtggatgaggatactgtccctccgggcattatcttgacccccattcctgctgatgaggagagaacccaactccagattgccaagcataactatgccacgacatagtgcacaaaggggaatgccgaagtggaggccttgaaaaagatcttaagggaggcccaggatagtttcactcgcggcgagtacgccgggaacgtctaggatctaaatctggatcctttaaccaactgcttcaaccgcttcattgggcctactctagctccccttgcctcagaaccaatgagccattttgctgccggcctagtccaacttgccatgaagagatatgcagcatgtgcttccaccaacccagtctaccagatccaagacgtgaccgcaaccatgaccgcggtaagttcctatctgtaacgccctaatgctaaagcacgctacagtgctttttcaattattgtgcaatctttg

SEQ ID NO: 318817 - DNA, 1194 bp, Cannabis indica
aaataccataagttaattataattttatatttatacatatttataagtaagttattaaaagaaatcacaattttgaccgttagttctatatatattgatttatttatttatttatttatttttgaaagaagaaaacataaaagtttttgtgacttttgaaaaagaaagtaattatatatcttccataaagtaatttttttaaaagaaaaagaaaaagataaaataatactaaataattgttactaaatataaattttggtattgataaaattgcattgaaaaataataatcatattacatatgtgacaatgacaatttcatgtacaaccccccattaaaaacgcttacatattctggctatgtggctgacaaacttttattattgttttatttatttgcctaaattttattatataatatattttgtttttttttttactgagaagagaaagtttaaatttgaaaaattcaaggagaagtaagaaatcactataatacacacttattaccactattatatttttttataaaaagaaaaaggggaaagcgaaattatattatattattattaatatatttactttttgcaaatagcattattattcaattatttggcactggcatcaataaaaaatcttcgaccagcatgataactagtcgcagaacagcaagaagcggagacaccttagtcccctggccccactaaatatattttttttttcctttttttttttcttaaaaccaactgaattattcattaaggaaaagtaacttagctaatacatggggactcacctcctaaaaatttaagaaactattacagttgtgttcaaggccccatttagcaaacgtatgagcagcgattagaggtccgaggcacccaaaaggaggaaacattaaccactgaaagtaaattacaaagtttgtcaaacagaaggatagattccagtggggagattgggcagaggagattgcagacaccagcaattggtagtcggaaagcaagtcagctgccataatacccagttgctgcagcacttttgcaccccagaatgcaaccataagttccccgtggacgatggaggaatatgaaatcttagtagcaaacaatgcccggatgcacccatcatcgtttcacaccaccacactgttgggattttatgccctaaataaaatctatttcaatctaatctg

SEQ ID NO: 318818 - DNA, 1129 bp, Cannabis indica
aacaatataagaatactaaatagtacatataaaattgttatcttcctttgcgctcgctctcttgcagctctctttgagcttgtgctatggcgaaaacaagggctaagttcaggggaagattcaagtgtcaactaagaagaagaagaaaggtcctaattctacagctgatgcaaagaaaactaagtcaatggaggaaatactgagtgttgaacccatggagttcactgatgaggaagatgacatggtagctgctggaactgaagacgcagaggaaccagatccattgcgtgatttatgatttactacaagcacctttgtctccgaaatcatctatgcaggcgattttgcagcaagacatacgatcagattttgcgttctttatggaggctaacagcaaatgctctgctacaattgctaaaggtaattcgactctccctcctgttctcagatctggaactgtgttgaggaatttagaatctacttttgataaatctgagaaggataacagagtcaaaatcactatggaagatatcgaaaaggagatcaattattggaagtcgtctatagtctgttatgtcttaggagccaacccacctttatctgtatttgatgggtttgtgagacgtatctggagtggaaaatagaaaaagttggtatgttgtcttatggagttttcttgattcgttttgatacacttgagcatcgagatgaagtccttaatggaggatttattttcttcaacaagaggcctgtcatcatgaaggcttgggatccgagcgttaacttcaaaaaggaggatatcagaatagtaccaatctgggttcaattatcggatttggagctgaagtattggggtccaaaagctttgttcaaaatcattggccaagtaggtgaaccactcttggttgatgatgctactagagagagagataagctcagttatacgaggattctcatccaagttacaattcatcaagaatttccaagttaaatttactttgaagatgaacatggcaataatatacctgtggaagtttattatgaatggaaacctgtatgttgtgggaattgtaaaggaattgggcatgcctcagctgactgtcgtaagaaggaaacaatgaaacaagaa

SEQ ID NO: 318819 - DNA, 1633 bp, Cannabis indica
gggcataaaacccaacattgacaccttcccttgcatgacacttttttcatcttcattagttcattaaaggttctaagatggttcaacggatcaattggacaatcatatggtgtcatacatggctccttgaaatttggtggaagttgttcaacttgatcctcccttgagaaaagggattcttcatcaaactcatcattatccaagtttcccttcaagggggtagcaatttatgacgtaggtcttgcatctccgtttctgctccttcatccgtctgcccatcctttcttgggatttagcgagtgggatttggatcctctttgtgtggtgcacatggcttatgagagggactcctcttgttccatcattgtgtgaattcccagcatggctgaagaataatgcttttcattttctttgctcttgggaggggcgagcgggcatgacactcccagcacgcaactctttaggtgaagtcccttcataagatcataggatgtttccctcattgcgatcttactatggtgggtaagctcaagttttcttgaatgacctataggttatttatctcgcgatgagccttttcaattttcatcgtaggattgtcccacctttgctaacgctagatcacttctaaacaaaaaaaaaattatttgaatcaattggattaatgcctccattaacttctcatatcctatattccacttgggaataccatcaattttaactcatactgttatttttctaatctgtctatcctgttagatgaacgaccactgaataacatacagacacaatccatttagatcttttgatgttcccctatttagagtacaatgtttaagactaatagtaattataatattgtccataaattctaacttgagtcggttgaaggaccgatatttaggtccccttgaatcataactgacacttgggcaggacctgtacacttttcttctttaacatcaatctttcttaattgtgggaaggttctttttagatgacccactaccccacaataacaagatttggctcttcattagctcaaataacgcctttttgcatcttgaacactcagaatatgatcgccattttttattctaacatcttaggacgtcatacaacggtagtacttcgcctgaaaaacggcagaggaaagtatgaggaaatcgggagaagtctggaattttgttatgcgggtttgaaagcctgagagtcgaaatgtagtgtaagtgaaccagtcactagaggtactagtttttataggcctctgcggtgtgaggcaacatcgaatgagtgacatcgaatggtggaggttcacaacgatttaaatcctattgatccaacgactaggataaaaacgcagaatgaagagaaaagggcggttgaaacttttgagtatctttctgacatttgcattaatgaagagatctgtcaacaggaagaaagaaaatcgttgcctgctaagaaataaggaggaatgattacaagcattaaaatagtccatgtgcgtgaagtacgtgccacgtcactccctaagatcgaaagtaataaacaagtcttatttaccaagaactaaataagacttgggggtaaatgttgccctaattttctcccaatatacgtggcaatctca

SEQ ID NO: 318820 - DNA, 1302 bp, Cannabis indica
gtttgctagtgatctggtaccaatggatttcacccgaaaataaagatacgtaaggggactgaatgccacaatcagtcgagacttgaagattaccaccgattgcgacacattataaaagaaagcggttgagttagccttgattattgaagaggcaaagcaacgtgtaattaaagagcaagctgcaaaggatggagtcatggcatcgaaccctactatgggtggtaatatcagtaaggggaccgacagtggtaacccggatcacaaacagaaggttgaaacttccaaaacactgagaagtaatagaaagtttcaaggaaatagaggttgccatcaaggttgcgggtctacattcatatcatatctggagtgttctaaatgtaagacgcaccatcagggtgagtgtcgggataagacttgttttcagtgtggcatggtgggccacttcatcagagactgtccgtaggctaagaaagaagaaccaaagaagaagagcaacaaaaactcgggctgtctgttcactatgactcaggctgacactgatactagtatgttagtggtgataagtcacttatccataagcggttgttcttattctgtatcatttgatttaggagctactcactcttatgtgtcgagtagagtagaaagttttcataaactgtgtgatgtgtatgctttggggtttggtaccttgttaccctcgggagacctaattgtatctattcgatggattaggtccttatctttttggatagaaaattatgaattaaccgccaacctaattgagttacaattgtctgattttgatataatcctgggaatgcatttcttatctaagtacgaagcaacaattaactgcaagcaaaagatgctgctgtttgaacatgatagtgccaatccagcaatgtttgtggataaaatacaaggattgcgcatatcgagaataacactcttgaaagctaaggatctaatgcacaaaggttatctagggttcctagtaactacagtggatactagctaacctatgtcatctgggcctaaatatacgacattggtgtgcgaattcctagatgtatttttagaggacttacctagattaccaccttcccgagaaattgagtttgtaatagaattagttccggtaatagaacctgtatcaaaggcaccgtaccaaatggctccaacggaattgaaagagttaaaaatctaactctaggagttacttaacttgggattcataagaccgagttattctccctggggtgctccagtgttatttgtgaaaaagaaagatgggtcact

SEQ ID NO: 318821 - DNA, 1670 bp, Cannabis indica
ctaattaatttgttttttttttttttttttgaatatctgttgataaaataattttgtatgtatatattatataataaacttgttattgtatgatttacaagtatagtataatacagagaaagagaaagaaaagggaactataaattttgagtggtttatatatgtttagtatatgtagtgcatattaattacaaagttaattaaagagagagactatataatatgcaatcacaaatgtaatttcaatacaataattttatattaagttctaaatatatcatgttagttatatatcaaacacacatgcatatatataaagttatcaaattagttgtattatatgtaaacatttattatagcactttctaaacatgtgttcatgatgttgatcttgatcagcctaatttaataatactttaaaagttctaaaaaaccttaaagtggttttaacaattaggtttgcttcgtgtatatatataattacagtattactgataaagactaaaccatttttttttttcaactaaactaatacctaatcccactgtttaatccatatatagatttatatatgcatcactatactataaaaggcagaattcacgacggtcctaaaaatactttttcttaaaaactgtcgctataaaaaaattaactgagtgttgaaactcattccttataacactatagtatagacgacggtttaaaagtgcggagaaaaaaattaaaataaaaaaataaaaccactatattcccgacggttctaggcaaagtattagcacgattcataactgtcgagaataggcgttagcaaataaaacccactcgcgatatcactaataaccgaactcgacatcaaactccctctcgatctcaaacccactcgaataggggttacatttaattttttttttttcatatttttactgtgttttataagaaaacaaataaaaaaattataaaaaaatcacatgaaagtaacaggaaaacaatataaggttaatatataaattacaaaaaatcaacaaaacgacaataaattgacaagaatacaacataaaaacattaaaagatcgtattttatgtagataaaatcttaaaaaccgtacgctgtaaaaatatttaaaatttcgtgtaatcatatttttgtaatttttttattatttttatatttataaaataatcacataattatgtatgttgaaatatttggacacgcatattaattgttaggtttttaagtcaaggttcacagagatcatattatataagatctggctatattccccaaaatttggcatatagtcttcatatataatatatgtatatatttatatacaaattctttgggaatcatatggtttgaattttttttcttactttttctctttttggcttttacttgttaatgatatatatagctgtttgaaaaagctaccatatatttatatatataagcaaggtatccatagtacatgcacaagttggccttaattaactatgtctatatatatttatatataaaatatatgatcattatgccctaatcagaggaatgttgcattctttggatacccttttttcagtggttaattatcaatagaagatatatacgtatgtaattatttaaaaaaaaattaacataaattgatagatttttatttttattt

SEQ ID NO: 318822 - DNA, 652 bp, Cannabis indica
ctattttatgaacactcctaattatttgcacttgtacaagcgtgtgtttataggaaggtttctaactgagtgttttcaattattttttagtttggattttgttaattgtgatgtgtttttctttggcttaaaagagatctaaattttacagctcatgtgttagctcagtgaactttagaaacttttgctctaaatttttaagtttttggaaggtgattctccaaataattgccactattttattatttatttatatttttgaagtttttctagtaaaaaaaataatccaatccaattaaattgattaaaacagcaaatgatgttgtcaaaattaaaaccgatatgatgttgtcaaaattaaaaccgattaattccaattacaaatagtatatagtcaaaatatatatttcttttttatgttctattattgctagggtctttagtttttcttgttctttctcacacttaatagtatttttaatagagagctgtaaatatggtgtattgttattttttagaatattttgttaaaatttaactctaatggtaatgtaaaatgtatgttaaatttggcacaaaaaataacataggccaaattttagcccaaaataaatattgttataaaataatataaaataatataaagtagatg

SEQ ID NO: 318823 - DNA, 857 bp, Cannabis indica
ttgaaaaatattacattttttttaaaataagtgcccaaatttttttcttccttatggtccattaaatctcatggccggtcgggtattgataaacatttgtgagtagggttggagttctcttctcatcccttcctctccttctctcccgccaaaaaaaaaaaaggtgaagaagaagacattgtacgatttaagtgcgaatgatgcaatcaaatgatctaacagctaataatacactaaaatatcacataaaatgaaaagaaataaaaagatataatgtttatcaaatttatcaattaattattatttttttctaaaaaacacttatcaattaaatttgggattttttcatttataccaatgacaatacattacaaaaaacacagatatacatttttttttaatattttcacagatttatgtgtttttacaaaaatacgatctattattgtcaccttttttcttacaacaacattatattatgttactttcacgcttttctcattgcttttatatttctattataaattgctttcataaagttttgtataaatataattaaaaaaaatcgtgaaacggaaaaatataatctgtaaaattgtaaaaaacatatgattttatttttaagaaattacacaaaatacttaaaattggagttttttcctttttttcctttttacatttttacagattttgtttttttaaaagtttttcacttgtttttatttcagaaaatatattgttctacattgctttcccttatcaacaacgtaaaaaaatgtagattcataaaagggtaaataccattttagaccctgtgttttgtaaaagttacagattgaaccctgtgttttgttaaa

SEQ ID NO: 318824 - DNA, 532 bp, Cannabis indica
ctacttaaatctagcacataattaataatttaatattaaaagaggtataataagataatatatcttagagaatataaaaataaaaattaaaacaactaaaataaaatagatatacactctaattttcattttttagatagccatatttgacatttcattcttactatcttttgaaagagtagatagaatgttatattttgaatctatttattaccactaaataaaatttcctaatgctttcaagacatggtcatacggttgaaaaaagtgaactttaaactttatcattataaagatgaaatgtagttgagaaaatgggactttgataaatttaaactgaaatgtagttgggaaattggaaatgtctaaatatttttctatctattttctgttgttattttgagatatacaacaatttgcatcaaaataattttagaaatttatgtggtgggcctgtacacatggatatatcatttgtattatttcacaaatatacaaaaaaaaattataaaaatacggtttcacgaaattt

SEQ ID NO: 318825 - DNA, 1990 bp, Cannabis indica
gccaacatgggccatcatacaaataataacaccatcgtcaataggattcttacccaaccgattcatcggatgctcctcggccctcaacttaagaatgacaggtggcacaccaactgtctcacacacaatggagcatttcgaaattccggccctgagccatttcatttgtaccaaccgtatgtacgacttcagtattcgaggtagtggcctcaacacacgtctatgtaccttgcgcctcaagagacacagtactattcacctgaatatttggaattccttgagtattcaccgcccgatcagccctatcctagagaagaagagggccttatgtgtcaaaacaactgcgtataggaacagtagctttaatccaaggaccatacagaggaactgcattgccaatcggaggataggcaaaggcacggtccctggaacaaatactactatcatgggccagatacccacaattgaaatagattttcggtagcttccgatatttgaactgaatctattcctttcttcctctagttatactcaggtagaaccctgccaggagccgttgatcaatcagaatatccaccttgagcttcagaaagctccgtctagctatggtccagttatcgactccatccgtctctaaaaactcacccaccttagcccttatcacactagagttctgaaaagtcagatagggaataggaagcccatgaatttctaccaaaaacaccgctttattcatcagaatacaatgtcaggcaccgtcgagaggccactccctaatattcagaagttgtcctgcgatgatccaagggcgacgcttgagaacctcttccttatcctccaacaggtcaaagaagaaaccccatgtacccctctgctcttcattctccatttacccttcaaagaccaaaccccggtgagaatctgtttgactcttcctttagctaaaggacgggatccaaatatcttagcaagaacccctgtttttgcaacctcgatattaatctcaaaatcagcttcaagctccaaagatgcctcttcgataaactgcaaaggtaactcttcaatattaccttcgccgacctggtcaaagactccattttccatactagcaccactcatgttatcacccatcgaaagacaaaaacaacacacacaaaaataggaaagagatacgaaatctcacagtcgtgaacccaacatctcactcatgggagagaaagttttctctctatttagtttacttgtaaaattttagtccaaacgaccatcaccactgccacaacgactgattatttactcgctaattcacttttaatttctttttggttaaataaaatttttgaatttttgtaataacgataataaaattccataaataaaataaaatactagcaagacaattgacattaaagatagcaataaaaacactagtatgttttgttttttacttttatatatatagtcggttggttatggatagtcttgtcttcaaatttgtttctttgtattttgatttgttatttaattagattaatgtattacttgtttaattttagttaagttttgatgttaatttaaaaaaagtttttttcattattctaattttaatttattatgatacccaagattatgttgtatcatggttttattgatttaattttgtgtaagttgtgacttattttgtactaatttttggtagtatatttatgtacctaatgtggcttgtttgataatttatatggtggttcattttaggtttatcttaaaaatgatttgatggtaccagtgacaaatgattcgctccacatatatgaagataaattttttctttataaaataatattttagaatatttttcaacatatagataacaattctcattttaatttaatattatcattaagttgtgtattaattaaattttatatatttatcttatataggtgtatttttatttcactcacttaatcatgctaagatacaagaactt

SEQ ID NO: 318826 - DNA, 2892 bp, Cannabis indica
aaaactttgacctctttaccagcgcagtatgcgaaatgtgctgggcaaaagttacttttactagtgcagtagcaaactgtgccggtaaaagtgacatttcttgtagtgtcaatattattagtgtgtctagctattaatgaagcagttgtttaagcttcacaagcctaaataatctgattaatataatattaaagcaaagaatatgatagtttgaaaatttgtaacttctatttggttgtttaagaatatttagtgattaattacattattttgttgaacaaataaatacgtttgataatcatgtggtgttatcgatacaataacacgaattaactactagattttttttaaataattagtatttttttttatataatcaacatataaccatcactacataaaaatcctacttttagtgacaaccttttagttaatacaatttttttgtgactaaatttgacttttagtcacaacaaaaaattacctgtgactaaaacatactatttagatacaagttgtcactaatttaattttagtcacaacaaatattgtgactaaaaacacatttagtcacaataaattgtgatttttgtgactaatcatttaactacatactttttaatcacaccataaaaataataatttataattagtcataacttttttacttataagtcacaaattttattttgactaaaagtaaaacaaaatttgtaacgtgtgtttactttaatggtatattttgttgtaatcgtatcaacacaaacacgacaccataacaaaaattattatatacatatcaagggatgagactctcttctttcttttttattttttattcatgtatagaaagaatatgttttgttcatgcataatgcttataataatattataccataacattagttacgtacatgcccctaacacagtgtgttgctcaattaatattgggtccattaattatattataagagttgttgaatatatgagaacgatcataatgaggccaactactcttatcttaattattcactcactctctctaagtctcaacaatcttcactacttttctcagttcatcaagattcaaaatggcagatctagcttacaccatagctggaaatgtcttggacaaactgggttctcttgcttatcaagaggttagcttggcatggggcatgaaagatgacctcaacaagcttaagctaatcacattggccctccaagaagtgctcccagatgccgaaactaagcaagaagagaggccaacgctcaaaacttgggtcgtcgagcttaaagacaccttccatgatgcagtggatgtattggatgaatttgagtgtgaattactgaggcgaaaagttgtcaagcaatatgcatcttttggtagaaaggtacaccgtttcttttcgcattcgaatccaattgtttactgttttagtgttgctcatcgtgttcgagagataagggagaggttagatgagattgataagaatatggagaagtttcaattgatcaaaattgcaccgaatgtggatcaaagtgttagagaaactcactcctttgttaatcttttagatgttattggtagagactgtgaaaaaggcgagattctagatatggtattaaaggatcaagctcaagaaagtgataatcaaatccttgttatatctataattgggattgggggtttaggaaaaactacacttatcaaatcagtatacaatgatgataaaattggtgaaaagtttgatttgaagatttgggtttgtgtgtctttggatttcaatgtgtctaaaatagtaaaagatattcttacagatacaactggcaattgtaatttgtctaatttaaaccagttgcaaaagtccttaacaaacaccttgaaagataaaacatttttacttgttttggagatgtatggaatgaggatttttctaagtggcgggatttggcagagttgttatcagtgggttctaagaagagcaaaattattgtgacaacacgtaatcgcgaagttgcttcgatcatgggtgaaacgaaaccttatgaattgaaggggctacctgagaaggaatctttgtctttgtttttcaagtgtgcatttggaagtgaagcagcagtaactgagtatccacagctcaaacaaattggtgaagaaattgtgaaaaaatgtggaggggttcctttggcattgaagaccttggggagtcggcttcgacagacaactgaagctcataagtggaaaactgtgagagataacaaaatttgggagctagaacgaaaccaaggtcacattttacctgcattgcgattaagttacaacgcaatgtctccgtccttaaaacaatgttttgcttattgttcaacttttgaagaagatagtttgatgtggaaatttgatttgattagaatttggatggctctcagaatccttccttcacctaagaacaaagaggagttggaagaaatcggcgagtcatgctgcgtagagttgtgtaaccgatctttctttcaagctgatcacggtgaagattattttggactcaaccaagactttagagtgcatgatttaattcacaatctcgcatgctcaatcacccaaaatgagtgctcaattgtaaattccaatgatgacagaatgatttctgatactgtaagatatttaagaattgttatcaatgagatcaacttaacaaagttgagcaagctaaagaaactaaagagtattcatgttaacagtgccaaagatgagaaagatgaagttgtgcagttattcctttctacctgcatttcaacattcaaacacttgcgagtgtttgatttgtcaaaattatccattgaggtgttgccaagttcaattggcaccatgaagcagttgagatatctcaa

SEQ ID NO: 318827 - DNA, 1905 bp, Cannabis indica
aaggggcaagacacatcctcaatcagcattcttctagccaaagctaacccgatcggtaaggcgttcgagagaatactccactaaagaatcttatgacgttctaggatacaagaattccaaagcttgttccaaagagcgggagccaccgtggtaggtggcgctcatgtcaaggcctgagcgagataggcagattttgtagagaaacgaccagttggttctttggtccaaatctatttattgttgccttggccccctcgcctaccccctttaaggatattgttggttgtctcttggtcaaacagaaagttgagtttgaaaacattccaattcccattatcagtaaggaagtcagcaactttctcccaaccctcgggtcatctatttttaggatagggaaaaaaattatgaatcacccacggatcatcccagatatcagtatcttttccatctaaaatgagcttgcatgctcctttctttataatttctttggacttcaaaatattcttccagaaccacgagttagattccttatacgaacacttcaagaagggtctatttttaaggtacttatcactcaaaatcctgcaacacaacaaattatccttggtaagaagggcccaaccccatttagccaaaaaaagctagattcatttctgaggtcctgcggaacccaagaccgcctctagacttagggaggcacaacctattccaggccttaagatagattcctcagttgccattttcatgacccccaccaaaaatctctaaccattccatctattttagttgaaagtttcttagacaacttcatcgtttgcatggtatacacaggtaaggaaagacctaccgatttaatcaaagtagcacgatcgactttagctaacgattttaacttccacccatgcaactttgagaccaagttatccattatgaaattaaagtctgcatccttcctatggaataacgggagtcctaggtagtcgatgtttcctactaccaagttgagccccaaagcttgtttaatactatgtttcgtcccatcattggtatttttaccgaaaaagatagatgtttttactttagtaatatgttgacccaatcaatcatagaatttctccaggcattgccaaaaactcgtggtttcttttatcgtggccctacccaccgaaataaaatcattggcaaagaacagatgggaaatttgagggccatttcggctcaacttgatccccttaatgctacctttgtctagggcattctctaagagtcgcgagagagtatcagtaacccaaataaaaaggtacgggaaaaggggatccccttgcctaatcctgcactccagattaagtctactcaccttaccactattaagacgaatattgaatgttgtcatagaaatgcactgacggacccatccatagaacttatctgaagccttaaagctgcgaagcacgtgatctataaattatcagcttaacttatcatacgctttaactatatacataaatacataatgtatatataaatatatagtatatattatcttattagatcaaaaggcattaattaaataatgagcataccctttgttattgagcattgattctccagagccatttagaatcaccaacaaaagctgtccaaaaaccaaacacgtgaaagtataaagcaagagaggatggatacccatacatcaaaccactttaggaccttatgcctcgttatacccgaaaaacacattatatgccgtggaatgtgaagaattgtgtttttgcatataccaatttattttttagaaaaacgataaataaataacagattgaaattttgttattacagaacacagacttgctgtaacagaatagaaatagaaataaattgtgcagaatttaaaacttgacacaa

SEQ ID NO: 318828 - DNA, 3002 bp, Cannabis indica
gttttgaaattctgtcatcatcatttcccattgatgagaactgtgtgagctagtgctgtaacaacataacacaaataacataagaaaaacatgaaaagtcattccaaaagaaagaaagtagaaaaaaaaaagtaaagccatgaaaacggttacctgatgttgtatgtaacctgagattgaggttgaggaattaataaatagagaggaagggatgtttcctttccaataaattaatatataaaattatttagttgatacagccagcaataaatatttagtactttttttttacttaacgtaatcaaataagtattaatattaatgctgctgctccatccaagaaacaagaaatgtgaagaaaaagaagagacaagaccaaacaaaaagtaaataactctcatttaacccatatttatagcaagtagatacaaaccttatataagttaatcaaaagattaactctataataatataaaatgtctaaaataccctcctccttaaacccgtataaaaagagaattgttaaaaggcactactggtgcctaacacccttttcggtgtcatactgctattggtgtaattaagtatcgagtcctattaacttaaaaaaataacttttagggaatatcgataatcaattgtaagacgtcacctagtagtgcccaataacaatcctcgtataaaaaagcaagtagagttgtctgtgggaggccatgagtttttagaatttgctcctcagagagaagtagaacatgtgcttatatatatcagcttgcagcaatcatggactcactatggcgagatgacagtccgtgaaacataggagttggcgcaagatatgaatacattactcaagagacctgagagaaatgatcactgacaatacaagtttgatcactgacaattatgatcatgtttacatgaacatgtttcactgacaattccgctggtatataacacttgcataaagaactttactgaatttttacatgaacgtgttttaattataatcaacaaaacagatataaaacttagtaatcaaaacttggctggcactgattttcttgaaatgaattcctctgaaatgattgaggaatcgattcaaagggttcaagtgatcaagatgctaaaagattccactgagtcaggctcatcacaatcatcaattgcatgcatagttaatcttttacatcagaatgatctttatttcaattggaagatcattctgataagcaactgagacataagttcacttttacagatctcaacaaaaaaacaatcagagaaatgagataagaaacatcactgctagaacaattacagactatgccatatgttgtgtcttctttataatactaaaaatgaaaaaagcaaagttaaaataatgtagccatacaatatttcaaattcaaagcaattctttcatttaggaaaaatgagaaaagccaatcatatattctaataaactttatatatcaagtttgtagattatttataagaattgcaacaatatgtataaaaataaattgagcaatatcaactaattcacaaaaaaaaaaaagtaacgaggaaaaaacctcatacacaatcaaaaagtcattgttactcataatcaacaattacattattgtaatgcaaactaaaatatcagcttcccgttaataaataatgtttctaaagaaggtgaaatccacaacaatgaatccttccaatctgataatttttcaggatcatattcaccaataactaatttgagatgcttccaattaatcaagggagaaggacatatgttcttcaacttttctgacaatacgagagcctacatacaaacatataaacatatcggctaatatacaatatgtagactaataatactaacttgaaataaggtcacagaaacaaataaagcataataccttatcgttgtgaaaaagtaggcttacaacattccaagagcaattgaaatttgagaaaaatttcattagattggtaaatcttgtgtcacagtcaagccaaggttccttgtatagatcgaatgttccattcaacaaattagatgactctagagatatgctaaaacagatatcacctctatatacaaaaggatgtaaaatttggagctgattcaattgtaatagtgttgatcatttcatctggatcgtactccttaacaatgagacttttcaagtgttgattcgagattttaagatgctttgaactatattcataaaaactatagaaactcaaagtcaagtgctcaagaagaggaaaattagagataaaaacttgtaatgatgactgactatcttccgtacattcagctaatgagagatttctaactttcttgcaagaagagagatctattttgttgaaaataacatcctttagtatcaaagactcaagatttatggcttcaacttgaagatatgattcatgatacatgtttaaataatcaactttcaagaacttgaggcttgaactttgcaatcggaagtgatcatcgaattcagcatcacgtaacagcaacttttcaagagaagggcaacccaacaaaaacttaaatgccccatcatcctctgtagtatctaaaatatgaacatcgtgcaacgatagagtttttagagatggaaagctaaatgaacaagaagtatccaactctatgttacacaactctaaaatagtcaaacatcttgcattttccaaaaatatttgtggtaagctgtagtacagcattggatccagattcgccgaaagctttaattcctttacctttttcccaacaacataagctaaccatttatctatgaggtaaaacttactttctttgacattctccattcatatgaagcacaaaactagttatgtctgaatcgaccataaattccgcacctttcttgcggtgttccacatatttatcgacataattgtacaagatcatccctatttttatcattggagaaaaagatagtggggactgcataccagatgagtttccaacgctt

SEQ ID NO: 318829 - DNA, 1297 bp, Cannabis indica
aattgctttaaagattgtattcaattcctaattgtgaactggagattgtaatacgaatcttttggatttagtggatgttattaccctggttcggggaacccaagcactagtcggctaagatttgttctcagtgcagacgaagcttgtaagtcattgtgttctttactgctttctcttcaatccgattcttgaatgcttaagttgaaattaatcaatctaatctttaactactcagtaacttgaatcatggaatttgaataaattcttctatcaaagttttttttcctcacgacatgatggtggaaaatggatttgagtactaaaatagtaataccatatttttcgcgttgagattttattttattttttataaaataattattaaactattattagagacgacatgtggcctctaaaaatagaaaatattaccccttaaattatttaaatttctttcaaaaaaaaaaaaaaaaaagagggagcattattattagccgtgaaagatgattgttgcgactaatgacgggttactagggacgaaaaaagttgcttttaatattgtcgcccataataatggttttttttaataatatatattagaccattagtatcgagtctcacatgttttaatttattaattattataaaatatttttaataagaaacaataccatatattagtattggacatgaaattagtacctaataataatattctttctgatatagtaattaccctagagcctgagttgtgtgtggaatctttaattatcaccgtaacaataaatatattttaataattaatatcaatgtaatgttgagtggtcctatatatatgctctactcttttttaatatgtttatgcatgtatagtactttcttaattaaaataaagaaagaaagaactgtcatatgttatatgcatctcccctcataaattttgatcaaattcaaagaaatttacaatatcattttgctagagcctctaataatcattcagaaaaatcattattttctttttataatttctaagatctcattagttatattaagttttgaacaatcaaaaacaaaattgatgattaataacaaaggatgatttttaacattttctttttacacagcatatttataattttgtgtgaaagagaaatattaaagaattatgatttatgatataagtggtgtgtattttgaaagagttggatcgttaacatagaattacaaaaaaatggttttttttaataactttttagttataatatattttttttataactaaatgtaattttagtca

SEQ ID NO: 318830 - DNA, 1245 bp, Cannabis indica
aaaaaactagcataaaatttaatatacgtgtctctcgcacttaatttttactagttaaatatatagatatgtaaacgttaactaaaaacaataaaaaaaaaattaatttcctatttgtgtgtatttaagaaaaaaaaaatagctaagggcttttacacataagttgcctctctctctgtgtaaacgattctctcttctcttttggccggaggaaagtcagagtctgtttcttccgtagttccgggtggggttctctctttcacttcttaggtcatctcttcacctcacttctttttaatatgttttgttgacaatcattcatatatatttaatgataatgatattcttttatgagtgatgatgaaattatgttacaataatgatattgcaattatattctttggttgattagttaaatatgaaggattctattgatgttgatatagttgtgatctaatacccctaaaaaatttgattataacacaaacaccaaacacacacttcactctgttgataatctaatgacaacaagatccccaaattccaattttatgattgggggaatgtgtttgttgattagagagattaatttgtttgcccaaatataagcccactcgaaaaagttcaataccataaatcaggcttaggtttcattttacaaaccagccgtttgtaatctaatcctttcaatttgaagcatcaatccatctataccaatttccactcaacacaccgtaccatctcttagtttcagtctgtgagtgagtaattccattaacactgtttttttgttttgtttgaatctttcaatctctatatacagattacatagttagttgtataatattaatgtttgtgctctaatttaacattgtgtgaacccatccttaatttaacatattaattcattctttaatatgtaatataccaattactgagattatgtgtatttgacaatctgtagttctttactatacaaagtactgttttttttttcatatcaggaggattataaatttaatttagagtaagattaataattatattgttaattattttctctagagtgggtatggaggagggtagtattgaaaagggaatagtaaagttaaatattaatgaaggctcaacattgaggtaatatccacctcttgataacacaagagtttcatttctcaggaaagctcacccgacaggaagaacaaccaattcttgctgaatcaggctctcttgatcggtcttctc

SEQ ID NO: 318831 - DNA, 2451 bp, Cannabis indica
cttttttggcactgacagcaacttcagcgactttcttggcttcgatagctacttcggcaacttttttagcgccgacagtaaactccgacgccttttttggcaccagtgacaacaccggcgatcactgtagtttcatttgtcattgttgcaaggtacaaccatcaaggtacttagcacgtgaggcccacatgcctgccaacacccaaacatgtatctaaagtccccatccgtacagatgtttgtacagtgacttaggaggaaatattatcctaaagtttgcacaattgacgtggctcttacatgtgtcatgatttagccatctttttgacctggcaaaggatctctgggtagaaatatgcctgaaagatccatatatggagggactgctataagttggcaatgatgtcccctgcagcatcttgtcggatgcttaacctaccggcaaaataaaatgggaccatcttttaagagtgattgtacaagccaattcataaagaagacaagagctaagggatctgtcagatgacagacatgccatctagtgctagggacaccgggcagagatatgtgatcttttatttcgtcttcaacaagcttccacaaaaatttgcaattgaactctataaactcagatttaacaaatatatccgaaaataaaggagctttaccagatcgtaactacaccctaaaaaatagggatacttattattctgtttactccttttacaaagccatatgtaaaaactttctccttataaatagtgaaggtactcacaaggggaggggatcaaaaaaatgagagctatacttatacttacgcatctaaaagcactttattaagagatatcagtaaacactctgagagctgtagctaaaaatcaccttgtcttccttggtgatctgcccgatattatctcacaaataatataactaaaggggagtaggtcattactcgtatacaagaggaccgaacctctataaattatatgtttttttatttaattattattctaacctcattacaagtgattaatcaatatttattagactctgagtcagttggttgtttttccagtcaacatgtatcaaaaagaacactttattaaaaaactctaagacttgacgattctaaaagttatttctgtgagagttctcttagtgcttagagataggaaaaataagcttttggactgaggtattataccttgttcaaattatgctgatccccactaatctacactcctgagtgagaatacttcacatctctttcatcttcttatatatataatatatatttgtgttatattacatatgttataatctctcttcttctacctttatatatgtaatataatacctatttaattaattagaattgctaaaaagcgtacttagcactctcttcgatgtcatatcgctattggtatattaagtatcaggtctcatataacttacaaaaataaatttcagagaatatcgctaactaatcgtagaacgccaccaataaaaggtgatgggcaccactgatgcccaataacaattctcttaattaatcttttagcccttatactatgagaattgctaaagtacactattggtgccgagcaccctgctactggtgtaattaagtatgaggtctcatataacttaacttaagaaaatacgttttaggaaatatcactaaccaattatggagtgccacctatagaagatgttgggcactgttgtggtattttcaacacacaagtatacgtatcgttaacaagtagtagactcaaaagccttctaggtcatttcttttctttgattttcgaactccctaagtgcttgttttaagatatataagtccacctctttttatagccaaaaaagaaagataaaaggatatgaaaaatatcattttttgaattttcaagggggtagaccgcgacactcaattcttatgccgcggcccgtgtgtacgaatgaataagacatttcccaagttttttgaaaacacaggacgaaacactagattttagtgccgaggcataacaaccctaaatttgggcagtgggctctttacgagtttctgcctcaacactaagatctagtgtcaaggcacaaccacgccttagtccaattcgacattctttgctaatttttagccttttaatgccctggcatgtgtttttagtgtttaggcgctcctccaaattttataatttcttcgtctcaagagcactaattgcaccgaaacttttggatttttttctcgaattaatttctaggtgctcttgccctgcgagttgatttatttgacattattctcaattttttttttcaatatttatccattttcttctatttcaaacctgcaaaataacaactaccaaaagcgtaacattacacaaaataaggtaaaacttatttaaaaatacaccaaaattaacctaaaaatagtactaataa

SEQ ID NO: 318832 - DNA, 1054 bp, Cannabis indica
ggaactcgattccaataaaaaatgagaaagatatggtgatttaaaattttgggtgcatacggtgtcgagggtagagcaccgcacgcaccagtcactcagagaagttgacttgcgcgtgcgtgccttggacaaccattgtttgaagcctcggtcagctgggcaacttcggacacgagacgcgtgcacagatgctgcaatcgccgagaaaatttggcccaagaccctacaattcaccccgtgcgcacgtgtagagggttggatgcaaccttcttgggaagctatgggtgattttcactcaaaatctgatttttgtgatattttttcaccaatttcgaattttttattttcaaaatcctaaatatctatataaaatattatttttaatatttaaacctaaatatcaaaattttaaaattaataatgtataatattttaatagattattatcaataatttttttgatattttgaagtttaaatttaaaatttagttattttatattttaaattatggttagattttaaaaaacttgttaatttcttaaacttgctgattatttaataacaatattagatattttaagattagttatattttaaattcaaagatagcattatccttttaatttgaaatattataataaaattatcttatttgatattttaaataattataatttgaaattaagatggacatttttatagattttctaaccataacttttttaaattcataaatagttattttgtgatatattttattattatgaattataagttaaaaaataatatttatgccaatattatatcattttaattattagaaatttataaataatatttaaaatatttaaataacttagatatttttgtaaaaatttaaaaaagacttaatatgagatattttgacatataatttggaaaattatcatttatttattattttattcttaaaataataattttctaaccatatctattttaaaacttgtttgtttgtgttatcccaaattttgcactctgacgtggcatcacgagaatggtgacactgttgg

SEQ ID NO: 318833 - DNA, 901 bp, Cannabis indica
tttagggcacaaaacccaacatcccattcatgcgcgcacagatgggagaagctcccacatcttgcttaaacaaaaatactctagacaagcatgtttgagttttctcggacaacatgctgtctgaaacgagcaatgcaccccaaatgagacttccaacagccacttccctcagttgttccccctttaaacgcgcacagacaatatgcaatgcatactatccgattttcaacatttttcaattttcaaattttctcattattttcatggaataaaatttcgaattttcagtagatatttgtgtagatttttatttttaaattttaaaactatttatcaaattaaaattagttattattcatttaattaattttagattttagaagacttcgaatttgaaaattgatattttccacaaatttgcttttatgtttattttttaaacttcataatttattattttattttaattataaggtaagatattttatattttattatatgaaatggacttatttgacaataacatatgaatataatttgaaaaatattctaaatatttttgaaatcttgccatatatctatcaatttttatttttttttatatatttttattaaattaaataatgagattagaaaaatggtaaatatttaccattttatcttgttagatatttattttattaaatattttattaaaaaaataacataaattttgaatagttagttgaattattttttaaaaagacatttagggttgttatgaccctaattagtcaaatttaagagtatcaattattttaatataaaattgaaattaaatcttatacacactatttcctaacttcttacatgtttgtttatttattttaatttttttttaataaacctattatttatttga

SEQ ID NO: 318834 - DNA, 2355 bp, Cannabis indica
aattaaattaatttcatcattttacccttctcgggtgataattactaaaatgcccctagctcaccaacggggtcttaacataataaaattcatataatttcacatatattgaactatataataatataattcctcaattatacataattatctagttagggttttgctaatccatttcttaattccagggtattacaaaggaactggaaggcatatctcgagtattaagagccaggtgattggcagttttgacattaaaggtacaagaaggatcctggcccaaaatcatatcattagagccactattcttgagattttcacattaagtatattcgcaaatatggaatcatcaaaatattggtggagcttagtaagatcccaggcaccagaaggggagataaagaaagatagatttgaaataggaggggagagaagaatatgatttgtaacgaaagcctggtagccaatgatcctcaatagtgtttatattcataccatcacccaccttcttaattagcccttgtttaattaagttacgggcccaaagaatactatgtcaggagtaagaagggttatggccaggagtagcttgaagaatagaagaggtagggaaatatcgagctttaagggttaagctgagcaaggaatcaggacatttaaggattctccaagcttgtttagcaagcatggcctgattaaagtgacttaaagacctaaaacctaaacctcccagcaacttagattgacaaatagttccccaatttttcgaatggattttgcgagtttcacttgaggatccccaccaaaatttagaaacaagggattcaatatccttgaaaagttttatgggaaaacgaaagcaagacattgcataggaggggatagcttgaaagacaaccttgataagagtttctttgcctactttagagatccgttttttatgccaagaatgaatgatagtggaaattctgtctttaaggaaagtaaaagcaggatatttcgcacgaaaaagacattgggtaagccaagatacttagtgataaaaggcctattttctaagtgaaatgtgtaaaagaaaagatcacgaatctcagagtgtgttttgggtgagaataatattgacgactttgcaaaattgaccacctgtccagatgctctagaatagatagtaagcgcatgatataaagcatcacaagaagatcgatcagcagaacagaacaagatgctatcatttgcaaacaagagatttaatatgggaggggtactccaagataaatatgtgtccttgcatgataggaacatacgagaaaattaacaattgagaccgggtctagtcacataagttgtttgaaaacgttgtgctccaataaaaaaaatgaaaccaacaatttcaactccatattaaaaatatacaaggacaaaaataataattacaaaatattacaacccaataacaaaatacaataatattcataaaagagaaatttacggcgaaacccccttatgttttaatttttatacacttaactctcttatttgtttgtggcaaaacccccttatgtttattttactttgcaaatttgacacaccagttaaatattactgttaaatatcaactgaatgaccactgtataaacctgtatatatgttaacagtaaaatctcaaagtagatacagtagtaatctagttaatatttaacggtaatatctaactgaaacctcaaatttacaaaagaaaaataaacttaatggagtttttccacaaaaagaaagataagtaggttaagtgcataaaaattaaaatataagagagttttactgcaaatttatcttcataaaatacacaatccaatataagtaaattcaatccatactatctaattcgtataatgaggatattcgcacttatgcaaattggattggattaaaaaatataaaattttcacttgtgtgaattaaatattgattaatatgtaaacataatggatatttatatctatttttaaaacattatatataagaaataataatttaaaatctatccacataatacaaatatatatcaaaacatagtaaattaaatgtatattacattcttatttataagaaaaatataatctaaaaaaaattaaatatgtctttatgcatacaatttattttcttcttcctttaaatttgttattttttgttttatttagtttaatttattgttagaggtataagacaagtaatttatttattttgctgttagtgttaagctatttttagcttacattttgggtcactttttatagttatttttcttctttattattcttttgggaatataattatgcttgttttctttggtttcag

SEQ ID NO: 318835 - DNA, 3832 bp, Cannabis indica
aaaaatattccgacatgtgtttttgggcgtggaggttgactaagagattgtaacaggaggttgacggtagcactcctcatttaggcaaccaccttacacatgtaaaataagtttcacgagaaggattaagcaatcaacttatatatatatatgaaatagattttaaaattacagatctaactaggctcatcatattcaaatgcaatatcatttataaaaccttgattcctacaaagtaatgagagcattaatagttacatgaaaaactaacttgcactattacaagtggatgtggtgacataatagttgatcaataatattttaatcttgaagatttgagaaattagtcggagaaattagaatcaatattttagtccacaaggtcatatttttgctaagatatattaatttttttttttctctttagagttttataagttaccctttgttgtttttgttacattttgtcaaattttaatatgcttctttacttatgttttgttttgcctatttcttttctaaaaattatatacaatgtagataaatatgtacatattaatatactatgtagttagatcaatatacatatcattttgtttagtttagtgaaagcatcaaagagtgtaggtagcatctctttttattattttttttcattctatttttattaatttgtgagtacatcactgttggtcccaaaaatagacagaagaagaagtagtttatttatattaattttattaataaaaaaaatcatgtacatgaattttataaaagtgaaaattgttggcattcttcttatttttattaattaatgtaaaaatctatttatctgtatatatatattctatatgtatatgtataccttataaatatacaaagaaagaaaattatttaggatgtgaatttatattctgtttacattttaatttatttttattattatgtgagagttttatatttttatcaaaaaataaaacccatgagaaaaaatattattaattatccattaatggatcaacgaaatctttttatttttatcactctcagcaccatttattattactattattattattattactattattcttattattattgttgttgttgttgttgttgttgttgttgttgttgttgttgttgttgttgttgtagtagtagtagtatagttcctcaaaataaaaagatctctaaaagttgttctagttatgaaaagttagatgtctttcggaagggcatcccaaaagtctaacttgaccatccagaagggcgttcctaaatgtctatcgtgtccacctggaaggagtcttcaagaaagctagtcttcctccaaaaaggagttttggatggctagctattcctcctccatgagagttctggatagtcaactctagttattgcctttcctatccgagaagtggaccttaaatactaccaacacttatcatttcagaaagaatgaggtcagacgagttttcagaggtaattttgagagagaaagatatagaggtagagtgagaggtacagagaaaagagagagatttggtttaagtattgtatgaagaatcttcggtagatgaagaagattcttgagtaagagtgtgagagataaacaatgtgagagaatccaacaaagaatcaatctcgactgtagttgtaccctattcttgctcaatcaataaagaagatttggtgggattctagagttggagtagaaccatagatcacactaatctataggacttgaatcagtatatatcttggtgttattttttattgtcttgttactttaatcgtttttggttttaatactctattcatccctatttttatcttcatttactgtttatggataattaatcctgtcatagctaattgtttcttgattaaatttcatttgatttgattttgcactttagttgtaattttccaacaaattagagcttggtattcgatcaagaacgtagaatcaagattctttccgctgcaattctttgaagaaagaagtaaagttgtcaatggtgagattcaaattgaaaaagttcgatggaaaagggaactttgcgctatagagagaaagtttaaaaggaatcttagtgcaccaaaaagtctccaaatttcttcaagatgagaaattattggatgaaaagaaactagacgacaaagcagagatggaggagatggcttattacacgatcataaatctatctacgagtgcgagaagaaagattgttgcacaaaagacggctaaaggaatttggaacaagcttgaaaaactctatatgaagcaatcaattgctagcaagattaatttgctagaaaggttatatgattttagaatgatttcttctctctctctctctttagatgataatattggctggtttaatgagattattgtagaattggctaatataatcattatgttgatgaagaaagaaagaccatcattttgttaagatcactttcaatcatgtatcaagaagtcaaagctgccatcaaatatggtagagatgtgattgcattggaggatgttcttatcgcacttaaatcaaaggattttgaattacaattgaaaacagaatccaagaaagaagaattttatttcgtaggagggagatcacccaagaaagtaagttcaaagagtaaacaccatcactctcaatcaagatcaaagtttagggagaaggaaactggaaagtgttacttttgtggaaggtccacacacttgcaatgattttacaagaagtacaaggagcaataaggtttcatcaaatctcacaatggagataggaagcgaaatcggcatcatcaccaccaaaagatttagctgcagtcacggaagatagtgacgattgctcaacggatggagaattgttatccatattggaatctttaataaatagggagtggattcttggctttagatgcacgtatgacatgtgtatgagtcaagaatcattttttttattattataaatcaattgatgaggtaaagttctaataggaaattatcttcatgcagggtcattggaactacaaaggttaccatcaaaagtatgatggtggaaccaaggtgctgacgagcataaggcacattccagagttaagatgaaatctcataaccctgggtgtgcttgaatatgaagattatggaaacaagtccatgcacggaagcttaaggatcaccaaaactttgttgataatgatgatagttaagaagatcaattgtttatttgttctccaaggagaaactattccagtcggtgaagcgagtttagtgaaagggctacaattagatatgcagctgtggcatcacaaacatggacatatcagtgaagaaggcctcaaagaacagcacacacaaggtataaatgaaaatttaaatttttgtgccttaacattttatgcagcttgtgttttagggaaataacattagttgaaattcactccagtaaggcatagaactaagaagatacttgaatatgtgtatgttgatctttgggggccatacaaagtgcctactcattacgataagcaatattttctttctatagatgcttatagtagtcgtgtttggacctatttggtgacaactaaggatgagtgtctggaacagtttaaaattcttaaaacttaggtggaaaacaaaatagatcataaagtgaagaaccttagagcgaataatggattggagtttgttaattctgagtttgacaagtagtgtcaggaagttataatcactaggcatacaactgtagtgaagatcccggagcaaaatgatgttgctaaaaggatgaaccgaaccctattgaacaaagtgagatgt

SEQ ID NO: 318836 - DNA, 5068 bp, Cannabis indica
acaaaagaagaataaacttcattaaataatcaaatcgttcatcaatacagaaatgaactccaagggagcattgctcaaactcaaactacgatcaacaatagaacaagtggatctcgcttaatagtgagctccattgtttgcagaccgtttaacaaactttaaagaacaaaacaatctttcaattcatccaacaaccttttgcatttattgataattctaccaaaattagaaaacatggtagaagagctacggatagattgaatagcaacaaggcagttcaattctacttccacacggctccattgtttttctttaatccaactcaaagcttcatgtataccaatggcttcggcaacctcaggagaaacaactcctcttacacatttggctttggcttccgacagtgtaccattatgagatctagcaacacaagagtagctgtaacagttggttgaagagaatattgcagaatcggtattaatcttaatcgtattaacatttggtaaggtccaatgctcattaccatcttcaggaaacagtaatcctaaagatggatcgaaatttttatctggagcataaagccattgattaagaaccgtttgtgccaacactacaagatccttgacttcaacattcttttgattccacaccagttcgtttctactcttccaaagtgcccaacatagcatagccaccagctgtctacttcttccactccaaaatttgaaaatcaaattgagccaactaggaaacgtgccagccacatcagtagaaatacctagttctagctctgtccagcaggctctagagaaagaacatgtgactaaaatgtggtttatagtttcatttttgagattgcagaaaggacacatagcattgacagccacatgctttgtttggagctgagttttcgtgggaaggaaattagtagaggcttgccataagaagttcttcacctttggagggacttttaaattccaacacttacgtcagaaacctgaaggtcaggtgttgcaagcggctgtttcccttcttgaatgatagcataagcactcttcacagaatagtgtcccaagttttctttcttccagtaccaaatatccggctctgtgacttgaatagggatactaacaagggatactaacaattaagttaatatctctctcattgaagatgtcacggagtatatccatatcccattgatcttggtctattgacattagttgagatacctttttgtcgaggagggaatcacatacagtgtgcacataagggtctaaaatatcaggcaaccaagggtcatttagaatattaactgatgcaccagaacatacccgaattgcagctccttttttgagcagtagttgagcttccatgatgcttctccacacaaaacttgggctgccacctatctcagctgaaagaaaggagccattggggtaatacttggcttaaaacacccggataataagagagtgaggttgtaccatcaatctccaaccttgttttccaaatagatccacattaaaatcatatagattgcgaaaacccaaacctccttgcaatttaggcttgcacatacgatcccaactcatccaatgaatattcttatcctttttggaagaagaactccaccagtatttgcacatagcacgttccatctctttacttgtttcaattggtaatagaaagacgctcattgcatagttggggagagctggacaatagttttcagcagtatttctttacccgcctttgacagaagcttaccatcccaggactgaatacgcttcagcactttctctttcaaaaacccgaggattgctgactttttccagcctattatattcggaaggcctaagtaagtgccatggtcatcagcctcatgtattcccatatcaccacaaatgacgtctcttgtatgaacatcagtatttcggctaaaaaagattgatgacttgttaggatttatcttttgtcccgaagcttgctcagacacattcagcaacgattgcacattggaagcttctctctcattagctctgcaaaatatgtagctaccatttgcaaaaaacatatgggatgcagttggagccccacgagcaatttgaattcctcttaactgttgtctgtgctcataatgcttcagtaatgccgagaagccttctctgcaaataatgaacaaataagaggataaggggtctccctgacgtaaccctctcccaggagtaatagagccaaataacttgccagcatgagcaatatggtatctagccgaggtgacacaactcattaggagagaagttgtatgattatcaaaccacatcttagtaagaacagcctacaaataaccccattccactctatcgtatgctttgctcatgtcaaatttgagggccatgactccatttcttcctgcagtttttctgttcatgtagtgcattatctcaaaagcaacaatgagattatcggtaatcaatcggttaggaatgaatgcactttgagtttcagatataaccttattaagaaccaacttaattctattggcaagtaccttagagacgactttgtataggacattgcacaaagagattggtcgaatttcagtcatcgaagttggttgtttcttcttgggcacaaggacaatagtggtagcaggtaattgatctggaaaagttgcattctgaaaaaaatctctaaccagctgaacgacatcatgacgcaagacatcccagaatatttgatagaatcctggactcattccgtctggtcccggggacttgtcagggtttgtcagggtgcatctgaaacaaggctcttttttgactttcacactcctcaatcggtgccacaattagagaattctgaagcgggtaatagttgttggaatacaatctatcacctgattccaactagtaaccgtgggggtaaaaagttgttgaaagtaaccaaccatgacatattgaagtccatcatcccatccaaccatagtaccagaatcattacggagagaattaatctgattgttttgttttcttgttttggcagcagcatgaaaatatttagagatgtgatcaccttcctttagccataactgctttgatctctgtctccaaaatatctccttcttagtaagcatctcagcaagcctttcattttcctccttatatctcttggccgaatcagtatcacgtctcccttttaacagcttaattctttttttgcattgagaaattctggactcaaagttgccagtgatctctcttccccaatcggctagcacatcaaaacactttgttattttttcaggaaaggataaatcaacatacttgtgagtagatctaagttcctggtaaaataattccaacaacctacaccttggctcgcggagccaggcattcttgaatttgaagttacgacttgatggtctttggatttggacagcagggacaagcagaatcgggcagtggtctgaggtagagacttcaagattagtgagccttgcatttggaaacttatcaagccaacttgaggtgataaacgctcgatcaagcttgacttcaatccaattttctgtaccctttcctctatcccaagtgaatttgtatccttccatctccatgtcaatgagaccgcagctagttaacacactttgaaaaccttcaatgagccaattacgataaggtcttccccctcttttatcactttgacaagtgacattgttcatgtcacctgtgaggcactatggaaggctggataactttgcaaggtcactaataagcttccaagtgagtttccttttagatcaatttggctctccatagactccagtgagacgaaattgaggccattcaggggcagatataatcatgtcaatatggtttgtgataaaggtttttaattccacttcctccttatttctccaaagaacagcaagtcctccactatgcccttgacttcctagagtaaaagagccctcaaaaccaatggccattttcaatctatcaattttttctttttgacaaagtgtttcacaaagaaaaataaaattgggtttctttgggataataatatcctttaggaattgaacggtccacggggtcccaagcccacgacaattccaacttaaaatgctcataatccttggcgggtccgtgattcggaacccgccccagacaagttttttgggccactgttttccataggaactatggtactcaattcttcctcgtcagatattaggcccacttcagtttccacacacatggcaacactatggcccatgtcattatcagtccttctttttttagtctcaactaataacattccttttttggaaccaggctgactaggaaccaactgatgaatcacgtgttgtaaagaatgatttagttgactattaccagtatcaattaccttccctgacagatgctgcttcccacgatcagtggccattcttgatatctcatgatgatttgggacattaactgctcctttactcccacgatttgaggtatcaataattgatgcttgttccccgtgccagctagcctgcatgccttcgagtccagtacgcagccactgagctccgatgagcttcgtacgtcgacggagtggtgctctcatccactcaccatatggttttgtaattttcatgtgctggtgtatcgaatagtttggcacagaatctctctgagtgccccaacatcccacagataaagcaaaaggtggggacattttcatatttaaaagtgatccagaaccattcttccccaagcttacgaagtctcattcttctcttcagaggcttagataaatcaatggtgaccctaattctcatgtaatccctccatatgcccataaaattattaggacatgtatcaacaaatgtccctatataattgccaaccgcttgcaggatagtagatgtcatacatccagtttgaagatcatgaatctgtacccataaatccaatgtatcaagggtgatacatcttggattggaattgtccttcatacgtgaaataatcagagccttcctattgaaataccatggactgccttcaat

SEQ ID NO: 318837 - DNA, 1551 bp, Cannabis indica
gaacatacatttttacacaatttttcatactaattttacatcatttgattaaaaatatttaataattaagactaaaataagataatattaattagtaaaaaaataaaacttaaacattagacctatatagattatgaagagaaaaaaaggattatttcaaaaaaatagaaaaacacaaaaaacaacaaagtttaattataaaaataagattgttcagaattttaaatattttcacagtttttaaaattttatttacataaaatatggtcttttaatgtattattatgttgcactcttgttattttgttgttggtttcttgttatctgtatattatctttctatgttatttgaatgttattttactattatttgcatgtgattttcttgttgtgtttggtgttcttttgaaaaacaccataaaaatatatataaaaaaaaaaattaaacataactgtgtaaaaaaattatcaaaaataatagtttgcgtaaattttccaaaaaaaaaaagtgaatttacataaacataaatcgtatgctgtaaaatatgctaattgtaagaaagaaaattaaaaaactaagatctccaacaaaataccataaataaatataactaactattatattattttttgtaacttctgttatctggattttcaaactcgtgatgtgtacaattttaaagtccagtatcgatcaaggaaggcccaaacttgggcccaacaactaagtcaaacaaaacttcagtctaggcctaagctacaatttgctaggactgccaaggccgactcatcctgattcgaaagaggtcatttagaccagaaacaaagagtctctcaagaccattctccaagaagtaatatggaagcgagtaattgaagagtcaatccaatgcagtccagacctcaactgactcagaacccttcagacatagagccccactgtaatatcctaaaaattataattatgttaaattgaacatatttcattaaatatgtaattatatgaatattagagtaagattataatcttatttaagctaattatgagttaattagtaaatgtggagtaaatgattaattaagcgtaatttatttattacggtgattttatcgcaacatgtgggtattatgtataccatttttaaaataaaatatttttgggttcaacatcgtagaaactcgatggattggtcaaagatgtcacgacgttaaatgatgagttgtattagaaatataccaaactaatttagaaagtcgagttgttagtttagttagagtagttagaaatgactaaaatacccctaggttacatttagtttaagtattgaagagaagggtaaaatagtcattctatagagttttagatttttgtcttatatggattttctaggctgattcattaggtttatatgttttgatttatttaattaaattaaggataaatgcatatacctaaagaaaagtgggagtaagattttttttcttgtttatatgtggacgatattcttcttgtcatctaatgataaaggattgctacgtgaagtaaaataa

SEQ ID NO: 318838 - DNA, 1156 bp, Cannabis indica
aacaaaatggaaagaaaaagaaaaaaaataagaagagaaatgaaataaaaaaccacaattattgttgcaaaaacacgataaccaaagactatgggtgttgaagaaacaaaacaagaaaagaaaaatacacttttcgcctgtaattttaaagaaccagaaattattattattactgttattattttaataaactatcatggttgtgtcatctgtaaagggtaaaggtaaaagaaatgtgctgtgttggcagtattttaaacattaatttttttaaaaaatttaatttttaaaatatttaatggatacatacaagtatatatttgataatgtgcatctctagaattcatgtatatgaacggttaagaaagtgtcaatatactatagaaccaatgtgcttaccataaaattattctatgtttttatttattaatttttttatcattagtttttattttattattatggttgctattttgtttatgtttttgttttgaaattataattttgattttgtttccttcatattgataaaaatatcccaacccaaaatattttttaagcgtttggttgagaataattaaaatatagatataagaatgaaaataagaataagaggaggaatagaatagaataaaatttaaaatacatacaaaaattgataaaaaaaagtcattaaatttttatcttgttttattggaatggtctttccttccttttaaaataaatagtcattacaccaaaatggtggatagagcattacattggaatgtcattccaatactttaaaatgttaccaaacaaaagaatataatgaaaattgtttcttttccattccatacaatttcattacctccaaccaaacgacaccttagtttagaattcaacatttccttgcgttctgcacacaatatgatgtcttaacacaaactcaaagcaaggtacaacacttgttggagtcatcatggtacgtacaattgcaattcaaagagaatcataaaacttgttcacttaagtagtgattcaatttatatattgcattatttattataagtagtagattttattttagaagggcttctctgggacaagcttgagaggagttctcttggagatggtaagagaaaaaccagcaaactcatccatgttgatatcttgc

SEQ ID NO: 318839 - DNA, 1629 bp, Cannabis indica
aaaaaaattctactaaataaaaatatttatattaagaagcttaacaattctttaataatatgttttaacctcaacatcatagtaataacctaactgaaaaataattaaattgataaattatttaagatattggacaaggctaaatcttatcttaattaaataattacataaatattttagaatattaaaattttaaagaataatataatgaaaaatagaagaaaataaaaatgtaaatgtactttccacctggccactgacaaagggtatccaatgcaaaatgacgtggccattttcaatatatcgcgagatgatatattggtaattttcgggattttatcaattgtaacgtgagaagagatatttgtaatattctttttttccctatggaattattctttttttgccgtacaagttattggcataaatgatggacatgcttttatttttatttttttaaaatttagaaaaatatacaataaaaataaaatattgtcttttataattatgtatggcacaaaagtcatcacttattggtgcatgtcttctcaaatttattgtcatgttatcccctataatcatttttgcttagattataaaaattcatcataagtaaatttgagaaattattacataatatgtcttgtagtggtagcgattgtttttactgacatatttttttttatttggattaaaggtttgaaatttattacaatttcttttgaaagagataaaaaaacttgacccttaaaggctaattattgtaggtggtgccatcttgaatgaaattcttatagtatttatcgataacttaattaagatagactgaaatataatttatagttggtaagtgattttcgagattgtcaaaataaccaaatggattgaaaagggtatgcacaatgcaagtcctttgtttttcaacccataaaaaaaatgaaaaattgttactaataatttaaaatataaattattaaataatatatattttttaaaataaaaaacttcattcacaaaagaatggattatagagggaatagagaagtcatctaatgaggaatgccatggaaccaaaggcacaatcccattcctaacaatagaattataaagtttcattgcaaagtgtgagagtccatattggctttcctagaagtgaagtgaatactaatacacctagaagaacaaacaagttgtcatgtaataataactacaacattaattttaattaattgtcaaaatattttacttagaataataactaaaacattcattcaggattaagtcttgtcaaatgacatggttggcctgttttgattgatccgttcgtgctggtttggtttgtctgagattaaatttttttaagtttggtgtttggtggttcattgtcttcacagtctggtgattttggcattatttgatcaacatggaagagcaatatgaggcatttacaatacatgatgatgatgaggaggggcttatcttcgaagcaggggcggatggcttggctgagattgatgatcggtggctcttggtaggtcgatttctcactaatcgggctatcgactttcaggcgatgcaaacaaaattgccactctttggcagccgggtagaggtttgtatgtgaaggaa

SEQ ID NO: 318840 - DNA, 922 bp, Cannabis indica
tgtgttctaaacctgtattttaaaagaaaaactaatattagaatttcagtataagctgactacaggaaccggtttctttaatatgtctttatttttgttacatttcattattcgaactggtttttaattgttattatattgtgagaactggtttcttttggttgtagttgttgtagtcagaacccattttgttatttatggttgttactttttttggaactgattctatttattagtttggctatttttaactagttgtatattatatttttgttttactataaccgatgtgttcctattttttataaccgattttgttcttattttttataactgatttgtattattgttatatataagaatgcataattattttaagtttgtttataaaaatgtgcttaattttttatttcatttgttaatttaactggttttgttttattgatatttttggaacatttcaatatattcgtatttatatattaaaatttaaaaatctgatttcaattcaattttcaaatgatatatatttacaaatatcgtaggttaattaatcattatgatcatatataattttgattgttgattgtatattcctgatttgatgactttggagaactgtcgtagaagttgttagttgtatatactctattttgatgtttctttgagttttctttattttttggattgaaagttctcatttttttggctaagcaatactatatcctttgagttgcaggtaatagccgatccaatccaatttgtatgatctaattcaatccaatccgcaaactgcgaatatccacacttgtgcggattggattagattagaaaattcaaaatccgcaattatgcggattggatgttgattgacatgtaaaagtaaccgatccaattcaatccacgcatctttataaaaaaa

SEQ ID NO: 318841 - DNA, 1023 bp, Cannabis indica
ttaaatttaatttttgacggtaataataataaattatatttttgaaactttcgtatgtaactcgacattgactaggtacggaagtttcagaaatataacttaagtattaccgtcaaaaattaaacttaaatatttatctgcaaccgtaaattaaacttaatatttatgctacaaattactttttttatacaatggaaattttaggtttagttttggtttcaaatctcaaataactggggctatattatatatccaaatgagatcactcagtcatgtgcttctaataatgttaatttgttgggctgtcactctcaacctctttaccccatccacttacctaaaaccaaacctcagtacctcacaatttctttattccttcaattccacaacttattgtgttctacttttgcataacaggcgtttttatttatgacctttttcaactaagctgggctctatcacaaattttatcttatttttttttttaaaaaaatatataatatataataaaactagctttcaaaaaaaaaacacaaaagtagccgttacaataagcaattcgtaattaatgctgtatatcatatcataaacactcactattgggttgcagctaacttactgcttattattaagactcataaagtccactgattaatttaatttatacagtgtttgacagtttgaaaggaaaaagagacgaagaaaagctcaatatataaataaatttcgtactagttagttattgtagcattaataatatgtttatatacttttcaatgccaattctttgtatttgtaagaaatttagatggaaaatggaataataataatcgggatgtacaacaaattatttttaccgaatttaattaattgtaatgggaattgctaatcaaaaggtccattacattattagtttcaaatttttattttgaggaaattagattgtataccccttttgactaagccattttaatttttaccttcttttttttattcattcatatatacccacatttataagta

SEQ ID NO: 318842 - DNA, 825 bp, Cannabis indica
aacattaaatgttatttctgatctatattaataagtaaatctgattatactgaaatgagttttatttagggcataaaacccaacacttcttcccttcttggcatccttagttagggaagtgttctctgacttggcattgtgccattgtttgttcaatgtctctcgctgacctatcaagttctgaacctcgccttccaagtatttcagtttttccataccacgtcgttgggcgacgaaggagaggaaagttttctgaagacaaataaagaatgcgtaagtaagtctgaaaatggttagaaggaaaataagaggataaagaaaaaagagtttatagagaggccatgagaaacactcctctcaagcatattctccaagtctccgttattgatcaaatcccattcattggggaggaaagccttgaagtgacgctagtagcctaggccaaattctctactgtactttgagccaagaatgttaacatcaataggaagagtttggagggcttggctcgaagaggcagaagcttggttcgcttgggaaggggctcgttggtacttgtggagactggaggaggaatcagatcctaggttacagactcagggacctcaagattaacggattgggaagctcgcttcttgttagctatggacttcctctgccttttgaggggctccacctcgatgtcagaaggagcatccaaggtggtcactctcttcttttctttcttgtggacgaggcactcttagttcatttctacaagacaagagctatctgagatgtaatcaaatagggaacattagaagatattcaagaaagatttatgaa

SEQ ID NO: 318843 - DNA, 582 bp, Cannabis indica
aaacacagtaaaaaagtaaaaaattctgtaaaaaaaataacaaaagttagtataagtaaatttctcattatatttatcgtacaaatggactcatggagcccagaaaaggttaaagctcaccctaaaattataaaatatataatataaaattgtagttaattaatgtagatatatataaaattttaaaatatattatatgaaatttcccccgccccatttttcttctgtatatttggattttatttgtaaaaaaaaaaaaccttcaaggtgtatgatcatatggtaattcgaacttgtgccaactagaaagggagtaagttccacagccatcattacaattaattttaacttgtttttgaagtatattcaatatttattataaaattaaccttttaattatgcccaccttaaaattaaagggttttttcatttaaaaaaaaatatatttttgcatataatttacggagcaatttaaatcacaactcaataattcacatctcaattcctgtagcaacccaaatcacaacttatgaaatggaataactcaaatcgtaaaaacgaaaaaagaaaaacaaaaaaaaa

SEQ ID NO: 318844 - DNA, 644 bp, Cannabis indica
cacatccacttcctactccctctttgatactcctaagcactattgaattgcttactcccacatttaacaaccaccaccattatcaccaaccaccacactaccaccatctctccatccgaattttgtttcttagttacccattttgacaaaccacagtctcattttcttcatagcaaaacactagcaactaaagggagagaaagagggacaaaataaacaacacctaatgggggttttggttttgggcaattcagggaaattagaaggtggccttcattttggccaatcgccactagaggtggctcattgatgtcgagttgagagttgcaagggcgagagagacacatcaaaggggagggagaagaggggggattagggttggggttttcttggttgtagggtttggttccgtggcctgtttggcttggggtggttggtcggcgctgtacacaagaaagagagagatagaaatcgggaaagagagtgtgtgaagagggtggatcagggttgggaatttttgggtcgtggggttcggttctgtggtctgtttggcctggggtggtcggaaaacccctgggtggctggccagcacgctacacacaagagagatagaaaacaaaagtgtgctctgtaaagtttatttt

SEQ ID NO: 318845 - DNA, 1453 bp, Cannabis indica
tttcctaaagtaattaatcggcgtgctcctcaaggcccaaaccatattcaatattatgaaaagatacaatgtattagaaaaatccaaaaatcttgagttttaattgataaaattgtttccaaatctataccaatcaggctaagagtaaccttgcatattttcaagcagcaacttgtttgattgtgtagctttattgtatattaagttgatggatgtcatgccaattagtcaatctagttagaccatcttctatggatagtgtatattttaagttaaatttagtccaaaatataacacaaaattatatttggcccaatttttgtattagtgctccaatacacaaagatcaaattagctataaaattcaataataccattaatactcattgtaaatatacaaacaattaactttatttatattattttaataacttataaatacaaaaatattttttattaataagtggcaaataggtaattaaaaaaagtaggatttattgtggcctaaaatttgtcacacgctatcttttgtaccaaatttggcataatttttagcttggaccaaatttggcacacattttatatttggagttaacttttagcaaaatattctaaaaaatagtaatacactacatttatagctcttcattagagatgctcttatgtaatcttaataggataaattattcattttacaccttttaagtgccctacaactttgttaatgattattagttagttgatgattaattactagggtgcataactatttataacctttgacattctattataataatcttcctaggtattttttatcaaatcaaatattattcgtagtattaaattaatatgtcaaattttaaaaattggaaacctttaagaaaattaaatctaccagacctaaaattacctccttaactatatggtcttgaagtgaaaataacttcgactaaagtgattaatttttgtacttctcaaagctcaaaccatattcaacattataaaaagatacaatgtaatagcaaaaagcaaaaatctcgaggtttaatcaataaaagtgtttcaaatttatatcaatcaaggtaagagtaacattgcacattttaaagtatcatgaattagctgagcatgcttttcgagtggatgaacaatttgtttgattggacaatttttcattttgtctttagaatgtgtagttttattgtaaggttgttagatttcatgccaaatggtcgatctgtttatgtattcttaatataataaattatttattttgtattttttaagtgtctggcagttagttgataatttagtagattacataattatctatataaactttaacattctattacaacaatcttgctcaaaatattttctattaaattaaatatttattcatagaattgaattgatatgtcaaatttggaatattggaaacctttgagta

SEQ ID NO: 318846 - DNA, 949 bp, Cannabis indica
actggaaaaacataccaatacagatgtcatcaacccaagagataccaaaccctgcgatctaagaaagcactagttagaaattaaataacttgaatatgatttagagattcaaaaatatattttgtattcgacacttatatatttagacaaacttttaatattgttcttagacggaccttgagctaagaaatcgctctgtacatctccatcataattcttgcatgcccaaacataaccgccttcactcttgagtgcataagccaccatatcatcaatgagccgatgttcatacctttaaattcaatcacaaaagattatagcaggttgacctaataatgatcagggtaaatcaaatttacgaagaccctcaccagattccagcagcctcaaacttagatttccagctggcctcgtaaacttcttgaaatatgtccttgaatctttattaacagtgttaataaataaaagatacagatatcttaagaatgattgtgaaaagaaatcagaatttacaaataactagcggaaacacatgttgccatacctcccatcatatttcttaagaatggtgtttttggtgctcagataaagaggccacttcttttcataggcagtgttcatagaagcgtcagcaaaagcacgaatagactacaaacaaccatataacataaacagttataaaaacaaatcattaggctgtttccaggaatcaagaaaattatttgaaaagctcctgaagaaattacatgaacaaacctcatcagtgttgtacatagccaaagctactcctccatcacctttgaagttataaacctcaaactctgtcttctcaccttgttctggctctgtaagtacttctattacttagtatacggataacaagagagagagagagagagagagagagagagagaggaggagagagagagagagtacgttccgttaccct

SEQ ID NO: 318847 - DNA, 1136 bp, Cannabis indica
atgagctaccgaaaaacaagatgcaccttgttgatgtaggtattaccaatcaatccatataaaccctcttcaactgtgtagtcccatacctacacagtctcataatcatcccacttgaccttcctcatgcgatgtgggattgcacaacttacccggtatttccccttacggatcacgggactactgactatcacactttcccccctctcttcttctcacattcccaatagaaccaagacccaaatcgcacccacatctagagccaccatcgtcttcacacccacgaccagtgggaaggcctactgtgacgcacgacaaccactgaagaaagaaaagggaatcaagacccacaaattatgagaacaaccgaagagagaaaaagaaactaatgtcccccgcaatttgtgtttcttgcttattttttggtaaaaatcgagttttggtgaaatttgtattttttgggctctctatgattttttttgtattgggtaccataaggtacgatggtgggtacgatagcagtataatctaaaatttatggatgaaggttcgatagttgatatagtactatagtggtacgatatagttaagttcctgcttaaaatttatgccataaattttaagtacctattgcaccacaccatcgtaccctatcgtaccatcatcatactaacatatccttatcaaccatcgtacactatcgaaccttcatccataaccttcatattacacaactatcgtacccaccattgtaccctattgtaccttaacctccatattatcatgctataaattttatggatattggcggctaaactacatgaactttaaattttttaacacttaaccacaaaaactaatttttttgggggcaaaactacctaaactcacattctgttttgctctgtacctctctgtccaaaaatcacagttaaataccatagtggactgcctacgtgtacacaagagtacacgtggcaaaattttagcggtccacgtaattttaattttaaatataataaaaattatttaaaaattaaaaaaaaaattataaaaataaaaaaaatactttttttttctctttttctttctctttccctttcttctcgacgtaaccccctaacccttcttcttct

SEQ ID NO: 318848 - DNA, 1858 bp, Cannabis indica
gctcaagctaagaccagtgacacgtccctccccatcaaaagttacaccttttccaagctctacaatctgaattttgactccatgtgaccaactttgtcgacatattggctttgaatttaaggttgttcttcagttgaagcaaccaagattgctgatcggtaaggcattgaccagaaactacatcttgaatcaaagactaaagtaatatcaagcaaaagggcatgaagaaaagccatgaaaacatatgaattctcatttgaaacccaacaaggtaaacaaaatgatttgatgaaacgaacaaagtagcttcattcaaggtgggtcaaggctaaagaacataatatttactatatggggttactaaaacatggccaatcaagaagattggttggatttggttcagcaaaatcgaaagctaaactgggtgatagaacaagaaagaagaagactgaagaagaagaagaagaagaagaggtaggaattgaaaacgatggggatttggtcagcaaataagcgccgtcaaaggaaaccgcgtcttttgttttgttttttttttttgttctaaacaatattttatttgtataacgttcgtcttagttggattttctattttgtttattggacgttaagtcgtcgtttttattttatatataatttattttattttataattattgttgatgacttttagtgcagctaaaggaaaattcaaatcaatgactccaatttgtgctggtttatattattcggattttggagatggaatgaaagtaaaagtaaataaatacaattaatttaatacatttttaaattttatttttttattgtagggtagaatttttttcaaaaatactgtatatttttagctaaagtcattgaaaccatggggattaaagaagctctcagttgggtaaagaccaataattggcaacatattcaaattgagacggacagtcttatttcagtataagctattcgaagcaaccaagctatgaagtccactttaggccttttattatctaccctcctaaatgttaatttattttttactagacgatcagcaaaccgagtagcatattatgttgctagatattctcggtatcaatctgatcgtagtatttttgatatttctatttctggtgagctcttatatcttttgtattcagaatgttaaattattcaatgaagttgatatttcatctaaaaaaaagtttttattgttgttccacggttgttttttaattgttccactattgttttaattgttctgttttactattatatggttattttataagaaaatagtatttttataaaaaaatccgtgtgacagtaaaattgtaaactgttactcaaaatttaatattttttgtgaaaactctattaaattatgagtaacttataaactgcatattcttttttttttctttgagataagataaattataaactgcatattgggaatattcacaatttgtatacttttcaaatattttataggtcacaacttacaagtcaagacgatttaaagtaatccaattcaatgacaagtctacttgcaaaccaacttacatttacataatgtgcggtgagaaatattcattattaatgaataatacataatggttatttcttagttaagatttattaaagtgcttaattaaatttgttacttatcaagctgtgtggaactcttatggcatgtttacttaaatagaatgcgaataaatggtatggtattgattcacatataattatttactaaattttgtaaagggagaaattagtgggacccatacaaattaaggaaaaaacaaaggaaaggttctccccccatttttatagagaatgtctttcc

SEQ ID NO: 318849 - DNA, 811 bp, Cannabis indica
tttcccaacagttataaaccgtcttttaaagttttgcatttttatgacacccacattgggaaatagtataaatgacagttataaactgttgggaaaagctaattttgtagtagtgatttcaactgttttcggcttgtgcttgtgagataatctggaaatggcgaaatgatatcgttttcaatgggagtcaatgcaatgtggagatggttttcaaagacagccttcaaagagcaactgaatttatgcaaaacaagctgtggcaagaccaggtggagactctggctacggtcccaactctgcagaaatcccatgacaacaatgagttctggcgtgtccaggtggatgcttctgtggttggtaaagatgctggttttgcggctgtgcaccagcaagtgcagccttcggactcattagtctcggtcgactgtgcaacggttgagggtgtctttgaagcagagctgttaggcatcacttgcgccctgcaaatggctatctcaaggaacattcctaaggtgtggattgagactgactccaaatcgactgccttagcttttgaggctagagagcttcctttcggttggaataccttccctctttttaactattgccttgttctgtgtaagtccttggtggatgttagagtttcttttattcctgggcaggagaatgaatgtgctgatgccttagctcgctgggcaaggatcactaaagttaagaactctggttttctaagggaagtggcccccttttgtggccactagtttgctttgcttaaataaaagacttaattatcaaaaaaaaaaaaacaaaa

SEQ ID NO: 318850 - DNA, 751 bp, Cannabis indica
catctctctctagtttttctctttagaaatttagagctttcacacttagtctattctcttgtaattctcgcgagaaatagaaactcgaagtagacgtagctctattaccattgtgacatggggagtgaactactataaatactgcatgtctctctattgactctacaaatctcttacttcattacaccaatctagcaagtgagtgttggccactttttagcatcaacatttttgtactttcattgagagacacaacttgagttcttagttcccattcaatattttttctaagaactttgtttcgaaaggaatttataagttcaaggaagcaattattcaagagctcaagaactattactaatgtctacaaatacacaaagcaacactactactcttggtatccataccactacttagcgatcagtaggcactgagattccccatagggaagcgaacgtttgaaagaacttagactcgagattgtagacctacaggtccaccacacatagttgataggaacaactacggctttgctcaaagcaatttgaacaaggtgggaaaccaatcttctctggaggattctcttcacaagtcaaatgagtctaggccaccttgtgaccctgcaaaggaaagggacctacagttagccttagggaaagaacctggaatcactaccaagaaagtgaaaagtatgagattcagagggtgaagatcaatgagctactccacactcaaaaatatttttgtgatg

SEQ ID NO: 318851 - DNA, 2049 bp, Cannabis indica
gtgtgtcatgttgaagttctctctgtagtctggtaggcccagagaactcaaggaatttcttctggccaatgagcttaataggcttgaagtttcttcttcaacgtagttttaggactttgttgatggcctccacatgcccattggcttgtaaacggactacagtcaagaagcttttcacaattctgtgctgggcacagaagtcggtgaagtgctcaatgtaaaactatttcccattgtcttaagaaaattttatacgaaagtctgtactcacacacaatgttcttaataacaaaatccaaggcctttttacgaggtgacagtgttcattggttcggcctcaacccacttgatcaagtaatcaaccgcgactatcgcgtacttgactcctcctttgcctgtgaggagggatcctactaggttaattccccaaactacgaaaggccacgggctactcataagcgtgattttagtgggtggtgctctcagaatcttagcgtatctttggcattgttcataattttttacatactctatgcaatccttcttcattgtgggccaaaagtacccctattgaaggattttcttggaaagactgggtccaaaagtgtgatctctgtaaaaagcctccatgaacctcatggattatagcactaatttctgccctggcaatgcacctcaagtacggcatcgatagtcctcgggggtataactttgcctccatgattgtgtaacggggagcttgagactggattttcctggaagcagccctatccgtaggaagctcccctatactcaagaatttgtaaatgcgtgcaatctaggaatgagagttatccactatagcatttacctcctagacatcaatactgggtctcttcaaatggccaactgggactaccatgtgttcaataatctcaggatctattgccagcttacccaacatatccgtgaacaaattttgttctctttgcacttggcagatgttgtagcttttaaatccttgtaacaaatctcgagacatcatgacgtaggcgaccatccattcaccctttttttggtattcactagagatttgattaactactagctgtgaatcgctataaatatcaacttgttaggcccctacctccttagccaattttagacctgctaatatggtttcgtgttctgcttcgttgtttgaggcatgaaatccaaagtgcaaagaactctaaagctggtacccttgcggggaaattaagatcaccctggctccatcccccttttcattggatgctccatccacgtagacctaccaagtaggcaacttagggattggatctttcaagaggttgttgaagctggaaaactccattacaaagtcagtaagggcttgtccttttatagatacctgtggctggtaatggatgttaaattggctaagttccatggcccactttagcaatctgtcagaggactccagcttttgaagaacctgacgcaggggatgatttgtgagtacttttatggcatgggcttggaagtacattctcagcttccgcgacgcggtcagtaagaaaaaggtcaatttctcgatcatagggtacctggattctacacccagcagtcttttactcacatagtaaactggatactggaccttgtcttcctctcgtacaagtgtggcactaacggcatgattagacactaccaagtacaaaaataaatcctccctttccacgagttttgacaaaataggagcctgagttaaatgctccttcagcttatgaaaagtagcttcaaactctttggcccgtacaaacttcttgttgccttgcaacacattgaaaaatggaatacatttgtcgatagattttgaaatgaatcgattgagggcggctatgcgcccagtgatgctttggacatctttatgttttttaggagaaggcatgtcgataatagggatattatgctctaaataaaaccccttcaaatataatctgatttttttatcaatagaagattagaagtcatttatgtttacatgtagttttaatgtttatggtttaa

SEQ ID NO: 318852 - DNA, 3494 bp, Cannabis indica
ttaattacatcaccaaaaaaaagagatcatatgaactagactatgtattgcttgtaccaccaccaaaaaatctgtttctagaattacattcggccattgcttatcttttatccaactgagtgcctcccgaaccccaattgcttcagctaactccggtcgaatgtttccattgcaaagccgagacactccttccaacatatagccatgatcatctctagccacaatcccataaccatactcttgactacttccaaaaattgatgcatccacattaaccttgatttcattgacattaggtgcacaccatcggtctaacccatccccagccagcaaacctgtccgtgatgtctccaaataaagagtttgagccgaattccattgatcaagatagcatgtggcaaatgcaaaaataaaggaggcatttgagtctttattcttccatactttatcattccttgcaccccatatagcccaacacaatatacaaaacaaccttcgggtttctatactgaccgtgctgaagacagccacacactagtccacaaaactggtttcctactgcactggaagttgaatggcagccttctcccaacactgagtcgctatagagcaataagcaagtgcatgcatgattgtttcattatgtaaaccacacaccgggcataaactatccacatccaccctttttataattaattggatctttgtagaaagataattggttccccctctccatatcaagttcttaacctttagaggtatttttaatcgccaaagctcattccaaaaattagatgcttcaacactgttccaggcgcctttttctttttaaatcaggttgaatgcacttttaacagaatagttgccgcttaattcatggtgccaaaccaatatatctgctgctgaatgttgcagaatagggaccgaggcaattgcagccgcatctctgctgttgcacaggtcttaaagcagctccaaatccaacctttcgcctccaatctccatcaagttaccaactacagctgaggctaatgcaggatgcgtggaagtgatgcaaggattatcttcaaacaataaccacgactcccctgtaacagccactttactatccaaactgatccgccatcttgctcccatttgaaccactttttgagcttcgaaaatactacgccagatgaagcttggatttttgccaagagatgccgtgagataagtaccattcaggtaatatcgagctttgaaaatcctagcaacaagagagtcattgtttgtaagtaatctccacccttgtttccccaaaagagcaagattatggtccctcaaatttctaaaactcaagcctccaatacttttatgttggcatagtttatcccaagacatccaatgaatccctttgtccttcgtatttgacgttttcaaccaacactttgccatatgttgctccataccatgactaatgtccaaaggaagtagaaacacgctcatagcataactgggcaaggcttgagccaccgttttgattaggacttcttttcctgctttagaaaggaattaggaatcccaattttgaacccttttcctaacccgctcctttaaataacccaaaaccgcgttcttatttcttcacatagtgctaggcaatcccaaatacatgctattctcatctgccaccaccatttggaggaaagaacaaatactattacggactttcatgatggtgttggtgctataaaagatagaggatttaccaaagttaaattgttggcccgaagcttgctcaaaaagagtgagaagttcctgtactttgatggcttcttccattgtagctttacaatagagataattatcatctacaaataacatatgtgacactcgaggagcactattcgccactttgaaaccatgaagccacccccgcaattcatattttcttatcaaagccaagaagccttccgcacataatatgaaaatgtatggcgatagcagatcaccttgtcttattcctcattgtggagatataggacccatcatcttacccccatggacaatagaataagaggctgaccgaacacattccatcatcaaagttatccaaccagtatcaaaccccagtttcacaattattgcttctaaatagctccattctattctatcgtaggccttgctcatatctaactttagagccatgcaaccttcttttccgctcctctttcttttcaagtagtgaagaacttcaaatgacaccataatgttatccgtgatgagcctcctgggtatgaaagcactttgatagtgtgaaacaatcctatccataactggtttcaatcggttagcaattacttttgtaaatgttttgtataaaaaataaaaccttacacaaagcaatacgacgtaagtccgtcatgcgctctggatttcttgtcttcggtataagcaccacgttagccttattaacatcattttcaaatttaccacttgtgaaataacactgtactaacctcacaacatccgaaccaagagcagcccaattcttttgataaaaagccggtgtcaagccgtcgggaccagggctcttgtcaggatgcattccgaatactaagcacttcgaacctcctcatctgatacagtaagaagaaatgactcattaatttctggggtaagcattttttccacacaatcaataacgggctgggtagatggtaaagaagagctgaataaatttgtgaaataatcggttatcaccacttccaaaccagaattccaagtgacatctaaaccttgttcattcttcagatggtggatggcatttgttcttcttctcgtattggtagccgcatgaaaaaactttgtgttttggtctccttccttgagccaaaattgcttcgctctttgtttccaaaaagtctctttttgatcaataattttcagcagctgcttcttcacttccttgtatctctgtaccgaagcattatcccttctattcttcaacaaatcaagatctctcttacaagcattaattctttttttaaaattgccggtaatagtttttccccattcttcaagcttctcggcacaaagtttctgtttgaaccagaaatcttcatcattattctcctcccaacagccttggatgatttcataacacattggttctttgagccaagcattctcgaatttgaaactacggatgcctcccatttgaactggagcttcaggttccaaaaagatgggactatggtctgaagttgagtgatgccgattatacaactttgcatttgagaattttcgaaaccaacgtgaattgatcaacaccctattaagccgcacctcaatccagttactgcctcccctattcttctcccgggtatatggatgaccaataatatccatatcgattaaatcacaatcactcaaagcttgtaaaaaaccctcaataagaccccttggatacctatttccaccatgttatcttcttgactcactataatgttcaa

SEQ ID NO: 318853 - DNA, 743 bp, Cannabis indica
gaaatcaggagtcaaaggttatgtgttcgagatttgtcaagtaaattttttctttgacatttgtgttataggaaaaatatatatagtctagctaacatggagacttcaattgtaaaatggttaatattatcagatctatcacttctaattagctcaactaaaataacttaaattgtaaaaatatagagaaatgttgttgaaaaggaactctatcagtgagtgagctaaaatagaaaaatagggtattttagaaaaataaagtaaaaaaaatgatgtgaatgcttgattgtaccatatataatcttaagattgtaagataagatgtatgttttatggtataattaattgatatagagagaagtaatttataaattttatatattttattattttttctacatattagcaattagtaatgtgagattctttaatattttcttgcgattttttttttactcactatccttaatcacaaatgattttactttttcgatcgatatttttaaatttgtttgttttgttctgataccttattagaattgtaaggtgtatgaggttctacatcaaaactaattagctatgagagaagtagtatataacttttatatattgtattatttttccacacgttaacaatatatgattctctaatacataatactcaaataattgttaatgaagttatttatcatctggtttaaaatttagtaaggagaggtagttctttctctctcttttttttc

SEQ ID NO: 318854 - DNA, 1656 bp, Cannabis indica
acatttcatataaaaaagagaattttttaatattatacattttttttaaagaaaatttacacctctcacccttatttacacctaatttacagatgtcacttacttttttttttgacgtggttatcaaaatcacacaagattatcaaagtagcaatctacaatcggcgacggcacctcctcgaaccaggatagctcattgtctaaccgaagggcatgctttgccaaaccatgcgctgcagaattcacatcccgagccacatgggacaaaactgcccccggaaatttagacaataaagctataacgtcttcaaatagtaccacatcacattgaagaaagatatgtatactaatactttataatgtttttgaagaaagatatgtatatattttttttttggcgtggtgatcaaaattatacataattaatattgtagcaatttataattggcgacagtatctcttcgaaccaggatagttcattgtctaaccaaagagtatatgttttgcaaaattatgcgctgcaaaaatcaaatcgcaagtcacatgaaacaaaattacacccaaaaattttaacgttaaagctatagtaatgttattgtgtttttttagtttctaatgaagtgataagatttattgtctgattaaaaaagttatatttaaataaattttgaaaatcatttatttttgttttaatattttcaaaattttaattgctattataaaaattaaaaagaaaatgagtatgagttgaccaaataatatagatatatatttgttgaaaatatgtcacaattttctaattaacttgaaaaaaattatttaaataagtgttataaaaagaccttatgtatatttgtcattagacatttagacaattaattttagtttggctaattaagattttttttttatatgtaccaaaatatgttttttaaacttttcaagcagttaaaattttttcttaaaattattgagattgttaaattcaaaaattttcatcaatatgtaacttaacttatcttccctacattttttttaatataaaattaactcaattgtacaatattttcaaataaaaatatactgtattaatattttaaaaatattatatataattaattttattttgtatttttacattaataaatatgcatttttaactacttaatattatcacctcatttggcacttgtggtctagtaatgaaatcttttttcttaagaaaaaagaaactaaaaattatttatttaccaaatcacaacaacaagtgcattgagagattaagctgtaaattttttgatgagagttgttggttggtcccataagctagaattaagtgttttgtgtaaactgtaaagtatgttccccaatcccatgtgacatgtctaaaggattattagattattattattattattatttttttttttgaaataatgatgaatttcattaaatcaaatcatccaaaatcaaagatgtaattaccataaataaagcatccccaaacaaagtacaatcaacctcagaaaaagaagatcgtgcaaaaacatgcgcaaccttattagattattggattgttatagtaagaaattagaatcttctgcttttggattttgttattagtgagattcttttttgcttcctttgtttataatt

SEQ ID NO: 318855 - DNA, 883 bp, Cannabis indica
ttttgagtgtatttttcctccatgtggatacgacatatagcccgtttactaccgcgaccgcagtgtaactaattgggcgacatcacctatcatcatcaaacgaacgtcatacatacggatgatcgttatctcataaattaggtctcactcaaccggtccaaagtcatgtatttaccccattagtgggcttaattgacacattcaaaccctaccgagtccaggttcacccatattcgactcaaggatataaataaaatgttatcccttcatgcaaacggttgaaaagtcatttctcagatcacggtctaagaattagggttcttaaactttagtaagaacactcttgtataatagtactttgaagcttttctagcttaatagtattgtctcgtgaactaaggctcattaacgtcccaactaggtaaaaatcattgtttctccttcattaagttattttttctttaagcttaatttattttataattggtttccaaaaatctcaataaacactaaccaacccacataacctcgtaattccaaatgttcataaaaatacctaataactctcaaatgctaatctatactaatgtaacatttctggtcaatctgtcgagtttccattgttgtcgaacataaaaatattaaaccacatataatgcatatataacacacctataatttaataaatttttcataattgagaaattatattatttttcttattttcaaataatagagtttatttataatattgtacatagtatttatgggtgactattcaatggttacatttttattgtaaccatatggttacatttttttttacctatagtagaaggttaccaataggtaaaaattctatttttagatttaattaattata

SEQ ID NO: 318856 - DNA, 1835 bp, Cannabis indica
atcaatggttgtatagcctccaaaatcacttcctctctctattttcatcctcacaaaagtcccaatcaaaagctcctttgaatttttgaaatagggtttaaaaaccccaatcgggtcaacttttaagcatgcgggccgcaacatggtaaaacccatgtcgtggcccgtgtccaatttacaaaatcccaaaagtagaatttttgggagcgtgccgcaacatggtctggaccatattgaggcgcgggtaggcactttctgggtagcaagcttcctggtacaatgatcgataatgttttggccataacactttcaatattgctcagaattggacgattcatgatattttagaaagctgaaagagagatctagaacttttatattcacaatattttttctaaaagtgaacacatcatagtcaaaaattggcttgaaacttcagacttgattttcgatcacaaacaaagcgtgttgagcatccaaaacttagaatctttcacactattataccttagaactccaaattccatgataaattcatcatattcatcttatttaacatgtttcttcttatttttaatttatatgatgaattttactatttaaacctgaaacaagcagaaaacaagcataattttgcacaaaatgaatataatcagctgaaacacacatctaaaacacttcataaaatgtacctaaaactgacctaaatctgataatgaagcataaatcttggacattattaaatgattgtacctataccaagtgacataagtaaaatcgatgatggttcgatttgtaggggaaaattttgctcggtataaaaccatcaaaaaccttctaagccatgggaaaaaaccacattgagaagtagattgcgctagatgagaaaattgaagttattgagtttgatggtgaatatggttgatttacagaaggaagatttggaacattttgagaggagctatttagagtgaagggagataaagaggaagaaatcaaaaagtgggagaaggaggtagcagtaggagctgcgacgccggagctggaaaagaaggtcgctgacatggtggatgattcgatcggatcgatagacaaagaagagagtgacccaatgaaagacaaggcgaggctcttgcctatgctcaattttttttttttaatttcttttcttaatgtatacaaaaaattaaagtaaaaataaattacctaaaagaaaataggtgtccgtcccttctaaataaatatatatagttacatttgtatattgactactacaaatataagaattcgtgacggtcctaaaaacgatttttttcggggaccgtcgctaaaaaaattaagtaactatttaaaaccggcgggaaaaatttagtattcccaatggtttaaaatcgtagtaaacaaaataggtaatgtttttttttaataaaatgtgattttttaatggactcttatacccgacggtttaaaaccgtcaggtatagtataggcgacagtttaaaactgtcgcctataagggttcattaaaaaattgtcacctacttctcgccacattttccacgtgcccgcctactttttgtctatttttcacatgcccacctatttcttctccattttccacatcctaaaatgaaaatcataactcttcaaaactccacacacgcctccgcaccatcgccctcctctctcgccgtcttcctccctctcttgatctccctttcttgttgtctctctcgtccatcgatctccacccatctctcctcctatcggtctccctctactctctgtcgtgtacgtcagaccaccaccacctcctgtcggtgtccctctcatct

SEQ ID NO: 318857 - DNA, 648 bp, Cannabis indica
atattaaattatataatatattataactttttaaattaatttttgtattttaaatttaaaattaatatttttttttatttttatctatcgaatatagattatgatgcttaatttaatatataaaataaactatattgaatttaagtttatttttatataaaaaaaaagttgaccaggttaacctgcgaactcgcgaactcgtgactcgcgaacctgcaaatcaggcccacctgaccattttacgggctgagtctgagtacaactgtttgaactgaaaatccgacaaacatgcctgatgtttagccttagatttaatatttaattacactaataacaatatgatactatgaaaagtactagataccactaataatacaatgataaattttttttgctatgaataatataatgatagactaaatgatttatttttacttattttttttgtatttaagcatttatatattacaaccatatatgatttgggactcgaacaatgcataatgatacactaaatgaccatttttactatttgaccattagaaaagtgagacttaaatttgttgcaattgattgaagcgtgtcctgttattgttttttttttttttttgaaagtaaccataagttcattagaaagaagaaaaaagt

SEQ ID NO: 318858 - DNA, 1436 bp, Cannabis indica
ttactcatcaaaaactaaatgaaaaatactaattagttcgattagatgttggatgtattggattttcagacaccacatccaacatctgatccgatccaattagatattcaaaaataatattcaatctgatccgatcataattggatattcaatatttggcggtcgattgtaattagatagatcgattatcattgaatttgatcgatttatgcatacccatatttatagtgaaagggagagacacgaaataggaaagttaattcccaagcaattagttaattaaataattaggaaaaataggaaaacaatttgcttggtcaccaagcttgtagtcgaaatcctatatggattataagttttggatttttctcttcacttgttcaaagtccattggactcaaaatgtctatcgtttttatttttataataaccgatttatctcttgtatttaaatattagttttaatttaatcactaaattattaaataaaacataatctaaatattttttattatcttgacaataaaatgtcatgctcgccgttcaagccattcattccactcagccaatattttttgtgtttggtttaattgttaatgattgcaaacatcttttatcctctctttctaatgttcatttacgttttgttaaacgatcaacaaatcaagctgcctactttgtggctaggcacgctcgattctaatctggtcgtagcattctaggaacttctattcctactgatcttcaagctattttatattcagaatgctaaattaatgaagttgatatttcttgtcaaaaaaaatatcatgactaataaaatttcccttttaataatttctctattttctctaagtgtaaaaatttttataattgacaaagtcaataatgttaattctaattaattaataataaactaattattgatacttactacttgatacttatctcgaatattacggggatcatagacccatgaaatcttagttcccaataaaataagtctgaaatttaacaaataaatttcataacttattaattattcatgactctactatagactcaaaattacactcatgatttcacggaacgctctatatataccaaatatagatacgctattagttaaccattatttttatcaaaataatcaatgattctatatagacgtacattgagttgaaactaaaattactatttccctttcaatgcattttttcctaaaaatacttaactaacataaatgatattactaaatataattactgaaatgaaggctctatcatttatccattataagctagaaagaaaccatcatttcacttctaactaatggaatctatagatgtccatatctatggttagctctctcactcaattatactaccaagttctcaaaatacaagtattggtcagtgttagggtttatgccctaaa

SEQ ID NO: 318859 - DNA, 1280 bp, Cannabis indica
aaaataatttccaacactaatttatgcttaggtttaatgggcctccttaattaaactcgagaaagttgaggaatatctctttcttgtattattaacaaaaaatactatcatattatatttcattgaaatactcacttttttgaatgaattgcctaatataatttcactatatttaagtctaatacatattttaaattaacttaaaggatataataagattatcatctataaaaagtaagtaattattttaaaaaaataatgaaaaataaaaaataaaaataaatataaaatcaaataaaaatgagtgtccaatgcaattttctcattaatctctgcccactgctataggtcccatattaactgcttaatagtacctttaacttcttatatcaacttgtaatgtttcatatttgagtttttagggaaacagcttgatttgaactcactttttaaaactaaaaaaaaattaagggaaaatcactcttaaagctgcatagatatcataatggagacaactaagatacaataaattaattgggttacaatggtagagcaaataccaagtacaaagctaaccaaagatagacacatataccatattaataataaggcaccatttatattattgcaccctcttaattttttagtccactaaaaataattctcaaactatttataatattgtaaagtgcagtaattctattaaattctatcacatacagctaacaaaatattagcgtaattatttatttactcatgtgttattaccaggggtagacccatagaggcgagatgagacagccatcccttaaaaaaataaaaaatatatatatatacattttaactaattacaatatatattgttaactaaaaataatattaatataagattttgtataatgataaagctatttcatgcacatagtaatgaaggtcatgagttctaatcctaacaaaacatgtttactttagtatttaaatttattttttgaatctctaccagtaagacttatatttagtgttttaattattgaacctaatatttctatttttactttatactacatttaatactaatataaatttgtattgatttttaacatattatacaatgtaagaaaaaaagatgtctgctcacttaattagagcatctccaatagatgtgtaaataaatagtgaaaagctaaaatatagctcatttaacaaaaagtgtgctcaaatggtgtgcgaaaaagtgatgtaaatttggcacatagtaaattttatgccaaatttagcac

SEQ ID NO: 318860 - DNA, 888 bp, Cannabis indica
agatctaagttttctgcttgtgattgaaccttgtaactcatgtgtttccatactctgtttttattattttctttttatgcattattagttttagtttctttgttattctttgatttcagtgtttttattatattcttggagggtgattaaatcaccacaacactaaaactaaattattcacagtttgtatttatgttgtgactaaactttatcactaaaggtaggtgtttgtggtagtgatatttttattacttgatgataagtcaaaaaaaaaactataactaaacaaacttgtacagtagtgataatataaccattgaaacctcctctatatatataaatatttacaaagtttggtttgattaattaatttcaggaaataaagggtatgttgttattaatgcgttttgtatcttttctttgttttcaattttagccgaataaataaaaggctaattaggattttcgccccctgaactttgacatgtaccaaatcataccccgtgaacttttaaggtcgttaaaaatgccccctgaactattgagtttgttagatttaaggacttttatctaattttattcaattttactatttcgatgattgtttatgtactaaatcatactccccagactttgatatctactaaatcatgtccctcgaactttaacatgtactaaattatgtccccctgaactttcatccatgtaagtacttattaaaaaaaaaaaaaaaaaaaaaaaaaaataacattaaatccaacaatctcaatagttcaggggtatttttaacgaatgaaaaagttcacggacataatttagtactatgtcaaaattcaggggacaaaaattctaattagcataaataaattaataacaacaataaaaaga

SEQ ID NO: 318861 - DNA, 1658 bp, Cannabis indica
ttttgcaggcaacgattcgcttcccatccattgagagaccagcgcatttaattcgggtgttagagaggtactcaattgtttttaactaccctggcacccattcaccccgtccattggatcataatttttccttcattactggagacaaattacgtcatactttgataactttagtggggtctgttttgctaatgttgacctccttaaaatcttccattggtttaatcatcctttccatcccaactcgaggatctaattcatcttcctcccaagttacccctgttctagttggatgggtgcttcaggagcttcttcaacttcgtccctgaccataaaaactgatatggccgatacattgtaacacttccatgcgcttttctgatcgccctttattacttcaacacttctgttgtcacgtgggaatttcatgcataagtgtttgaaggaagtaattactctaaaattgactaagactagcgtcctaggataggcaatgggacagtctactactatgaacatacaatgcttaaaagtgaaggtagtagtacttccgactataccccattcaaagtaactgggagatggttcttccttattagtagtagaaaatcctagggcatggcatcaaatcaggtttagttaatccaatttctctgaaggaaaacttgaacagtatgttgactaagcttccattgtccagtagcactttggacactcttttgttggtaatataggcttcaatcaccagtagatcgttgtttgggaggtgtatgtgttgggcatcctattctgtgaaagtgatgggaaaattcatcatttgcggatgatgagttggtgattgcactagggcactaactcattcaaatatctcttctgggcattggaagtactttcggtaatgtgcggtcctctagagatagttgccatgtagccatccacgagtggcagagccaacccttgtgggtatgggttccaaggtctaggggcaaggactgccactgtagcttgcatattaaataccccatgaggggcctgaatggttggggcttgcatcaccgaagcggttagagccagaggtggtattttgggagcttgaagaaggcccaccccctgcagaggagttatagctccctactattcgagaatgacgagctgtctgtgagctataccttgcctaagatagattatgaggaactagacccaatgactaataagatggtcaacacgggccaaagtttatatctcatcttttaaataatcacactcattgatagtgtggccaacatcactgtggtacacgcacctgttactttggtctcttttttgcttccctcctttgaacatttgaggtggatttttatagtggaccatattgtaggtagccttataaacattctctcaagtgtcgattaagttggtgtatttagtatattttggttcatactgacttcttcctttctttggagcctcactctagctctatcttcttccacttttcttgttatgcgaaaagctcacattcaattctagggcttccatttttgattatccgggggtggcacttgatgtcgcccaattaattacacgacgatcgcggtagtaaacgggctatgtcatatccgtagggaggaaattaccactaaagattaatataaata

SEQ ID NO: 318862 - DNA, 926 bp, Cannabis indica
aatttatttgaatttatgatatagacgcttttaccaaaaaaaaaaaaaaaaaagataatgaataatccaaacactaattgtaattttttatgagagaagttattgttataatttgatagtctcgtgatgatactttgattgttatctaatatgaaatgtatttttatacataatttttttcttcaatggtaaatatatctaatatttttaagatgttatagttttatatttaatatttaactttttaaaagatggtaggaatgacaaaagttgtgaatacatgcaaaaaattttgggacaacatgaaatcaatggaagcccttgaggcatgaacaaaaaagaaaaaaaagacttgggccaagcttgataagacatggacatgagcacaataagacacgagaagcccaaaacataacgtgaacagactaagtcgtaggcacgacacagttaaaaacctaataatttgacttttataaattttaatttgtcatttatatataaattaaaatatgatgaaattcttatataattctataataggggatatttttttcttctaattatggagtcatgcaaaactccaatgtacaaataagttaatattattaccaattaaaattgtaattggtaaagaacacattgatagttattgttgcccaaaatttgaagttctcgattaagattaggaatgctaattaatttgagagataaaataacgtctcacttttactttttttttcactatagtcatttaaaaaacaacctaaaaaaccctattttttaatttttattttgacttttagatgatacatgttacttattaggctaattaggatttttttcctttgaactttgacacgtaccaaattatgcctcctaaattttttttttgccgttaaaaattccccttgaactattgagattgt

SEQ ID NO: 318863 - DNA, 957 bp, Cannabis indica
cattcaacaagcccttgagaattcatgagaatgaatccaaaactatacgatattaagtggtcaagtccaaagaaaaataataatttcgtaaaatctaaaagcaagacacgaaaaacagaaactaattgaatatataggattttctattcaattgaggtgtcgacctggtagtatatatgcctttaaattaagtcaagtgcatatttgttactccattaataataatggtttttgttttggttaataataatggtttttgttttggttggaaacattatctaaaaatacggagaaatatacgcttaaagaaaaagaaaaatgggagaaatactaaaagggtgctaaaattattcttaagccttgttttgcagtgattctaaatactttcagtatctaataacaaaatagattaaaatttttttaaaaaaattaatgaaaatattgtcattatcgctcgatcatgaacttcttgcacaaacaagacaaacaatggaatgaatcaagtcattatcgaactagtggttgtacgtaatatcacctgtttactcctccaccacgaacagcctagtggctttatattttcgtacactaatgtgttctcaaacacaatctcttaataaagcttttgcttcaattacgtacataattatcttacttgaactggatcaaacacatcataagtcattacaattcttttttctctcttcttttctttataaactatagctcactaactattcttctaattatctctcttaaaaactggtaccatgatataaagggttagctatatatagcctttgtttccaaaacaattactgtcataactgacattagttaaatagttagaactagttaaaagaaacatcctcacttgatgaccaatcacagtaattattcaccttaattattgagattagggctcatttggaacgtcgtattaagtcgtattgtatt

SEQ ID NO: 318864 - DNA, 885 bp, Cannabis indica
tgttgtttgcaaattgaaaaaaaagcttgtatggattaaaacaagcttcaagacagtggtatgctaaacttaacaccactctacttcaacagggatttattcaatccaaatgaccataccctgtctaccagataacaatcacatgtcttcattgctttactaatttatgttgacgatatcatcattgctactaacaatgttgcatcatgacatacttcacttcaagctcaaagatcttggagacttacacttcttcattggccttgaaattgctcgctgcaacaaaggtatatcagtaactcaaagaccattcatactttagctttttcaagatacaggacacctagttccaaactcgtcaccacaccaatggaacctacatcaagttaaacaacgaaactggcaatgtgctgcaaaatccaactcactatcgaagcttaattagcaaattaatatacctcaccattacaagacccgacataagttttacagtcaacaaactcacccggttcctccaagctcctcgatagcctcactttcttgttgcctataatattctacagtacttgaaatcttcaccaggacacggtttatttttttacaaagcttgcccctccccacctcaactacaagcatttgctgatgctgattggggaacttgctcagatacaagaagatcgatttcaggctactgtgtatttcttggtcagtccctcatcccatagaattcaaagaaacaacccatggtttcacgatcctcaactgaagaagagtacagggctatggcaatgttgggctttgtgccctaaataaaactctatttcaatgtaatcttttctattcaattatcaataaaaaaaatttaatttcattacttgtttaatg

SEQ ID NO: 318865 - DNA, 1397 bp, Cannabis indica
tatgcaatcttccacttatatcaattgtaactagaagggaaatacttcctctccaagcttacagccccataaatagtgattcatattcactgggcaagggtggagagattttgtctaaaagttcatattcagagatactactgtaagagctctaagaaaaggaaccattttccttgctctttattcaacgtaaataacgaggattaggctattaccgaactgctcggggctgaacctctataaaattcttgtgtctttatttgctttactatatttcattcgtattaaactgctcgtcacttacaaaattagactcgttatcattggctaaaagcgaggtcaacattttggtgctttcattgagagttaaactcaaggatcgctctttattccaaatttaatcacaagtaagatggtggtaaagactcgtagaggcatggttgatccagcgaatccccaggttttggatcttgcactacagaagccaggaaaccaaagggttctcctacccataaatccttgacagccatcaactacgggtcacggtgtgaggactcttttggatgaaatcgcgcctggtgtgcaagagactgtgaatactagttcaacagccaaccagggtgttcataacatagccattccacccgctaccaatgtataaacaaccattttagatgacactgaaatccagaaccgtcgtgctcctcttggaatcatgcagggtcataccaacaccgtacatcatgatacggaggaactctgtgctgcgataaatctcgcatttgaagagcagagatgcatgtttgtcgaatggagagacaaggagatggaaacgttcagggctcagcaagcaatcattgacgatcgcagtcggcaaaccactgtgctgatacgaaaagcctatcaaactgtcgggaagtagcttgcgaatgtcattctcttgggcaaaacagacgaagatccaacgaggaatacctcccagactacaaatggtcagccatcaaatccgcggtcataggttccacctgtgggccaagcggtaggcgggcagaccttgtgcagtaattcatcgggagaagttatacccaataactccaaccaagttaatggtaccggtcagcaaattggccaaaccaagcagtcactgagactgccaggaatttccgtttttgataggttggggacgacttatgatctcagaaacgatctgaacaggaggagaggagtggacaatcagcttgacacgccaatcgtgcaactcggaacccgcgctaaaaatcccactcataaagatgctgacgtgactcagatcggccaagaggccgaacaagttagtccagccatgcaggcacagctggacgaacaaaaaaatatgttccaaggcctggctggttaga

SEQ ID NO: 318866 - DNA, 692 bp, Cannabis indica
aaatataaattttaatttaatatttacaaaattatacttagataaatctaaaaataaataaaattattttccttcttagtatgaattttcaataaatattatgaaagttacttaatttaagttggttcaaaatctattaaaattaattttcaacttaattttctaataaatttatatagctaaatttaaaattcaatgtatttaagtcttttgcaatgtattcacatgggatcaatgcaaattaacgaattttaaatgaactaattaatggtactcaataaactctccaattcttaagtatccatttattgcaagtttatattttttttgcaatataatttcaatttttttatatgcaacatgaggaggaaagcaacttgcgttacacaacacaaaagtcattagacagcaagtatggacacaaattatttatatatgtattataattaattaagtagactaattctagatgagcaataatatatataaagacttacattaaaaataagtacatgtcttccccattcgtttttattatatgtatgtttatatttggggtcaaattaacagtaaaaatacttactattttattaatatatataaaaataattagcaattttaccttttaatattttaccctacaaatttgcaccccatatgctatatggtttgataataatactttacgaaat

SEQ ID NO: 318867 - DNA, 1381 bp, Cannabis indica
gagtttgacaaagatggaaacagcggggacaagtcgcctattgaattaagttgggagaatgcaaagatctttgtgcgattcttcagagctttccacaaaatcactatgaagtttagtgactcaacatatatcacttcaaataagtacttcattaccattagcagaatacaacaacagttgtataagttgtcacttgcagaaaatgatgacatattcttagtgagcatggctaagagcataaaggaaaagtatgataagtattggggaagaactaataaatgaaacgaggcactattggttgccttagtacttgacccaagatacaagttgaagtatctcatccattgcttccgtaaattgcatgatccaatcacgtccaatttgatggtgaacaagaattaaacgactttgagaacattgtttgaggcgtatggtgggtataaacaattacaacaacaaccatcaattctagcaagccaaggtcaagacactcctagtgctgacactactactatattctcactagattcttattcattttttgcgaatggcatgcatgttgagtttctacaagagaggatcgaataatatggtgaagtgtcaaaagatgaattacataagtacttcatctataatgatgttgaacctataaaagtgggtcaacttgaccgctttgatatactaaaatggtaatgtctaaattcatccaaatacctgaccttgtcaaaaattgctagtccagttgctattgttgcttctgaggcgactttctccactggagggcatatttttttatcctttttggagctcattgaatccaaaaactgtggaaggtttgatatgtctaaaaaattagtggaaccaatcacatcaacctataatgtttgtgaatataatgggaaagaagaaagtctaccgtcaatagaggaccttgccattagtatgattatactctatttataattttatatttcatatagactacaatcattaaattaaattaagtcattaaattttatactaatagctttgtaatcaaaaatacaaatgatacttccactaccaccactgcatcggcactgccaccattacttcctcaacgaccacttttaattcatcaatacaattaacttcagttagatcttagagcatctccaatggagagctataaatgtggtgtattaccattttttaaaatattttgctaaaagttaacttcaatggtgatgtaaaatgtgtgccaaatttaacctaagctaaaaattgtgctaaattcggcacaaaagataggatgtgcccaattttagcccacaataaatgtcacattttttaattacctatttgctactcattaataaaaaaaacatttttatatttataa

SEQ ID NO: 318868 - DNA, 928 bp, Cannabis indica
gtacttgacttgctatgggtgggcatgtactctttcctttaatagccaataattgtaagctaatttgataaatgtgttgggcacctcagctgccaagttagcataagtgatgtgtcctaagtggatgaatcatcacaacaaaaaatataagtttaggcacgacacggaacaatgtctgaaaacacggtacgtaagcacgaatagattagcttaaaagcatgacacattaaaaagcctaataatttaataataataacaatgataaatagttattcatcaattgtaatatttattataattataataattataattatttttatatgattgtgtgtaactattattgaaaaaagatgcaaaactaattaaaactataaaatacatatatatttagtacttagctcattaattgtaataaaaatataaaaagatggagcacgaatttgagtctgtatattaaaacaggttagtctatttaagaaaaataggttttttttgaagcctcacatggatccgaatacggcaggaaattatcgaacttgcaggccatgtcaggcctaccatataaaattgatgcacgtcagggcatgacctatatttttctatggcacagcacgacatgacccatatttttttatggcccgatatgatccataatttttatggtccggaacaatacgacccatattataacgccctaacatttaggcacgctacccaagacgattaagaaatcctaatcccctaaacgggatccctaataaaataagcgtggaaattaaactttaaacgaaaagagaatgaaaataaatttgtaataattttaaccttacaaacaaaagttacatgtttcgggatcccaaaaattcttttacaaaatattacaagtcttttcccttagccgacctaagcagaaaaacagagttac

SEQ ID NO: 318869 - DNA, 1974 bp, Cannabis indica
actaaaaataaaaatttaagtccatccccccagatagttaatacattgtccctaatgtgatattaaagagagagaaaatgaaacttacctgagtgtcacataagtatggcggtggtggtggtggtgttgcaaaattcaactaggatacagtccacatcttgcatccataagggtccttgtaccaaatgacaaaaaatgtcctccaatgttgcaaatttcaaaactatccctagaatgagagtcaccttcccaattcctgcacatcagtcttttcatacgtcatcgaaaagttcaaaatcgttctttggacatccctttcttcttgttggtcgttacttctcgattatcctttacaacttccactcaacaatatataggaatttaagttgcggtaaagacattgaaagtctcttcttccttttgaacacgcaactttaacttttccttttatacatcaattaacgttctccccatggctaagaatgatctttccaaaatgatgggaatattctcatcttccttcatgtcaagtattaaaaaatcagcagggaagataaacttactaaccttcaccaaaatatcttcaattagacctcgaggatgagtcaaagaatggttggccatttgtagagtcactttgtgggcttggcttctcctaatcttagtcttttaaacacagacatgggcattaagttaatactcactcccagatcacatagagcttttgtttccattgaatcccttattgagcatgaaatattgaaaccacctaactatctttaagcttgagtggtagtttcttttgcaggatactgcactcctcagtaagtgctaccatatctcttattcttctaacttctttttcttggatagaatacctttcatgaactctaggtaaattggctttgttccaaggcctctatgaatggaatgttgatgtgcaacttctacactgattcagaacggtgccacgtggagattttaccaaaaccattctggaaaacaagctcggaccgtaaggaggctgctaccagaaagatgttgggtcctagtagggtacttcattctcaaatgccttgccaagggtactggattgacatggtccttgacttcctgcttgtattttttgggctagggagttgggatctagtcgactgccctggtgttctcgactggtgagatggtcttctctcttaagaccatttagtgattgtgggttcgaagccatgcttctcgagcgacagcaaacgggccgaatctcattctttgcttctggacctagccaatatatgaaccttgttaattctatgaaacttatacgtacttatccacatatggttaaaggagaaaacacaaatataattccctagttagtatttcaaatacaacaagtggagtagttaataagatattttatttcagaataatattatccaatctttactacatatcttaacatgtttattctttataccctttctattgatatattaacatattaatttattctttgtccttctataattgggaccctactctttactagtacttttcaagaatataattcgtattaattagttagtagttatgtcttcattttcagcatgctgcatatatatataattatatatgcacttaatattatacatacatatataaatatatatttatataactttgttaccaacctaacaattattcaatttatatcatgtcactttcaaaggtaaatactatttttggatatatactctattttataaaagttattaattagattttttgttttgttaaatgataaaaaatagacttagtattttctaaaattatacaaatagaaccatgaactgattttttgtcaaaataaaacttaacaataatctgatctaaagatgtaataacaaactgattacattttctgtatctgttcatgttaaaaattattttaaagtttattatatattaaaaaataaa

SEQ ID NO: 318870 - DNA, 1073 bp, Cannabis indica
ttatttagggcataaatcccaaacacttctaccaaatctccttccaccttgtgaagttgaagcgtaagatcagtgtttttcttggattcagattcaagcttggtggaaagctcttgtttggcctttattgaaatatcttggaagttggtaatgagtgtaaggtccttttccaagttgtggatccagaagcttttctctttgatgtccttttgcacctcttccaccttaaggttagcagccttcaggtcacactcaatggttttaagtttttccttaaggctgagttcatgagtttccaaagtttcaactcgcacgttggtcgtattgtaatgctcctccttataagatttgatcgtgtcgttaacagcatactagagcctatctttaacttggcgatccacgagttccttcacttggctttggacctcttccaatttggccatagtttccaccctttttgtgtctgaagcctcgcgttcaacttgaacattttctagctccaaggtcattttggacactacttctgaacaacactcagccaataaattttcctaaaaagaataaagaaaaaaaaaaggaagccttagtaaaaggtgctgagtaaagtaaatgttgagaataagtaagaattcttactccagcaatttgatggcaaagtgaataggctaggaaggttggatcttgactaactattggggctcacctctctggaccgagttgacagtaggtacagttgtttgttcaatcagatcggccgcaaacagacccaattaacttctaatcctaggccgaaaattctctaaaactattaagcattcagggactagagcatgggcattagcatttgaacccttattagacagttcaatattgtgtcgagaagcaagcacattggttctctgtctaatttcaattgactccactttaaactgctttctggaagagttgatctgcctcctcaagttggacacattattcttatgtctgctcaattggccgaccaagaaggataaggtagatggaggaagagttagaggaaactgttgggttttatgccctaaataaaactcttt

SEQ ID NO: 318871 - DNA, 1250 bp, Cannabis indica
acttaatttccttacctcgaatgtggagtccttgccttgattgcaataagagtgatccttgagaaacaataattttcttatgacaaacctaaattttacacttattaattagaaaatattataggagtataatatatatatatatataaatgaaaccttaactttgaatttataaatccaaaattataaaaattaccttagtttccaaataaaactagcagaatagtaaaatgatggtggtgatatcaatatgatgaagaatatatatatatatacgtgtgtgtgggtgtgtgtgggagagagatgatgattatggtgtgtggtattgatttgatctagagacaatattggatgaagtaaaggagaatatatgagatcttgttaggaataatggtgttggctttgatgaaacaaatggaagatttagaaacaagggaagtagaaaaggtgacttcggcagaggactttgggcaagaagagaataaaatctagtttggctttttgtgagaagaaatgtgagtgatagcttctatttataggcctctactaactttacccagctgtagtactcatagttaacacaaaaaaagatattcaaatactaaaagcaatgactttctcttattactcggtcaatagaattcataatgagaggctatcctagattatcatctttagttgttgttggttgagatatttactctccaagatttcccacgtgctcctcttctttagactaggtttggtttatttaaaatttgaatgtggtaactgatttttcatgcacacgttgcacactgctccataaacttcttttacctcacataatttatttctgaaatgcaaatgacatataacttacaagaaatggtctattagtaaccttgacttccacgtggtccactaactacctctatctattcaaaattactacacattgcatacaaagaaaaagttaataaatgaatttttcatgttacatgctctaggattttgagctactaattttattgtaatatgccaataccatgatcctaacaactctagacaaagttataaaggccaatactttaaataaatgtcacttatttatataaaatagggaaatatactacttttgattatcactagcaaagaattgacatgtaaaaaacaattactagtccacatcaagatatctaaaaataataacatatatttttttttataaggagttaataacaatcactatttccacatcgagatttcta

SEQ ID NO: 318872 - DNA, 761 bp, Cannabis indica
ataaaaaaggtgcaatttgtaaatatttttaaatattatcatacggttatattttttacaagacactaaaaaactcaaactattttattaaaattgttattgatttcaatataatttaaaaaaaaatgattggaaaaaaaatatgaaaggcttgaaaataaataatagatagtagtcatggttttttttttttttttattggcctttgagaattgggaacagcaacttgttagtcctttggaaattaagttggttcataatttttttttaaaaaaaagtactaaaggaaaaatatattgaaccctttattttttttttttgggaccctgtacagtagtccagcttgcacaactatagggctgaccctgcattgacatcaccatttaacaaagcatacacgattaagatacataagaggattaatgaaacaaaacaaaatacggaagctatcatttttatagtaatttgtttagtgtctttattagcggtctaatttcattccgaagagtagttcaaacataaaagagggacagtgaaatcagaatatatagagagaaagagaaagaacaatttgagagagaactcttgtaaactctgtgtgtgtggagagcagggccgatcttatgtcaatttgggccttaggcaaaaataaaaaattagggttcagttaaagagtgaggctattgggatttaaactctcaatctcttagttgttttactaatcaaattaccactaggctacaacacatatttagcattaa

SEQ ID NO: 318873 - DNA, 744 bp, Cannabis indica
aggtcaatttaataattctagctcgttttcttctcatagtttctgtttattaatttttacatattatcatcactttattttatttttttgaaaccaatttgtgcgtaattagttttgtaaattaatttctaattttcaatctctctgtagaaacgatattcaacttatcactttattacttgttgataattacatgtacttgcatatacaatttttcacaacatatcataacaaggagcaaaattttgttttgagggaaaaataaatgtttaggttaaaacagctggaggatgctatatacaattatacattgatttacatggtaaggtatgtatttaaactacatgtacacatgctttttttaaccgaattttttaagtttgagacgaatatttattttttgaagtatatcaagtattttagctattgttcatcaggttctagttctaggttcaagtatataaagaattagtggaaactggaaaggagaggttttgtgatcgtatgtgggtggctccatgttgtgttcaagtggaatctgttgtattcaagtgaaataatgtattattgggctttactcttaaataaatgaatgaggattttaattgattattttgtttaattgtttattgggcttagcaatggtcaatttttttagggaaacttacaaaaatactgaattttgactcaattcttacaaaaatactgccacacggtaaaaataacttttatactgttttggaa

SEQ ID NO: 318874 - DNA, 1175 bp, Cannabis indica
atttttgagaaaataagatgaataatcagaaaaatggcaaaattgcaaagtgcggcccaatatccatggctggccacttaatgggcaatttaccatttaattttttcattattttaatgtcaaataaatctaccctaaccctaggtggattcttataaataggtagtgatggcctcaaaggaaaagatgatgcaaacactttccttcagtcaaatttgagccatcttttctatacctatttcgaaaccctctctctctctttctctcttcaaatccgaaccctagagtgattagagtaagtacccacacacatcaagtggtactcaatcatagtgtgtaaggctatgaagaatccaaattcaagaaaaggagaatcaggctcagatcttggtgatactctgttacagaaaggagacaagggttagagttctgagcggaaggagccatttaaatccgctgaaaccactgtaaggtttctcataccttttatgtgtttattttatatcgttttagaagttcatgtttagggtgttaaaaacatacttgttagtaaatctagatcctggtgaaatatattccaacatagagttgggcaattctcgtaaggcccagctcaggaaggaatcgatctactgactaagaaggttagatacgattgagttgtcaatatcgtgtcctataattgtgagcaattaattataggttaattcttgatctttatttagttaatttcactttttagcttaatacgaacttctattgagattcaaggatcatttacttccatattctgatcacttggataaaaagggaaactggactagtcttccaggaatacgctgtatggtcctctagcgtcacgatgcttgagttgcttccgaatacggactttcattggtggaagctcatcgagttatggagctaaggtgccttcatggaaggtcttatatgtcttgggcttggcccaaattatcttctttggacccagtggtgggcttttggtgctgacttgaaatctacgtatccctatctaaaaatacgaataacagttttcaactttaattttccaatcactaatttaattgacgagatctaaccatcaacatagatacatttaaaaatatgaaaaagatcaataaattcataaaaatttatatataaaaaatataagatct

SEQ ID NO: 318875 - DNA, 2983 bp, Cannabis indica
tgaatatatttgtagcttagtcaagttgctcacctcccttatatatttcttccatgcaggtagtgctcggtgttgaattggggaggtgacaactaggtaggtctcctgtttgcctcgtacttatggcaaggatgaaacagactcttgtaaggctcccccgtatgatccttatatggccatggttgccacaagggttcgaattagagtggaggaagagactgcccagcctcctgtcaaggctaagccagaggtggactcggagattgggagctacaatgtagaattcaagctagaggaggttgctccagtgagggggaggagttataggacatgttccatgttccctcaccatcctttggcccattatgatgcccaaggtagtcttctgaacaggcttggtgcaccttcaatactaggactggattatgtcctggagcagtctcgcgtgtcgagatattggatgcaaaaccaccaaaaacaagttgggtttcgccagcttctgctctttctgatgaggccttcgataaggtcattactagtggccaagtaggggtgtccgttgggagattacacgcaggaactgtagggcgcacaggcctccttcggactggttggcatggtctgagcatcatatttaacatggggctgtattaccgctccattattactttttggacgttgcagcttactttgggatgtgcctaacacagtccataccaaagagcattaagtatttatcagcgatgtttgtcttgtacaggaagcttggttggtctcttcctaccccttacgagattgggtactatattgagttgaagttggggttaaagcagagaagactcggctatttttattttagccagcttggtcaccaatgtctaggtgacaccaactacaaagccatgtcaaaggttggcaggtacaccaagaagtattttatcgcacatggtcttcgcaaaattgtacacaatggattttaatttgtcccgctctttagatgtttcatccctactttggaaataagagatataacgaatctgcttgtggaccatcactgcctccccctccacgagggtctacacctattgggtagtctgtagtttagcatgttagccaaggtaccaggaggcccagtagaggagcggggtcaactgctggtaagaaggctattgagtcagccactcggtgtatagagaggactatccctttcttggatgaggctttgcaggagttgggtgacggcgtgcctaacaggctatactctgctagaatttaggacctttcatgtatgagttatacttccagctttgttcacctctttgacattgtataagttggccatccatagtgttctttgcatgtgcctggctggccttgggcatccaaacagggtcctggccggccatggtagtccaaagaaaggactgggcggccaaaatttactatttgatattgacattcttttgctttgtttttaggcgctgatgaagttgaagtcagctcacgacaactcttaagggtctttagacgctttctaggagcgggtgaaggtctttgaggcatctgttgctgcaaaggacaaagccaatgctgagctgggggttcttttagcagagaagtagagaattgtttcggaaatggagactatgctgagtgctaggaacaccaagaacatcaaccaagctactctcatttctgggttgcagacatatcaggaacacaagaagaagttacaggaggctcttgatggccaacatgccattaaggaatattaccttgatttgtcctctgaacatacttatgagttctgcctggacaaccctaaagccaagttgtcatacatgggcactccagcctttgtagagagaacaccatcccgtgggaggacattgtttgagagccagatggagatggaccagaccgatgcttatcgagaggggtcatcatcaggtactcgtgacgaggtgtgggccgacccactaatggaggaggtggctggccaggatgttgcccgccaggctggcaagcatagtgatgatggggccggcctggactctgcagatctcgacttggcagctcaagattcagctcttgctgcccctataaacatgtagataaattttttatcagtattcaacattatgtttgtattgtatagactctgttttcatgttctgcatatcctgtgacttttctagggcctgtggcatcttagcttaggaacattactcactttgcattccatgtgtcctatggccttttttgaaactgtaggtcctatgtggcctagagcctttttaaaacactattttcatgtcctatgtggcctgaggtctttttagaacatcactttattttcagccccatgatcttcatgttcgtgtctttggccatgggccctctttttatgaacacaactgtatttgatcatgttgcttttttattatggatggtgtgacctaccaggcggtctttaattctgactatcttcttagggccttgacaagtaagggtccggatttactttgtcaagttgaagtatgcctgcacgacttagaggtaggtttagtagcttatactaagcgttaaaatttctcagcataagttctatatgctagttcgatgcattgtacaatacgggtgccccccaagtgaccatgcacacaagtctcttggtcacttgtaaagataatattgctgacatttttacaagcctctatttcctacttatttccatacagttataatcaagatgaatctgagaaacttatacagtttatcttgagattagaacttagtatttttggccctcatttcatttcagcccacttccttattgggcctagacttgtgtatacatacatcatttattctttgtaaaaaatctaatgcagtaataggcattttctgtaaattttcattcaagccgagaggtttcctttttttaggtttcctatctttaaaaataacttaaatcattatc

SEQ ID NO: 318876 - DNA, 967 bp, Cannabis indica
aatatatataaattgaaattaaaattcaaatctactaccataaaaaaacatattagttttaactttataatttttaaatagttatataaattatatgatatataaatatataataaaaatatataaatatatatatataaaaaatcttcttaatcgggttggtcgaattagttcgggttaattgggcgggttggtattatttttgtcggtttttttatttgtatttttcgttgagttatctcaatttagtttggatagattattcgagtttgacattttaagaaaatttatgtacaacccatgtaccacatattagagcaatcaatcaatagttttttgtgtcattaattatttaattaataaaatagttaaaaaaaaataatttttagatatttaattattttaattgatttgaataaatttcaatgagttagattttatctctaattaattcatttaaatatttttattaaaagaagataaattctcactctattagatgagatttgagattgtattattttttttcagtcaacatgttaaccaaaaaattttggcgatgtgtacaaaatttttgacacgtcgcacgaggacaacacgctgggcctcctacgcacagagtaagttgggcatcaaatccaatgtccagatgaacctaatcgaggaaattagactctataccatttttatattatcttcttttatttttacactcttttttaaagcctattacttttatctctttttttaaacattgtactaattttgcccctgtcatttcaagatactctccatgcactactacaaaaatgagtttcagtgacccatcttgagtgactctatagagttttagtgacacttcactgcgtgtcactgatgtgggtgactggaaaggtattatttagtgacacatcagcatgtgtcactaaaactttatagagattctcattgcacgtcactatagact

SEQ ID NO: 318877 - DNA, 519 bp, Cannabis indica
tcaaaaacgtgggacattttctatcttattttcgtgtgtgtgtgggtgctgaaatgaagggagaagaagacgcgccaagagtatatctcttctgataaaaataaaaactaaataaaaaagagtatttttttattaattttttcaaaggcgccaaagggtatagttaattgggctttttggcgtcttaccctaaatggattttggcgtcttgtgtaagtagtcattccatgtctctcgtatctttaacaatgagacgcctataattagttttttttatttttaatttttcatatatttattatacacatctcacaattatttttagtgtcttccaaaattagtcaaaagtaaaacatttagtgtctcaaatgttaggtcatttaaaactctctccaacttttaatatcttatactaagtgtgtaagacgcaaaatgaagtcacttaaagtcatttttgtagtagtgtgtattagaaaaattaggtaaagcgagtactggagcatgagtaagcttgtgttt

SEQ ID NO: 318878 - DNA, 1086 bp, Cannabis indica
aacattagtttgaaaatgagcagttttgtttgtataaattattaaacatgtcatatgcatattaattcaaaattaaggaatttattaacctatttataataggtttataacattatattttaattttatatgtatatatataaattttaaatggattaaattggttatattatacatgtttaaatatcgtgttaaaaatggcaatggcgtatcacgatttacttatttataaacgagttgtatcttttgccaccccgaaataaggcaaaagagatgagaccaaccaatgccaagaagaaagattatttttgttctcaacccgaaagatttaatacaagatgtttctctcattgttgagaccgagttggtctagttgaatgaaaatttttaattaaaaaaaagtaacacgcaatatgtttctatttatgctaaataaaatctctaccttactataaagcttagctataaacttgtactatcaataatcccaatcaaactagtaacaaataagtttgtgcattctaactaagagtagttaacaccgaaagcaaagcaaaataataaagaaacaatgcaaatcacaaagttgaacaaagcgcctaacacgatcattggaaccgctaatactcgataactaacatatagaagaagaaaacgaagggtctaagttgtctaaccctatggggtaaagggactgaatcataacacccacaaaccctagaaagaagggcaaaccacgacactgccaccagtcatcactcctataccatcactcatctgacccaaaatgcccccgataacttttcgaagacccatattaactcagaccaagccatcacccaagccttaacatcattaagaactctatccaaactccatctcttcacactgtacattagagccaaaatccaacatagaaagttagactccacaacgagctccatcgcccctctaaccagcttaagggcacgtggtggttgcagggctagccttgggttaagacaggctaggtccacccagcacaagagctcacaatgttttttctctcttttaattatacacatttttttagtaatttctaaaaat

SEQ ID NO: 318879 - DNA, 678 bp, Cannabis indica
attaaaactttgttataacaacactgtacgcttgcattaaaaaattgtgtatcatcacctcaaaacttttgaatgccttgcatatgcctttactcttgatcgaacaaggcacatgttttcaccaactcctgcaatacctcatccaagaaaggaatagccctctctatacgctgagtggctaactcagaagcctttctaccagcaactgaccccgctcctctaccaggcctcctggtaccttggtcgacagactaaactataggctacccagcaggtgcaggcccctggtggagggggaggcagtgatggtccactagcatctgcaccgcgagaagtcctgaccaccttggccctcacttgaccggtgggctcatctaaaggcccacctacgagacctctcatcctggaagacatgcctgcaaaatgaaagtagcaaagtcagatggcattcaaaaatattcaacacaagaataaaagtatggtgttacaaacaatcaaataccatcttcatcagaaaaagagctatcagagctcacaattacagctttgcccttggccctagctgtgggtaaggggtgtctaggtctatcaaaaactaggcctctaggtctgatacgaatagatgcgtcaccaacttgacccccgcgggataggcgcctacggagagctctctctctc

SEQ ID NO: 318880 - DNA, 1662 bp, Cannabis indica
atccaatggcttaaaaaaatgtaaccatgatggttacaataaaaatgtaactattgaaacctcttccatatatatatatattatttcacatactttaatgagtaatctcaagtattgataactatttgtaaagttttatcataaatgattaatgtgcaaaataataatactcttgcgtggttaaaaatgttgcaaacgcttctaacatttttttatataataataaaagggtaaatagtgagataataaatatatacaatgagtatttctttactgttatcttagtagggggattcatagttttgttagaatttttcattcttttcccgattttttttaatgaggtattattctttaaaaaagtcaattgtgacattttgatcatttcacatacgcttaattctctgaagtttaaattttagcggtaaaattttttaaactattgaattgttaataaatttaaagtaacattcggttaactactaccatggacggcttatgtgtacactcttgtactttggaactctggggaagtgaattatagagtagaatcatgactctcttcacattcttcactattctcattaaacctatttttctttgttcttaaacttgaaaatatacactagggatagattttcgatctaatctaatatttttcttcttattcgatctaatccaattagtaattaaatttgaaaaattattatccgatccaatctaattagatctcaaaatctaatctaattcgattcaattactaattggattcaatcaattttttaattggatatctaattacactcttaattttcaatattaatttaaaaatataaagaaaaatacataaaaatcaaaattaccctttatttaagtttaatactctataaaaatatcattgttaagcgtaatgtaactaaaactttaaaataactaaaacaacaatattgcaaagtaataaaatataacaaaacatcataaaaataaatgtatagaacaattaagtgttatgattttaacaaaaaaactactaaaaatataattttattactttttattatataaatcaatataataaaatcaatatgatttttatcggttttttcgattcggtttgagcgggttacactacaaaaaatcttacttttagtcaccacaaaacttgtgactaaaagtgaaaaaattgtgactaattataaattattattcctatgttgtgactaaaaggtctatagctaaaggtattagtcacaaaaattataatttgttgtgactaaatatatttttagtcacaatacttgttgtgactaaaactaaactagtgacaacttgtaactaaatactatgttttagtcacaagtgacattttgttgtgactaaaagtcacgtttagtcacaaaaaaattatgttgtgactaaaaagttgtaactaaaagtaacaattttttgtagtgtatgttaagtagcgtttggttggaggtaatgaaatggaatggaaaagaaacagttttcattccattcttttgtttggttgcattttaaagtattggaatggcattccaatggaatgctctttccaccattttggtggaatggctattccatttttaaaagaaaggaatgaccattccaatgtaacaaggaaaaaaaattaataatttt

SEQ ID NO: 318881 - DNA, 1276 bp, Cannabis indica
tagattatatatagggtagatgttaatgattcaattactataaagagaatttatttttttttctttttaaagtttacttttgcccccatgccttgcaaaaaaaattatgtcccctctcactttaaattctgggttcgccactaggtggaatggtctacttcaagtgagtaggttttggttatcaggggtaatacgcttttgagacattagatcactcccaatctcagctggggaggcggccacccattctagaacgttctgctactaaggtattagaatttgggatgaaagtggttaagatacatgagattccatttcaaaatcaattagtaattagagaaaagtgtgggtacaacgaacgatttttaagagtccacatgaccaaatgtgacatttgaaagaatccaacaaggttaaatattaagaaatttgtaggtgtacacgttggaaaatttgtgaatttaaaatagatcaaagaccgcaacactgaaaattgacacacattggctgggagacaacagaagtttttagtttgacttgtctttttgaaccgccgacactttgggctcactacagatcacaagcgactctttttatggctcgtctttttggacctgcgatattttaggctcacaacggatcacaagcgactctgataccatgttaaaatttgaaaagagtagctcattcatcttatatatcgtttttattttcacacatgaacaatgtgagattaactctaatagaaggtgtttattctctcatatttttatattgcacataacaatttagcaggagagaagattttatagccttttttcactatgcttttgcttatatattattctaaggttagtatttgctgctttttgtgaagtaagcatctctaatcaacacattaaatttggtgttacactatcattaaatttaatgtcaacaactatttcttaagaacaatgcttaaccttaagcaatgcactaaaatcatgttgttttattggtttactttgtacagaatattgatcttattcttcttatttgataaattaaatatcccatttatctagctagtctgaatgcatgaaagactgaaactatatatgactgcaaaatttctattattaaaactattctttgactatttcaatctcatagaggtgagcaaaatcatggctagcttttctagtaaccaacattttgatggattttctctgctttagctcacaaataatgcattctttttgttttgaaatgattgtatgaagctaaatatgtt

SEQ ID NO: 318882 - DNA, 1228 bp, Cannabis indica
aaaaaattgaaaaatccagaccaaatcaatccgtgaatacctctaccagaaaacttgaccttagaaactattaccgccaatttttaaagtttgagaactaatctacatcaaccctaaatttttaaggacttttgccataattattcttttaaaatatataggcatttatatatattaaaaattaatgcatcaaactctatattaacttctatcacaaaattaatgcactaaactatttgtagaattgttgagatgaactagaaaagtcataaaataaattaattctcaactcgatattatttattattttttaactaaaagcaaaaaaaaaaaaaaaagaataaaaaaaaaaataaaaactagatctaattttgtttgactctaaatctgctaagttgggagaacttgaactaacttgcgttaattaagataatttttacaaaaatactaaattttgagtaaaaatttacaattttactgttacgcgaaattttttacaaaaatactattttgttataaacaaccataaaataacaaaacagaacaattaaagcaaaacaactgtgaaacaaccgtaaaaacttaacacagtacaaaatataaaatttacacagcattttgaacaaaatacaatatttctaaaaaaattccaccctacaataaaaattatatatatataaaaaaaaaatcaatttatggtgtaaaaaccccttaattaaggttatgaaaaagattaaaactcaaatgcggcagaagttatagaggtccttagtttgaagaactgggctgttgaaacttttttcaataaaaagatttgtggcaacttaataagaaaattgataaaatatttcctcgtttccccttaaatagctttactctttttcactattactattgtgttgtttcttctcatttcaggcacctaaatactatgctacactaaacttacaccaaataataacatgttagaggattctcattagcttctcaattttatcctctaaaatacataactaaaattccattttttttcatttatattaaattacattccacaatacaatttttaaaatacatcactattctttttttaaaaaaattttaatatattttatttatttcacatatataatattaatattaacaaatatctctatataaaaaaataaaattaaaacctcaaaaattaataaaatatgtttagagtaataaataatattctataaat

SEQ ID NO: 318883 - DNA, 696 bp, Cannabis indica
atttgtttattttgtttcttatcaaagttatggttcatgacagatggatttctgaaagaggattctatcataatccatctttatgaattgtgtttatttgtttagaattatcacttttcagcttatgctagagtgtttattcacagttcacaatgatatccaggtggcaagatttttgtacacacaacttgggcttgaaatgggtgtcagtgctatcattactaatggaagggtgagtgccatgttgacatatttattcagatggatgtccatgttaaattgtctttaccatttatgtagttacaatttcttcttcttcttcttcaagaaaacagtatagttatttgcatctttgtagtaattaagaactcgtaagtgtaaaatgaagttattactattataacaacatagtttggacattggcatataggtaacattatctgtagatgggaatatgtttttgagccatgatatgcatcttctggaggctctggagttcaagcaaagaataaagcacattgtggaaattattgaagaaataaagtggcatgatgtggatcctgacacacttacaaggtttattgaaatgcaaactcctcttggaatctcatttttaatgtgtgtgtgcgtgtatataatatatattctctctcatgagatgaagttaatgatgatgatctgtacattgttctttgc

SEQ ID NO: 318884 - DNA, 1188 bp, Cannabis indica
cataaaatggagtacactgtcaactgcaaataagaacaaaaagattattagacttggattaaaatgaaataaataaataaacgtgaacaaataaaatgaattaaaaaacttatgtttcttgcaaataatctgatgacttcctctttgccaagtggcacctccttactctctcagttcaccattctaggaaagctgtgctcattttctgatcgcaaatttctcagcaagctctaggatggactcatatgcccaatactgcaatgctacaacacatccatagacagagtactacgactccttctgagttgttcccttttcaatcttcttatccatatacatcttcttttctacgaagtccttactccaagtatctttcaacaagttgaaaaaaaatttcccccacgggtactggtagaaaaaaggaaggccgactatcgaccccacattaggcccgacattggaccttcaatgtccccgatgaatcaatcttaaatcacaccttaaatcacacactaaatcacaaatcctaaatatatcaataaaatgcattttaaacccaaattaataattaaaaattcaaaaaatccaaagacatgagatcttacctctgctaacattgtgtggtggttgtttggacgagatgggtttaattttcttagtcgtggtgtttggtggtgttcggtggcattcagtggtattcagtggtgttcggtccgtttttgtggtgttcctcgtcaatcggcagtggatgcagtgcggcagagtaggacatcatgggtaggggcagtgggtaggggtcgtgggtgtagacgatcaccatgcggtgcggtgcggtgcggcggaggaggacattgtgggtaggggaaaagggaagtggacggtggaattactatgggtttagggtggatttgagagagaaaggaagtagagagagagagggttgagaaaagtgggaggagtattttggggtttagggaaaactatacctatttgtgcaattttagtatacttaggtataatattttaatttaggtgtaaataatacatagaaaatcaaatttccctaaagaaatagggtttcgttctagggacacttgcaagctaactttattgtttattatttattttttcaacattgattaataaatacataaaaattagcaagctttttattattttattattttt

SEQ ID NO: 318885 - DNA, 918 bp, Cannabis indica
gtttgttattaatagtaataaaataattaggtaattatgtattaattatggtaattattatgtaaggtagaaattgaaagtaaagtagttggaagctttttttctttgtaaaaaaagctgtatatatatgtacggaatattaattgggaatgaagtcattacatccactactttaaaaaaatttgaataaaaatttgggtattattgttttttgtttttattttacaattttaatgaagacaaatttttaatagttaataatgttggatattttttttgttgggagccagatattatattccacgtgtaagtcttagaagcccttagtgtatgtagtgatcaagagaaatcctaaaaaggaacacggtgtataagcatcttttcacgtcttaatatagttattgatttaattaagtatcgagttttataggatttaatataataacttttacaataacaatgctctaaattcaaatgtgtacttaaaataaatattacaacgatctaattcacttaattttttttatttatttttgagtttttaatggttaaaatctctcaaatattgtttggcttgtatttaactttttaagtttaaattttagaaataaaatttttggatgattttacaatgccccctcttaaaaaaatgtaatgatacactcttgacttgtttcagcatctacaaaaaaaaattagtttaattttttttttatattcatgtacattatagctatttaagataacctacaaaattttaaaaaattccgaataatttataatatagaaaacaatgttcaaacaatctattttacacgcgtataaaataaaatagtcacgcctgcaatacactgtttaaacgtagttttcggcgtgttaaacttttccaaatttcttaaaattttgcaggatgtctta

SEQ ID NO: 318886 - DNA, 504 bp, Cannabis indica
ggtatattaagagtgatagttctctttttatttttttttggtgttttctcttgttgggtggcagaactaatattatacaatatacactataaaaaaaattaggatacatatgggtatatattagttaacgtatatactcaaaagttaaaagttatagagatcaaagattaagaaaatgtatttatattataatgataaaataggtgtgtctactctacataaaattattctatatattgtatttgtcattatctatatatgtactcataatttcttttctccaaatgcgcatacaattttataattaaagtcattcttataactatttattataatacggtctttgtaattactttttttttttactttggtcctatatttttttttttttttttagtacgttgttttcttttggtccattaagcataagataattatttactaaggtctcgtttgaaatgccgtattaggtcgtattgtattgtattgtattgtattttatta

SEQ ID NO: 318887 - DNA, 769 bp, Cannabis indica
aaatatgagatttaaaaacctaactatactgtggtcggatgggtaaatcatttttttttgtgcttatagtattctggaatgtttgttatattttttataggttttaaaagtgttgaatttataatttttgagtcgttatgctgctaaaatttcgataaaaataatgcaataaaaaaaatgaaattaaaatgttataacacaacaaaattatattatttatcaaatagtaatgaatcacaagaattaataaattgttaaattatttaattaaatttaataattaataaaataaattaattaattttaaatgaatattatattattttaaattataaattttaacataggttattaatggtttaaatgtaataaaattaattattaattaataataattaatttatggataatgagataaaatcttgaaattataaacacaaataagaaatgagattaaaaattatatattttaatttaaataataagtaaaataaaattataaatgaattataatatgtaatttaaaatttaataagtgttattataaaatttaaaaaataagtaatttttaatttaaataataaattaaaaattaatatcaatatgtaatatgtaatttaaagggccgaatataaaataaagtagtgttcttaattatctccctacttcaaccaattcgacttagcacaagaaacccaatattttaagagttaaaacttttgagagaaaaaaattattaacttactataccaaaacaaaaaaaaaaaaa

SEQ ID NO: 318888 - DNA, 686 bp, Cannabis indica
tgtctctttgcaattgtaagattattagggtgcttgactcattaaggcaccttttgttaataaattttgtttacgcaataaatttgtataattttaaataaaataaaatataaagtatcatatttgtatttttaataaaatataaaattttaaataaatatttaattaatatattatcaacattgttatgaagtacttttttcgaagaggtagaacattaaaaggcattttttaattaaccaaaaaagtaatatattacaaaaataattttagctgaccaaataaataaatatgcagtccaattaaaaaaaaaatcaaaaataccacttacacacaccttcaacccaggatctatgcttcttgggcaaccatcgcgcaacagcaacccaacgcaaccgaataaaaattcaaccagaaagagaacaaccattaatttcggcgacttcatctaagaagacgaccagaatcaatcaaaataggggttgtttcgaatttataaaaaaagtgtagaaaaactactacaaaactaaaattcaaccggaaatccagtttaatttgcataaactaatgtcttgactttaattttcagatctatgaaatgaagatctcaaaaaattaaactagagttcccaaacaatccaactcaagtataatccaaaaaaaattacatcaatactatagtaaaa

SEQ ID NO: 318889 - DNA, 1177 bp, Cannabis indica
acttgtaattttatagtttgtatataattgtatggaggaacatacgagtacgagtcgcaccccaacctagcatataaggcagcatacttatatctgaaacccatcacgctactcttgaacccaaaatgctcgtgtttgaaaataattgtgtaattattatgcagtgtagttaataacactaaaatgtcaaattttataagattttacaactaaattgattctaaccacattctaaaatctatcttatttataacattatctaagtgtcctaatattattagtgtgaattataccaaatctttttatattagtttttaatatttaaataatatatttatacttacattttttgtatatttattatttatatttatttatattttaataaaatagtatactaataaataatataataattttagtgtaacttttagtattatgattggaatagaaaaaactttaatgcgaaaattctatcatttttgtgttggatttaacactaaatttagcatttaacattcaagttgtcctaaagtaataattacataattttttaaaatacaaagtgtattggatatcaagtgataattatatatgtattcctattatcatgtttgtcaagatttttaataataattacacaataaattaataatgtaatatttaatataaataaaaattattaatttttctaataaatatttaaaaataaattttatctatttataatatttaaaataaataaaaatattttcataaaataaataatatttcattttatttggtgtatgataattaaaattaaagtaaataaataatatattaattaaataattaaaattattttggagtttttttattttatattttaaagaattttttttttttgtatttttacaaaaatctacatagcatttcacataacaactagtatagcaacctaaatcgtagtttaaaatccacatagcaacccacataaaaacaactggtgcaatcaccagagcaactcaaattgtcaattttaaaaaaaagttaaaaatagtatatgggataatttctcaatttttttttagtaaataattacaccgacatgagaattagagagagtaattgatgtctcccagttctttaaaattacacatttcattgtgtaattaattgtgtaattacgtgacta

SEQ ID NO: 318890 - DNA, 1164 bp, Cannabis indica
ggaactgccgagatagatactaatctcgacgctttgaaaccaccgaaattggtcaattacgggggagataatataatttttttaaaaaaaaattgtccctgcgcgcattgatagtattgattatttgcatgtataataaatagtaagtatatacatatacaattagttttaaatataaatctatataactaaggttataattgctatagtaaaaaaatagaaaaactatgttggcaaatactcattacagtagttgattcatttttttcatacatacatagtcatgttagtatcattcattgtatagtcttaccattatactgcaatataagtgtaaaacaattttaaactttacgctagttttcttgataattcaaaatttatcaaatttaaaataatgtattaaaataatgaaaaaaaaaaaaaacaaattaccttgagctgagacaatataaggaggggttcccgcaatattatattctgtggatttttgtattttgattttttttacttgtaaaacagagaaaaacagaaatggaaaaatgaattttattgatcaaagagtttagtacaatcggttgctttgtatagagctcacaataacaaacaactaacaacctgaataaaacagacaaaactaacttctaacttcctaactaactcaatacacaacaccttataacaaattaatcttgatactcccccttaaggtggagtgtatacattgcgactttctatcttgtctttgagaatttcgaattggttaggaagtaaggcctatgtgcatatgtctgcaatttgctctttcctggtagtgtgaacagttttcacaactccctcttggaccttttccctcgcgagatggcaatcgatttctatgtgtttagttctctcgtgaaagacaggattgcaatcaatttgttgggctgctttattgtcacaatgtcacaaggcaagtccaatgtgatcaatgcttaattctttcaacagagatgtcaaccatataagcttgcatgtggtatttaacactactctgtattcaacttcagctgaagaccttgagatagtatgttgctattttacttttccatgacactaaagatctcccaaggaatacacaaaacccagctgtggaccttcttgtgtcaacacatgctgcccaat

SEQ ID NO: 318891 - DNA, 1049 bp, Cannabis indica
gtaaaatatttccaacacaaagtacaacacatcttgattatgctatttgttgcagataaactgtaataatacacaatcctctgttcttggtctctagtcaatttcttggttctatctatattgttttatctattttcctttcatttattcatattaattttcaagtttccaagataatgaccctctttcagaatcaaacccaattaataaataaaagatttaaggaaaaatttagttgtaaattcgaagccaacctttttttttaaagagaacaaaaaactacttatttcttatatctttaaaatacgggggaaattatacaaaatgggtcaatatacttgctgaaaggaagagaaattggaggaaactttcataaagaggaaaggagacaaaaaaaaatatgtaaactactcctcaaattttatctgtataaaatataacatttcagacagattaagacaattgtagtagacttgccaccatgggatggcatcttgactgattactaccagaccataaaatcaaagaatcgccaaattgggctactaggcagatttgcatcagtgctacacaatttcgccgatagggcaaggcatggttagccgttgtcgaaagaggaaggacaaattcagttcatattacttcacttattttttttcctctctagggataatcttttttatgtcaactaatatgataatgatgataaccatgaaaggagaatatttaccaaacaaaacaaatgtaaaaagctctattgagtgatgcagagtgtgtgatgtcttcttcatccccttccaacaaaccgtataatcttcatttccactgttttttgcggagtgcccggtttcaagcagttagcaaggcagtcaataaattactatttttaagaagcaaattaaaaaactccatattcgtcttccagttcttaattactttagaaggactaaacatactgttggattttacgccctaaataaaactcatttcaatataatcagatttacttattaatatagataagaaataacatttaatgttgcatggtt

SEQ ID NO: 318892 - DNA, 1310 bp, Cannabis indica
aaacattaagttccttctagactaagtcatcaacatagcattctagcattcatgattaacaacttgtataatccttgatagttaacattcatataaaactatttatcttccttcttaataattaacctcgagactttccaagctaatatactaggttgagtaaacttaagttcgtcatttcttgaagtttccaatttacttccttgagttctgttgtagccatttaatatgctgcctcagaaccacttctgctccaactgccaaaacaacaacaaaatctatctttattatgatgataacctaggaggtttggtcaaaaatacatccaaaaactcttataccattttaatgtctaaaggctgaagtgtgtcagccagatagtatctaacaccatcgttaatgactctatgcatacattctatgatggatctttatcttttattatcgtaaaaactcgtgcctaaaaaccacgtctagataccataatacgaacgagctttcattttcaagttgagaagttactactttctgtttgcaatcatcactagcggcttatttagacaataatcccattctgagtaatatctcatacttcgttatacacaaaactacgaggtcatcattcaactttctattttcaaccctaattggcatagacctgagttatccgtttggagatagctaatgctctgtcaggtcacagagttctaaaccctatttcatatctatcttaaggtctatccaatttattaattattctggctaccacatgttaatgtgtcgttctaaaatcaattaacataaagtcaaatagaacagttgataagaaactaattggacatcattgaagaactatcttcaactttgatttgggtaatggccaacacccaaacatggaggggatttttttctcttattctgatcccttattttgtagccatgaacaatctctcttatatgtcctacttggccacaataagaatatttccaatgcttcactctcccaagtgatgtttcttgcaataagagcactctggataagtataacaactattagggctgttctgatggcctccttacccttgtttcccccaaaacttctttctctgtctcgcaccgactgatatagatgcaacttttctaattgggttaatcaaggaaccattgccacttccttcaagattggaagcaaaagaaactgttaccccattttttgcactctgacgtggcatcacacgatggtgatacgtggaatttgttggaatttattttaccaagatattagatcaactcacaagtatgttgtttaa

SEQ ID NO: 318893 - DNA, 1854 bp, Cannabis indica
tttttttgtttttttttttgaagtgtgaatttctgtaaatctgcagaattttgaacaaaatgaatcttttgtgatgctcctgtttttcatgatttttgagatgaaaaacaataccctagtgttctgctgctatggggaggtggtggtggtgccatcgtggtaaagagcttgagagagaaagggggctgataatgggagaggtattaatgtcttatgtttagagaaaagcctatttcttcagtaattatcaagattggcattttttttagcgaagggtactagatagaatagaaactgaagttttccaagtgaaagtcttattaatttataatgactgtacatgccatgccatatcagcatatctttataaagtaaaatagttattattattttaactcatacaagctgttacagagttctggtacaaactcaactgtcaatttgtggcgggcttcttcatccagtgaggacgagtttacatctgaaaggtatttttcttacccagagaacacttccaagtccgatcggtgttgactttattttatatccctcgtatatttttgtttgagatcataaatatattcacgtttttgacagactagttgattcaccaactagagcaaatcagctagagccattactacattcttacattgattatgaagacagtgtttatggtaatcactgctagctctagtttttttcttttgaaaacatgattaaaaagctcagaattaatgacattttcaatgtaaattacaggccttgcttggagttctcgtgagccttggatctttgcgtcattatcttacgatggaagggtaagcaaattttatattaatttctttcatttgttggatgaattttaaattactagtttccattccattatgtaagttgatctttagtggttgtggataccaattttattgttttataatttgttttcccattgaaatttgaaattacaggtagtcgtagaatcagtaaagccctttctatccagaaaatgagagttccatacaaatggcaccgacgcagttggtcgtatttatactgtcacctcatttacatctttgcgcatttttctcttgcttttggagggcaacaaggatactcctaaggaaggatcagatcatatcgttctagactttgtttattcgacaagtgattttgtgcgttttacgtgttaaattttccatttccttttccttgtatagtgtggtcgaactctaagtgaaggggatagtgtatgagttaaactgtacaataaatgaaaggtatatttgaggaacaatttagaagaacttcaacccattttttgttaggctgcgccttattttgttcgtctattgattggggtttcatgttttaagcttgcatattgaatgtttttcaattcaaaccgataaatgtacccctatggcctcctatttgataagatgacaactaaattcgttctttggatttaaaatagaactgctcttcgatatagcttattgttctcgtcacatatttcaagtggaaaaaacattaaaattgaagatggaagttttcaacttaaaccgtcttagtaacaacttattgggaaattttatagtacactttcaaaaagagagtttaggtgcatcatgtctgttttttcatttttttgagtacgttgtacttatttaagattactttaattttttttaagaaattttaaatagtttaaataaagtttaaatactttgttgcatgcataaatgttttttctaatacgcgtgataaataattatttgaactttaattttagtagtacagtagaacttctatttaggaatatacttagaccaatcaaattatattctaatt

SEQ ID NO: 318894 - DNA, 585 bp, Cannabis indica
ctatcatggtaagatttagcttggtcgacattcctactgactcttcccaaatggctgtgacagacacattaaaatcctctatcgtatcactaagggagtcttgtaatgatgcctgcatattttgtaacacagtgatagcagcctgcatgtcttttgttgcttgctctaatgccctgatgcgatcgtccatctcaggtgcagctgatgatcctgtagcagcatctctcctctctcttgcagctacccgggccaacaagttggcatagtcttgagtcaacgtggcaacttgttattgcgtcgttgttggccctgagttctgttagagccctgaccctctcgtccaggccatctaattcccctatgcgcttctcaagctcttgaaatctttgggtgttgctcaccattatgtcgtgttaccaagctaccctttctcttggctctgataccaactgtcacgggccgcctatttggacacccccaaataggtgggacgtgcggcacttgctcgcacattttgagtgcaaacaagaagcatgagcaagcaaacacaaagtgtccccaaggaccaatctcacacaacccaca

SEQ ID NO: 318895 - DNA, 1482 bp, Cannabis indica
aataatttccaacaacatcttctcgacatgtcacgttgcgattggttagcgatactttttaaaagctattatattaaactatgtaggacccgatactttgttggaccaatagcaattctgacacataggagggtactaggcaccactggtgccttttagcatttctctttgtccttatcatccctacaatagctagcacatgttcccactctccactagaagtgacgtatggcaccacttccatcagctttttgtgccatttattccactaaatagcacacgaaaacactaattttgagagtaatattttcacactaaataggacccaaatctaaagtaaataacatcagattatagagtatagaaatatactttttcatcttgtttctcttttattattattgtaattattattattattattattattattattatatttttacttattttagtgagaaaaataagtaaattagagtaatattattagttaagttagagtgtagtttttgtatttcttatttatgcttcatctatacatctcatttattaaattattctttatcttctaatttttcttataaattaataatatcttttatataagttcagtcatgcttttcttatgtaagttaggttgttaattattttggtatattgattatattgtatgtcatttaccacattctgtcaatagtagtattttgtcgatttatgatatataatatgatatgttataaagttagaagtggttcaatttatgcaagactaattactttgtgtttttaagatacatatttttcaattctaattaatggtgtaaaattacaattgcattttaaattaatatagtatcgatattggaatataattttcataactacatttctaccttactcaactctttatctaatcatcttttctcatcttatcatttaattttgttattttcctctatcacatttattatatattatttactaaactaatttatagttgtgatttgtcttcctgtggatatgacaaaattcgtctattaccgcgcgatcgctgtataacaaattcgacgacatcaaaaaaaaataaaaaaagtttgaaggttcatacgaatcttataggagagtaaaaattacaacacatgatctataaataataaaatagagtatttgattgaattaattactatttttgtctgatttattagttatggtatgtgaattaattaggatgtctcttttaaattatagataatttttccgatctccataaattaattaattaaacaacaatacatgtgagtatgtgagatcccctaaagaaaaaaaaaagacgaaaacaatgcatgtgatatgacatcattatgtcagtccaagcaatattagagcattaatgataagattggatttctattttattttagggaaaaaaacaggaatattctaaaaagagaaaaatattacaacaatactgtgggccggccca

SEQ ID NO: 318896 - DNA, 933 bp, Cannabis indica
tttttagtcacaacataaaaaaaataatttataattagtcacaacttttttcaattttagttactataaaaataaaattttttatagtgaaatatatatgtaactgtaatttaattaacacaaaaataaataatcaaatagattagaactattgtagtaaaaactaaaaagtaaaacatgcataatatattgtaaattgtaagagagaaatatattaatatgaaaaatgaaaagtttgagaatatataaacaaaatttttaaactatcacttaagattcacacattatatgcctatatatacacaactatttgaaagacaaccaaaaagaaaaaaaaataataaagaaattgtatatatatacacacacaactatttaaaaacaaaaaaaaactatctaaaaaatataaaaaaggaaaagaacataaagtaatgaataatggcggcaaaactcttaatattttcgttttggttttactaaaccccacaacctaaatttctgcgggtaaacccccaactactcgggttttgttagtaatttaacacttccgtccaaatttagctgttaactgccaggttagattgttcacgtggacacaatatacacgtggcacaattttattagtccacgtaaataattatttaaaaaaaaaaaattaattattttaaaaataaaaatttttaaaaaataaaaaaaaaaattacctttctttcttttttttttcttttctttctttttcttcttcagtatgattctctctctcttctccacagctacgcccctctgcaactccaaaaaaaactttaaactttccgtcaatggcctggccgcttgaatgctcccacggagaagtcgacggtggtggtggagatgcactccgggatgcgtttcgactaagaaatcgagatctacgcccccaaaactcagatctac

SEQ ID NO: 318897 - DNA, 802 bp, Cannabis indica
taaaatttctacaaaaaataattcttaattttacaaattcaataaaatttatatatatatatgaatattaactaaataataataataaaaaaaaaatatatatgccgtgtctacagtgcacgacatatatgctgtgcactgtagataaaactacaaaatgctgcaacaaatgcaacttccttggaagatatatacacggtatgcaaatcttttgcagtctccttggagctgctctcagtacgtgatatagcgtactccactaccactgcacaaatctataaaaaaaatgaaggaatgaaaagataaaaataccctcaatctgacaacatggacccaccatctgtagtactattgtactattaaccaccaccaactgccatttgattaaacctttttatacttttttgtttttttattaaaaaagaaaattcacaaccggttaataaacctataataaccggttgtcatataaattaaaaaattgatagaaaatattaaagtatcatagaccccactctatcgtacaacaaatcacaatttgtgatttatactgacacaaaatcgactgcctatatatataaatagggacatgattttgtcccgtgattgtacttttacggaatgtatttcgtgatgtacggcagccgttagatgagggagttatttgatctgaaggctgagattgatctagagataattagggttaaaaaatagtaacgtaccctgacactcatctaatgtcagacccatctaatgtaccacaaaatacattccgtaaaagtatatcacgggacaaaattgt

SEQ ID NO: 318898 - DNA, 2059 bp, Cannabis indica
aaaaaaataattaatctttttctcacgttacattggaatggtgtttgcttccagttaaaagtacaatagtcattccaccaaaatggttgaaagggcattccatgggaatgatattttaatactttaaaatacaaccatacaaaagaatggaatgaaaattatttcttttccattctgtttcattacctctaaccaaaagccacctaagggtgtgagtttagggtttagggtgttgggtggctggtgttggatgttggggtttagggtgttgcggttagggtttggggttcaagattctaggttggggtttaaggtttaagggtttggggttttagggttagggttttggagttaggggtttaggttttgggggttggggtttgggattggggtttggggtttggggtttaggtttagggtttggggttttagttttggggttcagggttcggtgtttgaggtttaggttttaggttcatggtgtgagtggttgggggtcggggatttggggtccgggttctgggttctagtgaatgggaaagggtatggaaatgagaatgggaatgggaaagggaatgggaaagggatttggaatgggctgaggaaagggaagggaataggaattcgaatacaaatgggaatgggaatgggctagggaatgggaatgagtaagctctagtgaacaagctttagggtctattcattatgttaaattttttggatctaaacccgagatggtacttttagagccctcttgcccctgcctacctttgtaggtgtcaatggctcgcaagcatgctaccaattattggcgccactataagaccttttaacaaaatgactgggaattgatccaaaacctgatggcgaggagtgttgatctcttgcatttagttagtggtagagagactacgtgacaacaagtcattgaagctttcttccgggcttgggtggccaacccgtttttggtacccaagcccaataaaaaatggctagtatgtattgattttaccaatctcaacaaggcgtgtcccaaggattattttacactcccaagaatagatcagcttgtggatgcaacacccgagcacggggtcctaagcttcatggatgcctattcggggtataatcaaatcaggatgcatccaccagaccaagaacatacaagtttccaaacatatataggtctatactgttacaaagtcatgttgttcggtctaaagaatgttagagctacctaccagaggctggtgaataaaatatttaaagactagatcggacgaaatatggaggtatattgggatgatatgctcgtcaaatccacaaaggctggggggcatatatgacctagatgaatgcttcaaaatcctcagaaaatacaacatgaaactcaatcccttaaagtgctcctttagagttagctcgcgtaagtttcttagttttattgttaatgctcggggtattgaatccaatcctaagaaaatacaagccctcctggatatgaaatcaccaacaaagactaaggaagtccaaaacttaactgtttggatagccacactcagtaaaattgtttcgaagtcaatagacaagtgtgttcctttcttcaacatccttcaaggtaacaagaaatttgaatggacgaaggaatgtgagaacgccttccaagaattaaaaatactacttgcaaagcctcccgtactctcaaaacccctagacagagaagaattacgaatataattggctattatagattacgctgtaagtgccgtgttgataagagaagagaacaacgtccaacatccagtttactacatcagcaaaagactcattgacgctgaaggatggtatcctttgatagaaaagcttacttactacctaatcttagtaacaagaatgttaaggccttatttccaagctcattttggtatacactgaccaaccattgcaaaaacctgatgcttctggacggttatttaaatgggcagtagagttgggtcagtgaaaaataatcaaaggacaggccttagcagattttgtagttgagtgcacgggcaaagaa

SEQ ID NO: 318899 - DNA, 1081 bp, Cannabis indica
ctaagatcctagtaaaataaatatccaacaccagcccaataccatatttctgaccattgttgaatatcgctgcatctacattaatcttgacactattaccatgaggagcggtccaacgctcaacaacattattattattactattagatgtttggggataggtatagaaatctgtagaaacattcaaagataaaaacaaaacaagtcagctctctctttttctaaacctctctccttcggccaagctaagtaccaggagaaactctgattttctcatcaatcttcttcgatttcattgtaattttacccaagttaggagttgtctaggtttgaggtatgttgtttatagccttgaatttaatggtttaagctaggtttctttgagaatttggagggagttaggttctgtggtatattgtttggattagaacctgttttaatgagtattttgagttagaatttaagtgtaattgaagttctttatttcggttttgtttgaagtatcaaacttttattttttgaaacttaaaagcttgagcatcaatggtagatttgtagtttttgtataattctaagctctgagtttcgcaatatgtttagaatattgagttgggttttctgtcgcaaaactgacagaccaattctacgaactggttaaccgattggcctgaaaaactggtggatcgtcttgtaaatctggtggaccagttggttagtcccatgggtacctcagtttttgtattttctcaatatttaggcttttgccatacaatttatcaatacgaaaacttttaattttaagtataagtcttcaaaagctttataacatgacatttacccatttaccgctaatctccgaatcgtcaaacgatttccactcagattggttgtgtaatacccggaattaagaaaaggattagcaaaaccctaactagataatgatgagttaattgaggaattatattattatatagttcaatatatgtgaaattatatgaaatttaacatgttaaagaccccgttggtgagccaggggcattttggtaattatgacccgagaagggtaaattgttgagattaa

SEQ ID NO: 318900 - DNA, 1464 bp, Cannabis indica
aagcacacattgggcctagaaagcccattaaggaaaacaaaggcccaaagagttatatcaaggcccagcctgcagaaagcttgagtcaaattgtgatgtgttatgttattgttatataacatcatcattttcaatcactatcaacaatacatcatcactatttggttgcgttttggaaattacttatcaatcatccactttatttttaatagagcctaactaaggtcactccaatctatctacatatctatcaatacatatctcaaacaaaaaatttccatcacaaaatttccctttcttttttctacttccaattaacctttttctcctttttctcttttgatacttttattactaaataaaaagaaaaaaaaaactacataaaaatgaaaaattgtgattaacattttagcaatgtgatactttcttttctttcacttcaaaagtacttacatggtaaagattttcaaagataaaactaatattaactaccatttaacttagtgcttttcgattattaaagtcaatgggattcgtttttttttttttaaaaaaaaaaaatcaagataatatagaatgcctattttatatattattctttggtcccattgaagctgtgtcttatcaattgcaaatcctgatcagagcccaccacaatttctggtttgttttggcttaactttggtgttgatgtgtttattttagataaattattcatgtatttttaaattaagagctaaagagaaagaaagaaagaagaattaaaataaaaatggtccctttagatttgacttaatcaccaagcatttaggcttaatgggtggttagattaatcttgtcttcatcagtttgaacttattccaaagctcagcacatattacagatcattatcaagactttgctttgttatttcttgaatcatcatagtctaaaataaacaaggataattttaaaaataatttaggttataaatatacttaaaatatggctaaattatcattctaggtaaaatatggttaaaatgtttcaaatggtgtcttcttttgagacaaaaaaaattaaaacataatacttattttgagacacaaaaattagtaaacaatatccgaattgaaattttatatattttttttcaattggaaaacattacaaaagtaataactgaaaattttagccatatttgcttgcttcagggccggttctaagttaaggtaggctaggctcgcgcctaggacctacttattttaagagtccaaataaaaaaaatatattttaaaaaatatacatatttttttataatttttaaaaatactatttatttttatagtaaaagtccaaattttttctatgacccatttcaaaccaacaccagctacactaaaatgatgttttgatcattgggttatataagtcttgtaatatacttttgtttggaataattacataaggcaccatttttttgta

SEQ ID NO: 318901 - DNA, 1987 bp, Cannabis indica
aaaggaagaaaaaaattgtatataataaaaaatattttattttatttaaattgtatgtaagaaaaaaatatatgagaatagaatatacattttatctattaaattttgtaatataattgtattatatgtattagactttaaaattacaattttctttatattaaaatgttaattgtatatattaattttttaattttgttataaatatgtgtggattggattggatcggttacttttacatgtcaatcaacatccaatccgcacaagtgcggattttgaattttccaatccaatccaatccgcacaagtttggatatccgcactttgcagattggattggattggatcggctattttatgaacacccctattattaacccacatatgtgtgagtatgttaaatgcctacatactcgtgagtatgttgaaaaactaagtccgaaagttgccatgaaaggcaacaacgaggacaagcatcttaactagcatattgaataatgcgactagtaatttctgaacaccattggaagacgcgagccatggttagagtatgtcatctcggtagcagttattttatccacatgttgtaaatatgaaacgtgaggattatctacgtttcatgagcggttacttagataagatcaaaaaaaaaaatatctgttatttctagaactcctataaatagacacaaaacttagggagaaatagatcgaacattctctggaaagggagaacttgtgagattgagtgaatatttgtatttattcctctataaggaaagtacttttctagaaatattcaaaaataagaatgactcatggagtatgtagatttaactataaactacataaagggtctttgttctatatatattaattaagtacgattatttatttatttttatttttacaaggcttcatttattgttaataaaatctgaattaacagtttggtgctttcactgagaaccttagcaaaaataaaactcgaaacatatctcccctttatttcgttacattatggaaaatactcagtgtgatgagcctattgtggaaaaagaaacaacacgacgaccaggaaaagagcctcagggggcacagactcaaaccaaccaaggaaggggtcccactgaaaggaactccgagagaagtgaccctgaggaagaaattcctaagagaagggaggtcagatgaatatgacccacaagatatgtccccattgtcgagttaaaaaatagacaactgcatcgaaggttcgcagagtccatagaggaatgaagatttggaacaggctatggctatggccagagcaacctagaacgatacaccacctgtacaagaggaacaacctgcgcaacgatcgagagggaggccccgtggttcgtgaaccagaagggcacaaggacctaacactggagaataggaaccaaacaatcccactcaccccaggaacaacagctaggaaaaacaagagacattcctattgatgagcgaggcatccagaattagggtgccacgacctcgcgcaaatgcgaatgaggggacaacaaatgtctcaaagaaatgtttaaaatacaaatgaacaaccacctaactggcgtggttgcgctccacgtccaccacaaggacataagagaggagtaagagaaagtatgtatacatacctgaatagagatattctccaatttatttgaaaggcgaaaacttactcaagaatcaccacaagaatccaagactaatacagcccaaagcagatcggtgagttaaagatagactcaatctttgaggtcatgtacatgggaaaacccactgcatggggagagaacacctcaatatgaatatcaaggcgaacaagacagtataagtaactttcaaagttaccaatcaaacagtatctccccgagtcgattgtgagaaattatgataacagataagattgacaccagaagtgttggaattatttttaccagaatcttagatctactcac

SEQ ID NO: 318902 - DNA, 1257 bp, Cannabis indica
ggatccgagtttagggtccatggtccgagtctgcgtttgagttcatatctgggtctgggtttgaggtcagggtccggagtccgagtccgggttcatggtcagggtatgggtccgggagctccaaaatgagtatttggattttgcaaattttgtttccaagtcaccatcctttagtattctgaaccaacaagtaaagaagagtccaagtctgaagcctcaaaacaaagaaacgacgaatcgacatcccgaaagctagcctgggtgcctaaggtttctcccacactactaaaaaaggactttaatctcgatttttagggcattttaatcctatttttgctaaaataagaactaagatatatgcaagtgagataaagaaaagtctaaataaaaattgagataaaaggttaacttttgatcccggttcttttgaaaaaataggataaaaggtacacattttatccttttaaaaaaaatggaataaaaggtatttccactttaaagttgtatttttaatattgtatttgtattccccaatcactctcctcaataattcaacattgtatcttttttttaacataaaatttattattttttcacacttaaattgttgcaagtacattcatttatttttcgacgtatttcttgtaattttttttaattttttttaatgaaatacttacaacttacaaatatttattataagaaaatagtaattattttcttcatcatcacataaccatgaatatatatctctcaacaaaactctcacacctttacaaatacataaaacatcaatatactatggtatgaaaaaagatgaataaggatatttttaggctcaaatgttagtgtatagggttaagaaaataagatgtgaacaaacatttaggcttaaattggctaaaattatggatttaacaaatagggtagactttaaattgcctatatcatatctcaaaatcatgtgtaattcatcaattttgcctcaaataattatcaaacaagttctagagtggttgagattttaaattaaaagtcaagcatgcacttacctttttaaaccttagcaaatatgatatttcaaatgatgtgcaaaagttttaaaaatcaagcttgaaaagtaattaatcatgagttgagcacacatatcatgagaatctatcattttttcttagaattataactatcacacaattaagaatttcatcatcaataaaattacttttcacaagatcatgcataagatatcaaagtaaa

SEQ ID NO: 318903 - DNA, 2310 bp, Cannabis indica
ggtccgcaacatgcatttttgatttggttgtatcctgaatacgcgtacgacaaaggaaaataattgaaacctaggtagcatccaccatctggttaatcctaggcagttggaagcaagtaggcaagctttgttaaggtacggtgaaatcatacatatccaccacgtcccatttggcttgggcactaggacagggtttgccaaccactccgggtaatacacatcccggataaaaatgtttgaaacattttattcacctctttctctagggcgtcaaacttcactggatctagcggatgccttttttgttgtaccaaaggcatgttgggttgacattcagaatatgagtaattacgtgggaacttatcccggtcatgtctccatgacaccatgcaaatacgtctgctgacaccttgatggtatcaataatcttgcttcgctctttcagatcgagaccctttcctaagcagatgaccttagttgggttctgatctcatattacctcttcaatatcctccactggttctaatgtagtttcaaagccaatgcaaggatccaacatgtcttgtcttgatgaggatgccacctcaatcccttggattgcaaaaatgcatgggtgtactgcatgattataacactatcttgcctcaccttgattaccccaaactgttcctatcccagcctcttaagttggaaacttaaggcacaagtgcctaatggaagtgaccactcaaaagtcaactaaggctggtcggctttgaatggcattgcaagcggtggggcaatctactaccacaaaggtgcaatgcttgaatgtactttgtggagtgtttggccatagagtaatggggagtctaacctttcccatagaaacgagagtagttctgttaaatcccgtgagttttgaaccgcttgaggagaggtctcgatcagtaagcccgatggccatgaaagcctcttaaaataataggttcactgaacctccgttgtccaccaatattctagccacaattttgttcgtaatgggggtttcaatgactaaggagtcatgatgcgagaagtgtaccggcgtagcatcttcctccgtgaaggtgatgggttgatccataagtcttggtctttgggtcaaaagctgactaacttgtcatatctcaccatcatgctccaaagcccaggcataacatttcaactcatttcttatggtccctcctatgtgaggacctctggagatcatggcaacccttccattcattcagggaggttgtccgggcacttgctgatgaggtatacccctaggaggtatctgtccttttggtgccattgctggtcccccttgaggtacttgggatccagtttgtccgggattcaggtgtggcaacctatttttgatccattcatatagatggcctaatcgaactaaactctcgatttcatccttcaaatttttgcactcgttagtgatgtgaccgatatcgttgtggtattcgcacctcttgctagggtctcttcaggagctatcttggtacaaaggaggaggcttccaataattagtgtttttcctggttgcaaagtacactcgttcttgagtatccacatgcttcgtatattgtgtatattgggggtgtaacctctgctttatctcttatcctcaggttgggtgctaccttttgaggatctcttgcttcaagaactttggggggctcctgccatactagtggctagtggagattgaactgggagttgtgcagccatctcggtaatgggattattagattgagccagagcaagagtgagttttgagcatatcctggggtcgccgaaaactatactccgcttgtctgtggtgtaatggggaggacagctctaggaggttgcgttcctggcatgtatcctggcccaccagttggataatacctgttgtaagcaactatctgtgcctcttccaagttgatatacttttggaccctttttggaagtcttggaggctcgcagctcctcactgttgtagctcattccaaaaaggagttttggttcgtatcccagcttagagtagtggtaattgttgtccatcatcaacttttttggtttttgaggcctcttctttgaatctttttatgaaattctttagggttttcgttggcagttgcatgatgttagtcagggcacttacctcgagattaatcttcctagccaccgcgaactttcttcgaaaactgacttggaatttgttccaacaatctacagatcctggttctaagggtgaaaattggtcggttatggtcggtttttacaattttataaccgaccggtcgg

SEQ ID NO: 318904 - DNA, 974 bp, Cannabis indica
aagaaaaaagaaaaaaagaaatactgttatatttttgctaggcaagcttctgatatcatatgattgttacaagggttgtctttagagcttttgcactatttatccaccacactttgttgagtgattaattgtttttcctttctaaaaagctctagttggttactattgaccactgtttttgagtgattgaagtttttaaaagggttattgaacctgtttaacatgtttctatagtttaagtagtgtctatgcccatcaagggttaatttttgtgaagtgaaagttgatgtgccttagaaaatatccctttggtgaagtgatcacatgcagaacttgattccttcaatcatataccaaatatattttttctttagtcggtcgaacaaaattaagtttcatatcccttccatcactatatgtcatttcagcaaaccatagcctctatacatgactttttttttaatggctggttgatttcagcacagaagttacccatcacttctaaaatgcggaaagtgggtaagctagctatgatcatgatcacttgaaaagcgtaatttttggatgataaatggatatttgagtactaattcgattcatttttggagagagcttttcttttttcattcattaactttctcattttttatttacttttatattagtaatacaactaaaaaaaggagatacatttttttttttgaataaagtaaataattcattagacaaataaatctgctaatataatggacggaagagcaagtggaacatcactctcggtaaaaagacgacctaaccaataacaagcaccacgtgccatactagcagaccgtttaacatgaccaatggaaacattatttaaagaagataaaataaattggcaatcttgaacaaacaaatcgaaaataaaaggcatagagaccgaactaagaatggcttgaacaactaaaatgcagcccgtcttaattatcaca

SEQ ID NO: 318905 - DNA, 1074 bp, Cannabis indica
aaaagttagctcatatatcaaaaaataacatccaaattcgaggatgatggaatttcacaaaaagtttttcacgaccctactctcatttgcgagaatatattctcccgtgtttagttcagctcattatacacagtataaatcgggacatactttttagatttcttttgttttttcttgtcttttgatgagtctttggacttatctttcctttttccatgtggttcgtggctcttactcgtgttagccatgtttgccttggcattacttgagctaggtttatttcttaagccatcctttaacattttcaacttagactgagcttcttcttttctgacatagatgagagccctttcattgaactcatttattgatttaactgggcatccttgaaaatgatcccacagttcactgccagtagtagacaaatcattggttatcctggcctatagtgttgtcaattgaatgctatcatttaggtttttgacctttgctactatcgtactaaagcgacttagaaatgctttcaaagattctccaagctactatttgatgtttgtcaaggatgaaacttttagtctcccatccctcgctgcttgaattgcttattgaattcttgagacaattgttcccacgaggttatggaatgatttgtgaatttatcaaaccaagtactcgctgctcctgtcagggatgtgggaaataatatgcagcacaagttatttgagacattatttgctcgcattattatattaaagttatttaagtgaacaattggatctgaggtttcattgtattgagcaacatgtgggttcttaaatctttttgggaattgtgaatttagaatattagggtgaaaaggttctaggtcttcatccgactcgtaacttggaagttttctatactctccatcctgatatttcctaaatcaattctccaattgaattatcctttgttggatggagttatcagtgggttggttagtttgtacaattgcttgttgagcatttctgttcaatctttcccttaaaattgttggaaattatttaccaggattttagatctactcacaagtat

SEQ ID NO: 318906 - DNA, 750 bp, Cannabis indica
aacaagccccaagagcttggtttgacactctcaaaggcacattagtttagtgggatacaaaaatagcaaagctgatacaagcctgtactttaataacatcaatgtaaagttaacactaattctagtctatgttgatgatatggtcatcacaggagctgattcatctcacattcaacatttaattattgatcttcaaaaagcctttgctattaaagttcttggacatgttcagtatttccttggctttcaggttaaaagaatagcttctgctcttcacttaatgcaacaaaaatacattagagatcttttatccagaactcggctccttgattcaaaaccacaatcaatcccaatgtgctccacaaccaaactcattgctaaatcaggtgttcctatacaaaatccaaccatgtacagaagtgttataggtgctctgtagtgttggattttgtgccctaaataaaatccattacaatatgatagttatcaatttaagatttttgaagtgattatgttaacatgtattttacatgcttatggtttaatatacatatttaatatatgcacaaaatcagttaagtccagaacatatatttattcacaattacaatattgtcaacacagtggaatgtgattgtgattatatgattcaaaatactaagtccctgtttcatcagtgttttggatttacactgatgtgataatcagcgatgaagtatatttacacttggaataagtgttatgttcttt

SEQ ID NO: 318907 - DNA, 669 bp, Cannabis indica
aaattttgagaaattcaaaaaaattattgacagtttgaacattaatttctatattgtaaattattctaaatttctcaacatcttactagatatcttaataactataacgtatacaaatgaaaaaaatttaaactaaaaaaactttataaatgctgaaatatttaggggttacaacagtatacttattttagttggtgcattataaaaccacccttatatatatgtatatttatatatatactttaaggaattaagagtgttgttgattgtaatattatatataattaatattttgagtctttaattaattaatattaataataatagtttgcaggatttttaattatgagctaatagtgttgtaaaagaggatcttcatttttttctgtgatttttaattatgtgctaatattattattgtattttgtagtcaatcaatttctctcttttaattaactagctataataatgcttagagaaatactaaaaggtgtattagtgtttgccactctcattggtattgtactactattgatgtaattagatatcgggtcctatatagcttaaaaaaataacttttaaaaaatattgttaaccaatcgtaagatgccatttataaaatgtgttgggcaccactaacgcccaataacaatgctctaatgatatata

SEQ ID NO: 318908 - DNA, 1581 bp, Cannabis indica
tgatatgtggcccctgcatttttgagcccgaagggcatggctttgtagcagtacaggcttaagtccgtcatgaatctagtgtgctcctggtctggcgaatgcatctttatttgattgaaacttgaataagtgtccatgaaactcaagatttcatggcgagttatggcatctacaagctttgggaagtggaaagcagtcctttggacatgctttgtttaggttggtgaagtcgatgcatactctccactttttgttgggtttgggcaccttactgggctggacacccatagtggatagaatgcctcagttatgtagtcatgggctcgtagcctctcgacatcatctttgagcacttgggcacgatccttgtctagcaacatcctcttttgttggacaggtcagatgtttagattaatgttgagcgcatgggtcatcatggaggggttgagtcaaaccatctctccatgtgaccatgcagaaaggtccaggtttgcccctagaaatcttatcagtgttgatttaatttttggtgttaaacctttcccaatcttcagtcttcttgttggggaaaaagggatcaacctccacatcttcaaaatcttctataggtctgaagcttcctacaggatccccaaagtaaggatctatgtcagtgtcctcgctttgggctcgactttatttccctttgttgggcttgtcttcttgtcccttggtgggcatcttctctttcttggctttggacaaggccaagttgtaataagtgacgggtagactgttagtctcccctcatgtatcctaccccatgccttgttgaaaatttaaggcatcaggggtagaaaggtgttaccgccttcaggtcattaagggcagatcgaattatcatggcattgaaggttgatggaacgttaattacaatgaactgcaccatcaaagttttggtggttagattttctccaactgtgaggggtaatctgatatacccaacatgtccaatgccttagccaaagaagccatacatcacctggttatagggtgtcaggtcattgagttggagccccatcttttcatatgtggacttgaaagaatgttggaggaggctccattctccaccatgcatcttgctatggtcatgttcccaatttgtgcagcaatgaccaggggtcgttgtgtgggaaattgacttgagtagtgtgttcttccttgaaagaaattgtgggctctgtaagctttggttgcttagagcccttgtcttcaacaacatggatgttgcttttaggcttatgacggagttttcgagcatagcacctgttgcttcgatggtctcaccgtaatttagggtccgccaatgatgaaccctaagtgtcctaccacttgtggtggcattggatctctattttaggcaccttgtgcataagtttggttgttttgtacataacaatgtaggtggccattgttacgcctaatgaggcattcaatctccctattcaaattttgacactcaatggtttcattgtcgaatttgttgtgaaattgatagaactttcacatgtccctcttgctcaactcccttttgatgggagg

SEQ ID NO: 318909 - DNA, 1464 bp, Cannabis indica
ttggaccaaatatgagcagattggaccactagagaagtatttcagttacttactactaccattttggaagaatgatgagattctaatggaagtatttgaagatggtatttggggcgcaaaacacatggcttcttgcaatattcatactcaaaagatcaaaaatgttgtttttgatgtagatagaaaactagagatatcttatgattgggtttgtttatatgaaaagagtctggtttctattaggaggtagtgaaggaatttcagttccaaaaaaatatgtggtttggctctagaattggagagactaaaatgttatttgtttagtttgattttgtgatttacacattatctatgtaattaagtccttattgatgcctttttgagtttttcttttatgctttgaaatatagtaggctgatactcaaaagtatgaaaacgaaaagcaaaatgctaaccaaattgtgacattaagagttaagacctgaaaaagttgagtaatcaaaactagtctccacaccagacgaaagaaagcataatgcaccacttaggatttttcaggaaattaatcccattgagtctactgagctgttaaatattgtacctgatgttggttaggattagttgagttagtttagttagttttatctgttatgttctgttgtaactaactgtttttcaattagctttcttcactcgatgaactctgtatataagtccatgtatacatgaggagatctctcgttttggcaaagtattttcttgcctcacacttaactttaacatgttgaattgttacattagtctagtagatgttatgttagttggttcctaaggcttatgtctataaagttagttgttatgtttctcaatcagagtcagtaatggcaataaagttcaaaatagtataatgtacacgtaaatcaaataatatgcatgtaaatgactgtttgaattactataaattattttaaaatttctcattggaaaaaaaaaaagaaaacaatttacaatataccaaaattagacatgactataggagtttaattataattgatttaagaattttaagagaaaacaaaaaattgaaagtaaaaaaaaagagagaaattgatgtttacgataatgtttgtgcctagatggtttaagaataaaatataacttttatttaagtttttaggaaaaagacacaaaacatcagaaaataacacataagtcaactctcagttaaaatcatagtaaggtctgtttttattgggccggactttaccaaacaaatgtgttaccttgtaaataacggcccacagatttgatttgtacaaagtacaagttctaattgtcccacatcgccaatataacattactttagagtgtttatagatccttacctcagccttattgattgtcccttcggctgcgcaaggatgacacgcacaaatcgagaaatggtccaaatttttttttgaa

SEQ ID NO: 318910 - DNA, 1171 bp, Cannabis indica
accaatagctctatatgcctaatataacaactaaacttatttttttaacatactctattccaatcttcttataacacaattctttttggcaaacactcctctcatagtccttatttatgaaaataagtacaacatatcaaaatcaaacttaaagtcaatgatataattacacctcaaaaaatttccttcaaatttcccaaaaatatcccattggaatcctacccataaaattctaagagatattcttctaaacacaaagaaaatttctagtcacactaaatttgtacacccaagatgtaacacagcataaaacatgtaaaactaacatgaacagattgacgaaaacttacagtacaatgagtcgagctcatctcgtggcgatgaaccttacatgttacagttgaccaaaaattctttaagaccgtattgctctgatacaagtttgtaacaccccgatttcccaagacatcacactcgctagtctgtttaaaactatttataataaagataataaattaatttattaaaaataacaaaagcatgagatctcattattttaaaacaaaacacttgattcatttataaattttcgaacattaacttttacaaaagtattcgaataatcatcttgaattaaacaattaaaaccaaaacaccgtgataacccctaacatgttgtacatgcctcgatctcacatcctcactgtttcatttttctttttacctacacactgagtacccgtgagataaagcctaagagctatgtaggacccccccaactagataacatagccataagtataacaatgtcacaacatcaaatcaattcataccatacttgcatccatatatcgacatgttattctcacatacgatataacggtgtaattttaatgcatgttataaacacacacataatccacagtatcttattgaacattgtcctcacatatgataatctactccaactcatgttgttcagacatgaagtgtaacctgccctaccttgtgctgttctcacactcggcatctaatagggcaatcccttatcacaagttgttctcacccatgataggataacctgcaagtaaacccatacaagcagccaaaaatatatcttaccagtgctatgctaacacacgcacgagaaaacctatcctataagtgctat

SEQ ID NO: 318911 - DNA, 949 bp, Cannabis indica
gggggagggacttatttaaattttaaatttttattgttttttttttagtttttgttttgcgtgttgataagtgagtcgatgataattgattgattgaactggcgatgtcattcgtgaaatggattgaaatcattaaccatgtgcttaattcgtaaactttgtagattaattggatgattattgaaaaaaaaaattattgatgtaaattatcaatatttggatagtatcatttttattctactagggattgtgaaatgtttgcttggaatggaatagaacacgcataacttattttattaagacaaattcttgataactgttgcttgaaaaatgatttatgtaattttttttttggggggattagttgagcctttcaagcttactcttataattttgtccctagtatacgtaatttgagcctttgcttgtttcaaaatcttaaccacttcattaagcttaatttgttttcattatctactttaattcccaatgtaccttgttataccataagcttataaataagttttggggagtgaagtgttatgagtagaattattttggaagtggaaaattgagaaaagttatgtaatgtgaaagtgacttcatcatcactagaaggaaaaaataatctatatacaaaaagaaaaaaaaagaatatatccaaaaggaagagaaaagaaaagaaaagaaagaaagtatcaattcttagaaaaggtgatgttgaactggaaattaaaaaggctcaatcttgtaaaatttatgtgggtaaatattgagaattatggaattatggatctttgtgggtgcttctttggttagaatgtgtttatggtataatagagcctaaatgactttttatctaagccatgacattacaacttagaaagaccaatttacccagcaaggattgttaacattagtggagagaggtaggtcatgcaagcatatt

SEQ ID NO: 318912 - DNA, 845 bp, Cannabis indica
gatttttagaacaaaaaaataaataaaaatacaaatgaatagaaaattaaaaaagaaagtaaatattagtaaaataacacaaacgttgttaaaaaaatatttacaaaaacaaaaaaattataatggtgttgaactagtatgattttcaaaacaacacatttaaattggacttaacataaatatattgttcaagaaaaaaaatacttatatatttatctttcctcatctccataatatcatcttgtctattttaatgtactctattttacatgtagtatccatctgtgttttaaaataaggtgtataaaacatgatatcaaaagaagaatatctttcatttcgtcaaaaaagttaaagcaacatgatttaacatagataggcaaattgtagaagatatatgtcatgtataatataacagtagttaaacaaatcaagtcatctttttttgttggtggtgtctagttcataaataaagtttgtggcaatatgttaacgaatattttcgttaactaaatatataagctttttacgtaataaatgtactacaaagtttaataataataataaatgaacatcatatattttacgtagttttgcagttaaaatctacatactccaagagttcttcttatatggaataaaagatgataaaataatagcaaaataaaccttatagtagtcggccatgagataggccccactaattatattttttcccttttttaaccatttatttatcatttctcaaatatcatattttccaattttaatcctataaattccaaaactatttatttaataattaaaatcaattatcaaataaaattaccatttaatttatttat

SEQ ID NO: 318913 - DNA, 782 bp, Cannabis indica
aaataagtattattgaaaacataagttaccaatgtgttttcagaaaaaagatagagtactaaatgagcaaatttttatgttcctaaagcttggaaattgtggggtccacatggttttttaattggttgttcatttccagaaactcgattcaatattgatttaaaatattgacgggttaattacaatcttctattataatttctagtaaattattgcattcaaatcacatgatggaatatttttttcatagcgatatttgttatagttataataataggcgtgctactggcaacctcatattgaagagtgctactttatatcatattgtaattagatgttcgaaaaactttaaatttatttttgacactgtaaactattcaaaattttctaaaattttcacaaagatgatattgtaattatgacaaacaccgttatgaaaaaaaaaaattgaaaaagacatattttggcatgtgttttttggcacatagattgactaagaggttgtaatatgaagttaacagtaacacttctcttacaatattttcctaaagaatagaaagtttcaatttcatgttttcagcttttttatataaaaagcttaggaacgctagcattttatttattttaaattcaacacaaacttaacactcaaatttactcgatgtacttaatattattttgtttttattgtaagcgtatctttagtatattaaaagtgcctatctaacggcaaattcttagtttaaacgtatcttttttttatttttagcctttacacgtat

SEQ ID NO: 318914 - DNA, 1093 bp, Cannabis indica
ctcaaaaaaaaatgtaatatattttttggacgctccatctaatattcaatctggtcaaattagatatttaaaaataaggtctactctaatttaattaaaattagatatctaatatataatagtcagttgtagtaattgatagaatttttaattttatatgcacacctctaaactaatgcaaagattaaatacttctatatatataaatatatatataatatttgtatgtatatgttatgtaatatgtagttgcccttttgttaaacaacttgtaaaaaagattgaccaccaatgtctcacaatgccaagcaactcatcatttgagttgaaggccggtcccaaaaactattattattattattattattattattattattattatatataaataaaaataaagctttttttctctcttttttttgtgagatgaccttccaaatggaccatgctagttaatcccaatttttgtctacgagtttattgtttgttgttcttgttcaaaagtgtgttaaagattttaattaattaatgtttgtaattttattttatatatataaaccttgaaagaaagatagaccatacgtaactaattgagtaaggttggaatgaataaataaataattattagtagatttgtacaaattaagaggtatatatatttatattgtttttatatatatatatattttatttgtattatttatatatttatatatatagttgctttcattagacttgtcatttatggaaaaagcttctctacaaaatccaatgagaaagttcttctttaaatgatttgtatgtactctcgctaattatataagaataagaaattaaaattataattaagctcttgtgattgtcaaacaaaaaagattattctatgaatatatgaaggtttctttattaacttattattaaattaatggaacccaaaaccatgcagatgtaagccctgacgggtggaagggtaacatataataaggtgtatgtgttatatagcatatatctattttgtgtgcctatataacagaatttttggtttatgagaaatttatgggtgactttttattttatattaaaaataaaa

SEQ ID NO: 318915 - DNA, 729 bp, Cannabis indica
acctaaggattctttggcaggcattccagtgattaataattgggctttaaggtattgactaagcttgttgactgaattagcaagatccggtctggttagagttaagtattgcagagctcctattatgcttctgtacaggtctagtttttcaaatggtggactgtcattgagagctagtttgttggccaaaatcatgggagtagaacattcttttgcatcttcaaaatgtgctctatccaataaatcagcagcatacttggattgtgtcaaatataaaccagaagaatttttgtaagcctcaaatcctaagaagtaactgacggatccaagagatttgagagcaaatttgttgttgagagcctaattaatcttgatatggctgctgtatttccacctgtgattaaaagatcatctacataaaccagaaccaacaataaacatccctgctgatgttgaaaaaacagagaggtatctgagatagaagctttgaatccctaactaataagagtggttttgagagtatcaaactaggccctgggagcttgctttaaaccgcagagtgatttgtttaattgacaaacataatttggtttgtcaggatcttcataaccccggggttgttgcatataaaatgggctcaagattttttatagtatatgttctacgtaaagtttgttggaaattattttactaggatcttagatctactgacaagtatgttgattaaca

SEQ ID NO: 318916 - DNA, 1412 bp, Cannabis indica
gttggtcagtttatagattttttttttataattgggcgggttgcacttaaattttagcaacctgaactttagattgggttagaaaatatataggataaaccacccaaaccgaccgatgtacaaccctaatatgctatatgtgaaattcaatatttttatgatttttgctcagtaacgatgaaaaatgcgatggatggacgatagactcacatgtgttagtttagaaccttttaatttagtagggtatttttatgttgatatttagaatatcgggataaggcaggattatagttttgaactattttacccctaattcttagaattgcttaagttttaagggagaaaatgggaatttcacctaagattctagttttgtcttttagtgagtttttttcccgaagtttttattctgaatttattaaggaataaagctttattttcttttaagttatatcattagataaacataaactaaaaataaaactttatccaactctctgtctctccacctcttcggcctcaagaaaccaagagaaactaggggttttttccttctattctcagtaatttcagctagttttcaaggagtttagaagccaaaatctatggtatgccctagacacttctattctttggtttttggaagtttagtttttagttcaagcatgcatttttgaagttttgattctgctcgaaactagggttaatttgggttgatttttagagttattttacggtttttaaagcttgtttaaggttattttatgggttgtttgttgagttgagcaagtttgagttcaagaactcaaacttggctcaacaatggtggtttttgtatttttgagtattttgaggttctaccacttcgaacttgtttattgtggtatgtattggtgatatggagcttagtttaaagtttggggtcgttttgagttaatttggagactctttgttttctgcagcaaaaaatggcaggctaatctatgaaaacggtctaccgtttctactgcaggggtccaaaaaaaatggcttgtcgtttttatagaaatggcctaccatttttcaggtagatttcttgtagtcttgcatttttacgtttcctcaatatttagggctataccatgctatttatcgataagaaaacttctatttttaagtttaggtccccattaagattttaccaacactagtacggtagaggtacgaagtacattggtacattatatgatgttcaaagggtaaaatacagtgttaccaacactagtacgagatgagtacatagtgcatgtggtacaacactttgtggtactcgacgtacgattcagccctaccaacactagtatgggacaagtacatagtgcatgtggtacagaggtcgtacttctattaagaactgtaaagaccgcttagtt

SEQ ID NO: 318917 - DNA, 1198 bp, Cannabis indica
gcggtgtgggattgcacagcttaccctgtatttccccttatggatcacgggactattgactgtcataaaaactctctttttcttctctctttccctctctcttcatctcatattctcaatggaaccaagaaccaaatcgcacccacttctggagccattatcgcactccacaaccggtgggaaggcctactgcaacacacgatagccaccgaagaaagaaaaaagaatcgagagccacgaatcgcgagagccaccgaagaaagaaaaataaaataatgtcccccacaatctttgtgtttttttgcttattttttggtaacaaattaaagttttggtgaaatctgtgttttctaggttctctgtaatttttttttatcagggtatgtgttaggatttatgccctaaaagcaaatatttgatggataatatattataaaatacatgaaatacaagtataagataaatgaataggttaattatcaaaatataattaataaatatctgaaaatttcatattcatatagagaatgtatgatcttgtaaggaagtaaaagagaattaagatcatactatatgaatacaataagttggtagtgtattaaagtatgaaatttttaatatagaattaccaattacggattactaagcattatactttagtgcgtgtaattttaattcagatcacatatgtgcatagacatttaataaaagtgtactatgtataatttgattttgaatggttggatcgatatgaacgaacatcttttatcaacgtactatttatcataaacgagttatccatatcacaacgataatcattagtagatcagtctaaatcttgactattcatgaactcatctttgagtctattaggttctttgatttagtcgttaaagtttatcagagaagataattcttacaactttagttttgggaacctaataacatgagtggcttggtgttaggatttatgccctaaaaggaagtaattaatggattatatattagatgaatatatgaaatacaattataagataaatgatatattaattatatgagtatgattattaaatatcaaaaaaaattctattcatatagagaaggtataatcttataaggatgtacaagagaattatgattatatgatatgaataaaaaaaactcggtagtgtattaaagtattagaaatctttaatat

SEQ ID NO: 318918 - DNA, 887 bp, Cannabis indica
atgttcaactctttattaataatgagaaatgtctttataggtttttcaaggcataaaccctaaaagctagtcttcctccgaaaaggagtttcagacgactagttattccctactgaaagggagtcccggatagtcgactccggctaccgctattgatattcggaaagtcccttcagcgtacacttcagtctatcttatagaaagcgtacgactcatccgaaaatgctttaacttgagctaacatggagatatttctacgaggagtttgttaagtttgttaattcgtaattaactcaacaacttatcatttgtagccaccaatttcatgatccatatccctaatctataaatacgccatcacttatcactttgaaagacaagagtttaaggagtgacttcaaagttgaagattgagacgaagagagagattgagaggtaaagagattgagtttgggatttgtatgaagaatcttcaatagatgaagaagattcttaggtaagagcgtgagagattaaacactttgagataatctaaacaaaggatcgatctcaactgtaattgatagttcttgctcaatcaataaataagatttcagtggtgtttcagaattggagtagagccatagatcacatcgatctaaaagacttgaactaatatctatcttggtgttgattttattgttttattgcttcaatagtttttggttgtgattactctgttctctcctgttttatctctgatgtttgtttgtgaattgttaatttcttgtcattgctaattgtttgttgattaagtttttagttgattttgattagttgtagtttttgttgggttttgtaccctaataaaatccatttcaatataatcatattactattaataaaga

SEQ ID NO: 318919 - DNA, 987 bp, Cannabis indica
cccatatgttatagtatattaatattaattatactaacaaactttagtgtataaaatatattgtagaaagaacttggtcgtctttttcttttttagtttatttattttaataatataataatttaatgtacatagtaattttcttaaaaaaaatgagattaaagtagggtttatatatataatatattaagtaatatataatttaaactaatactatatattatatataaatatacttgaatttgtctatgtgacaatattttgtctgtttgtcggcctatcaaagcaccgggaatattgctttggtgtttgcctctaatttacttttcccatttttattttattaattactaatttaaatttaaattggactttattctattctatgtatgatctcattatatattattatttatactttaaaataattaaattattagttatttcatattttagtgtttcttatatatggctacgtcaacttcgtgcagttcttcctaactttaattattctttatatatgtatataaatatacatttaatcgttatgagtttatattatttttagtagtctatatgagttttaatttaatttcacgatactatttctatgttgaaaaaaagaatattgagcatgcatgtttaaaatcaaatcataattaaaaattttccaaagtatgttttacttgttaacttgagaaaattaatgcgtaaattttcgactaacaatctagcatattgatctctctctctatatataatattatattagaaaaaaatcaaaatacatcttatatattatatttaaatatatatttaaaaaaaattataatggtaatagacacattcttaatttatagtaattagtctgaaattaaaatgtatatataattgacataggaatatctttatatattaaaagtgcctatctaacggcatttcttggtttaacagaatataccttaaaaataaaagaatattctgtta

SEQ ID NO: 318920 - DNA, 1473 bp, Cannabis indica
ttttatttttaataataaatcattttatttttaatataaataaaaagtctcccacgaatttctcataaaccaagaatttggttatataggcacactttatatagaatagatatatattagttaattaactaaactaacatcatgaaagtgtaaaatttgtaaaataatcacatttgtttatactagttattaagaaataaaatgtgcttcgcgtgcagttgtattttcttattaataattgtttatcgagttttttggcaaccgaatatttttagagcttaagaaagtaatgatggtataaataatgaaatgacacacaaattttttttacgtggttcaagcgttaactatctttaatctacgagtctattttattaggcacgtcggttgatgaatgtttatacaaatacaaatacaatagacttttacttctttccactgtgttcctcttaaagaagaggaatcttagtaggaatattctgaagttaatagtatggttacagaaatatttgtgcacggggtgatgaagaataaatcttcgatctaaaggagaaggtccttctcttgtgctttctctggggtatttataggccaactcttttgtatgggctgtcttggatggatcaccgtagggatgaaatcctaccgttggactggtaggtggaatatttctcatgtggcattttacgggtgttagatcgtaccggctgaacaggctgggcctaggacgcgggtcacctcaggatcattcctatttgaattttccttattcctacccattggattatttagctcagtacacaaggacacacatgctctgtatgatagcatgtcgtgagggacaacttctgacatcgtacatgaaaagcctggtcactgggtccgtagcctgacacgcgtgggttgagttttcccaggccgaaagcataccctggactggtgtatcctcgaatcaccttggcctttctgagaggatccatatcccttgcaggagcaaatggcctcagctcctagaatggaatgagtcgttggttcatgggtttcgttcacgtggccagcagtcagggagccttcctttcacggagacctttcccgcgaggttaatgcctttgtctttccgaagcgtcaattgagggagtagggcagtgaatgaatctttggccttttttaattaacatctacgtcccatgcttacaaaaatgcaggtaacaataattaaatcataaaactacattaaatttcaaattttgactttttttatataattttttgttttaaaaaaatgattatatgaaatacaaaccagaaaataatttaattttataaaagtcttgattttttaattattttgaacttaataaataatatttttgctttaacaaatatacataagtatatctactatagtcatcaataaaagtaataaaataccttttaccacctctagttagaattctatttaattcacataaa

SEQ ID NO: 318921 - DNA, 598 bp, Cannabis indica
atagccagtaaaatcaaataaatcaattaagagaattgatattgggccctaagagctatctagcaccatcatgagggctatttacaaataaatagccatattttgtcaaagtgattaaacatttcatacttaaatatacaaatagcaactttagggcatctttaaatagtaaaattttagagaattctcagcagagtgaatatattatatggcaaaatattagaatgatataccattaaagagaaattgaagagaaaaagttgtcattgtaaaaatttgcataaatattatgttatagtcaagagcagaggtaagtgatagcttaggggcccggccagattctcattaattttgctatgtagttttatttcaaatgttactaagtgtccacccctaactataataatgaatgtaaaatgttttcaaagaacattgaaatattgtttagtagtatatttataggtcatatattatataactaggcaatataatcgcttttcgtgcgtcgatttaattatattttaatataataattaaaaaagaattacttatgaaaataataaataataacttaaaaaaattaatctaatatataata

SEQ ID NO: 318922 - DNA, 2193 bp, Cannabis indica
ttattaggggcggaatagtccgcccctaatagtcctttatttatatattcatgaaatccggttcatctgagtctcattctccattttctccattctccgaccccaaaccccaaaatcatctattccaacctcaccatcattttcaccggtgtaagggccggccgcctatcacagaggtgatctttctttctctttatttcctattttttatttcttttttgtgatggaggttttggtcaataggataatatttagggcattggttaataattttctataattcataataaattgtaatattactttaagggtgctaagcactgtgtgcatggacgaagccacatgcaaaccaagtgaagtggtcaccccatatgaaattttactcaattttaaatattttgtgcttaaaagtaaataattatttttagcctttataccaatatcaatcttgtcaaacattataaaattgtattgtttgatatagtggtaagtttatatgtaaagtttaaagagatcacaagtttgtattatgtgcccttttaacatttctctaatatttagggtggaggagttgtttttcgggtgaggtaataacaattgtactattgtgatagtagtgactattctacttaagtttgtattatgtaatgaatattatatattaagtattaatttatttaataataaatatgtttcatacttactaatgaatttgttattcttagtataaaatgtctacaaatgttgcaagtaatcacagtggagaagataacagtcagaacctaatagatcctactaggatcccaaccacatgcaagacctctggtattttttctttttctcattttgattatactaacgaaataattaaaagttgtatgtatgtatactaatgtagttcttttggtattcaaaagaagaaccaataggtcccaacaaaaagagtcttgagctaatttcagaagatagaaaatcagttcttaatgttgatcagattcaaaaacttaaacatgtgcttggtgagaggagaagttacattcgaggggttggccgcatatcaaaacgtaaatcttcaatctattacactcagcacattaaacaatcgcttgagaaaatacaaagattgaaaaacttggagggactcataagtgaagtgcaaaagcaagttcaacacattactcaaaagcttcaaaccaaggaacatttaccacaacagaaaaagagagaggagccaattcaaactcatgctcaaatgcattcaactaggccgtctcaaataccaccaccaccaacaccattgcagcagactaagcctcaacccgggcatacaactgaggaagtagtaggtaatgttatatttaagtatttgaagagcttttgtaatgagtgaccacataaaaatttaccagagctaaaaattaaagtaactaaaagcatcttcaactggggttgctcattggagcggtctggccacatatacaatgtggttcaacttttaagacaagttttgagaatatatgtaacattagtgctctaacattagtgtcttcaggtaatacagtgtgggaaaagcttgaagaattctgtacaagcaacgagctcaagagaagagctctcagggtaattcttcaatacttttaaatgttcttcttttcaattttaatgagtcacttagtgatgacatttatttgatttttttttacctctttttaattttgaatttacaggaaattgctagttatgtggaagaaaatgatgctagtataatgaaattctttaatcgtatggatgttaccggtagaggaaaggttaacatgaatgaactaattgctggattcaaagtttcagcaagtccatcgattgaactcataatgaatgctgttagtactacaacaatctacgtattattatggtattaagttttcacatattattaatacgagactctaactaactagaattgtatttatagggtgatgtaaatgaggatggatatttggactttaaagaatttgtgggcatatttgttaggctaagaattattggcaaggatgagaaacacattcacatagcctttgattttttcgacaaaaacgaaagtggatacatagaaatcgacgagctacgacattgtttcattgataaatttgaagaaaacgttgaagaagttgttgaagccattatggaagatgt

SEQ ID NO: 318923 - DNA, 876 bp, Cannabis indica
atcaaactgagctttggataaaattggccactaatcacatcaagaccaatatcgatgctgttcgagaaagaaaactcatatggctttggggttgtggctcgagatagctctggaagacatttacacattaaagtcgagtactatctactcagcaaaagttgtcgaagctatgggcatcaaagaagctctaagttggatcaaacacaagaagtgaaaggatgtagagatcgaaactaatagcatgctcgtcgttcaagcaattcgtagtaatcaacaaatatcctctgtctttagtttgattattaatgattgtaaaattttattttcttctctaccaaatatttatttacattttgttagacgatcagtaaatcgagttactcattatgttgctaggcactctttgtacttatctagtcttagcattcttgagcatgatgttccttctaatctttagactcttttgtatttacaatactaaatgctaatgaagttgatatttcataaaaaaaaaataaataaataaaatattttctaaaatgttgtataaaaagtaaaaaagatattttcaaattttgtaaatttttttaatagaaactagagttcctaactaataaaacaaaattcctcattaagaacttatcaattaattaagccaaagctaatatcaaatcaaatgaggtttaaatttaattacatatataataattagccattttattaactatatatttatcatacacatataaatctgctgatcactttaaaagaaaaaagaaaaacaatttgctgtaaatttgacattttaagcttaaaaatgactaatggtgtttaattataccaccctcctaaaaattttgtaactatcctaatctt

SEQ ID NO: 318924 - DNA, 874 bp, Cannabis indica
gagatgccatcaaatgttgcataacatcaaaatcaatggatctttctatcaagaaccttccaacaatgcaccatcgatcatcataatcattccccgtagtatcactagcatcgtaggacaagaccgcctcttcttcatcgtcgatacgcgccatattctccgctacctccattcgttgataactgctcgacgccatggacaactgaacaaacccagaatcaagaaccaataactaacgccagaaaccaaaaaacaaaaccgatgagagaaactatagaaccatgtcaaaagacaagacttttatatgaaaacccttagtttaataattaattctgcattagcagaaacaaaatcagtaaattgcctccctaaaattgtcatccgtccaccgtcctctgtcgagcgcctaaacgagcagggaagaaactccatcctctgtcgtcgtccaacatggatagcagtagcaagaaaccaaacgtccgtcatcgactgcgagcagaggagaaaccaacgtccatctgtcgtcaccaacgagcagagcctacaatcgccgtgaaccctccagagacgattgagttgtactccctgaatcggcgacctgcgagagaaagaaaaccctaccccttcgtatacgcaagagagagagagaaacccataagcttcgtatacaatctatctatatatatatatatgaaggagaaatatgaggcggtgacatgtcaccccgaaatcactctaaaagcctctatctattctcttctttattttctcattttttattagctttattaatattgatgattgatatttaataattttttattcatactttttaaaaactgttaattaataataatttaaaaaattaaaaaaa

SEQ ID NO: 318925 - DNA, 1283 bp, Cannabis indica
aaaaaagtcatatatatttagcaccacaccaccataaacatggattgtatgatcaatttatgatattttacacacatatatttcaaaagggtctttggccaatgacatttccatgtggatcataattgcaagagatgaatatgtctccattccaacaagtgactttagcacaaccaaccttggtagtatgcctccaaaccatctgagtatagtgaaggcactcttggttatcaatacaggaattagagtgataatcataataccttctttcatcaccccaatctgccactgcatcacctggactccaatttttcccacttccccaaaataagttctcaccataatcacctcccgagtggaccaacgagcaatcgccacgtcgctggttggcccaccaataggcgtaattcgcaagcgttttgctccatctgagtggagggagtcctagcttggatctcaaaatgttgtgtggagtcaaaaattggtcaattgtagtataggtgtacgaggttgtggttagttgatgactaatagattcaatgttgtgagttgagagtgagaaagtgagagaaaatagcaaagaaaatgggagaaagattgttaacccaagtgaggataagaaggttttcttgatcatattgatgatgaagaagagagagagagagagaaagaaagaaagaaaaatataacttaattgggagttgatatataatacccaagtgtttagtttgggtcttttatacatagtaagatgagagtgaagactagagtgtttagtgttgtggaatcgtttcacatgttgagggccatagcttttcataaagttgaggtgtagaacatgttatggaatgtgaagagtcggtccaaatagaagtgaactatataataataacaataaaaataaaagtgaaggtgtataagtttcatttattcaacttccacaactactttcaatcatttgcaccttagattatgacccaattttttgcaattattgtgtatagttagtgatgatataagcttctcaatattattatattggaatatttcagagtagctatatctataaaataaataaagtcatatttgttttaaaaggatatgagtggactcgttgaatttgattttatatagtctaataattttctgacacacaaaaaacaaaaaagtcttgtaattttaaaagcatatccaaagaaacaccaaatttgttgtgacattatcactaaatttggtatcaaaaagtatttctactccaatcataacaccaaaaattacactaa

SEQ ID NO: 318926 - DNA, 1584 bp, Cannabis indica
tgtatatacttgctgttatagcataaatctacatatatagcagtagtcgcactcattacttttattcgtatgcgtttttaattttgctttatatgatacaataatcgcaaacatacaacatttgtctacagcatttgcttttacatatatatgtatatatcttaattcagatatccaatccgcagatatatatgcaatcgcaaatatatattttgatggaagaccataatactctatatattctcaagaactaatttaaggaggctctgatattacatgttagaaatactgtaaatttgtatatagctctaattaattcatgagaattaaacaataagattaaggaatagcggaagcgtatcggagtcgacctttaaatgatctttaattggtatgatcttccaatttgcatcaaaacctttctctctaactttttctcttagtgatggggataaaagagtgaaaagatacgatactgcaaattggggaccattaccgtttatattaccaacagacaaaattgttggtaataattattgacaatttctatttggctcctcatcaaattagaaattgtccttatagtatccacatattaaaatcataacaatcatgcccttaagtcataaactttattccaaaaataaaccacataaatttgacttatttatttgatgacacaacacacattttatatatacaattgtgaccccaataaattctaacacatatttcttgtattcaaatactgggtggctactagctattgaaattctaagatagttaacatatgcgtatcacaagaatttataaaatataatattataattttacatatatttagttttttatatgtacatagaaaccaactaaattaattgagggcattaactaaattataggaaaatgagcctaattgttagtaattgatacatatatatacgttatgaaattttagcattacttaaaatataaaacttgagcctaattaatatatataaaattataataattatcatttatcaatactatatatgtatactcggggcttaattagggcggggagtaccacacctgaatctgccccgtccctgatccggggaatgaaaattttccgtacccgccccgctccctgccaagccggagattccccatcccattaggggcagattctcgcgggtccccatccccatggagcttttgtgtatccctaggtacagagtaaactagaatgggagtttaggtagttttgtctccaatatttctttttttcaaccttctcaaaatagaggaattaaattttgaaaatttagaaggagaaaatctccctccacctctcctctcgctttctttctccttcttaccaaataatatattcttcctctcctttcaactctctctccatccacccatccctccttccaaccaaacatagtgttaatataggtgtccatcatatttacttacaatttaggttagtttgttattgtttggagatagaaaaaaggggtaagttgaaaaatgcctcttttattcattaattaatcaaatttacctctaattttatatttatttgaaacatac

SEQ ID NO: 318927 - DNA, 795 bp, Cannabis indica
ttttattattttattaaatataaataaaaagtcacccatgaatttctcataaaccaagaaatttaagttatatagacacactttatataaaatagatattttggtaagtaaacaaaagtattaatattactccattttaactaagcacatagcgagagcattacccgttaacatatactataattcattacatattaggttgaatctcaatttcagtaattctcaagttcaatgctaatcagaaatattagaatttaaagaatattagaaatatttatatgtgaataattttattaagctgctcaatgaccagcttgttttattattattattattattattcttatcttttttgtctgtcttttttgttattgttttaatatatattatggctttattcaatattattatgtctctttttttctcccccacaatttattctttattttacttagtagtaaatgcaaagtatatttattatataaatatacacaatatttttcaaaaattaaaaaaaactacaccattttcttcgtttgctcatttatatcaattgttttactaatatttactattacaaattatatgtaaatatatttttaactttttgaaaaaattataaattgaaattatgaaaattttaaaggataaatgctattacaaaaataattggttggactatttattttgttaaattacaaaataaatcttatattttctaaaatagtaaaaataagatcatgaacttaaatttttgacaattttttttaatataactaacttgaaagcaatttt

SEQ ID NO: 318928 - DNA, 1055 bp, Cannabis indica
ttatcactaaaaataatttttgtatagtattattacctaaatatgtaaggtcatattttgtccaaaaaaaaaatatcgactttgatgctatctatttcaacttgcaaattcgaagattctaattcaaaaagagaagaaataacaaattgagaatatatatttttttcatatgtatatctataacattttaacaatcaaaaaacaaaaccgaacaaagaaacgacaacttataatgtagaattctttttctccgttcaacttgattttgatatcaattttccatacacgtacaagtctttgtacgtttcatatatatatagatcgaccatatatatatatatatatagtcggtgtgttttacccgtaaagttcattgtccttttatgtgtacgaacacaaaattttcattcttccatttcattagattcttctgaaaaaaaaactaataataataataatgaagtctatagcatatatgtacatataatgacatgtttgtttgtttgttttagaagaagtgtggtaagtgctattagagtaggcatctttctagtctttctactacgattgatagattctctatctcttttaactttttctggaattgttgttattaattatattttcataaacctgtcgaaagaaatttacactaattaattttaacatttagtttctaagcctcttgaccagttttttgtctcttacgatgtattttacatttttttttcttcaaatttatttttatcaaagaagtagagaacaaatctcccattactagaggtgcaatgaacaaaggccattcatgtatatgagcaatgacgggacacgtgtaaaaacagaaaagacatgtcatcaagggcaggcagaggacgctgcgaacagatcaagtgccctttctccatattttttaatttttaagtaagaaaattttatttgtacttataaaatttataaagccacaatttttattatatatatatatactaggtgattgttacgtgccaagccacgcagtgttagttttatttaatattttagttttttattttaat

SEQ ID NO: 318929 - DNA, 1063 bp, Cannabis indica
gacctctctctctctctctcgctctctctctctcttaaaaccctctcttgattttcaaatttgaatttgtgagaaactagcttgaattgatgcttggttgttgggaaagtgtgttggaagcttgaggcttgattgtgcaagggattgaggtagtttttatagtttttatcttgtgattccttcttgaaccaccctgagcttttatggtttgcagcagccgaataagaagaagggggttcaggaggtggagtttgtattttcttcaaattctattttctcattattccactaaatgaaatgataaagttaaattattttatctaataatggccagctgccacactaaaaaccaaccacttaaactccaagtcaaaaagactaaaattcccctctcgtaaagcttaactagtaaagtggcctaggggtaaaatggtctattaccaataccccacctaatttcgacattccaaatgtctagctatattgccctactataattaaaatacaatctatatgaaattgtgagtctattggccaaacgtcgtattccaatgttaccagcataaaatacgaaaaatatgaaatttcatatataacgtaaatagcacacctagaatttaaatatatctccataaattcataaatcataactaaaagtctaattcctgaattaaaccctaattatctgctaatttatcatactaaaattaaactgtctttacattatatttatagagagacattatgtttagggttatatttaaatggactgaattaaagaataaaattgtgtttaaattcacccctttggctgaactcaatgttaaggcttatgagtttgaattttgatacttttacttctaaaagtgaaacaatcttttctatcttcagaaatatcatttatctattctagttatttaaaagctaactttatctatttaataattataattaattattaaaaaaatattactatttaaatatatttattaattagaccttccaaggtctcttatttaataattaaaccttgaattctcttttcttctcaattatgttctcc

SEQ ID NO: 318930 - DNA, 2835 bp, Cannabis indica
ttccactacgcattgagatttcaatttgatacttcgaacaacgaggcagaatatgaggccttattggctggtgtgagaatagttgaaacattaaaggttaaaaatctcgtatgctttatcaactcacaattaactgtaaatcaagtcttgggagaataccaagcaaaaggcctaaaaattgaaaaatatttagagaaggttcgaaagaacttggaaaagtttaattatttgaaaattgaacaaattccgtgagaacaaaactgtaatgccgatgcaccagcaaagttggcaatgcaatacaaactcgacaagttgaatttggtaccagttgaattcttaagcgaaccaagtatatgtgaaaaggaagaagtcgagatgataaatacatccccaacatggatgacgcctatagtcaaatatctattcaacgaagaactttctacagacagactgttgtattcaatgtctcgctatacaatagttgaaggcaaattgtacaagagaggttattctatgcctctcttacggtgtgtgttacaagcagaagccaatgaaataatcaagaaaattcacgagggcttttgtggagaccatgtaggttggcaaagtctatcaaagaaaatcatccgtcaaggatactattggccaacaataaacaaagacacacatgaatttattaaaagatgcgacaaatgctagagattttcacatatacctcgcacaccaccaacagagttgagaatgatgacctcaccatatccatttacaatatggggcattgatctgattggggcattacctacaaagcgaggaggagcaaagtatgcagtggtggtagtcgaattcttcacaaaatggacagaggctgaacctcttatttccataacttgtaaaaaagttcttgattttgttatcaagaacatcatttgcagatttggaacaccaatcaagatagtatccgataacagaactcagtttgatggtgaattgttcactgaattctgtgagaggaataaaattattaaaagcttctcatcggtatcgagacctcaagcaaacagacaagtagaagttgttaattaaacgttaaaagatactattaagaagaagttggacgctgttaaaggaagatgggtagacgagctatcacaagtgctttgggcccattaaaaatagagaaaatagcgacgggacacactctatcctcattggcattcgactcgaaagcaatgttactaaaaattacattgcgacccacagacgtgaattctatataaagaagaaaaccgagaacttctaaatctgtccttggacttactgaagaaaggcgtaaagagtcgcaaataaccaatgcaacttatcaacatcgaatgacgaggtatttaacaaagagtccgaaaaggctctttaaggctggagtttggtgttaaggcgtgtatttgcaaacacgcgagattcggctgctggagtgtttaatccaaattgagaaggtccttatgttattgaagctattgtgggaaccgatatttacaagttggcttggctctacgactcgctaataaaaaaccactggaatggtgaacatttacgaccttattactagtaaaatataatatgtgaatgtttatttatctttgtaataattaatgcttattataaataaagctaaagtttgttcaagtaattacaaagtgtatttactttaaaattaattcgggagaatatacatgtgtataataactagaatccacctagaagtatatactgtattgcaaacccaaaaagttaaatttttttctacaaggaaaaggataattgatcaaattgtctattgacaataaagtagcagttgtcaatgagattaacttataaaaccataataagctatatgtgagatgaatacttaacgactcgcattattcaggcatgtatcataaacgaggcacaaataagccttgaaaaataatacgtaagctgaaaaatgaatagacgatttaactattcataggagcaatcaaaatatattcaaaataatttctgaagtgaattattcaaaatattttaagtttgctctaaaatatatatttttatacaacgaattagaactgttcgcatataacaaggcaggttaatatctgctcacaaaaaacatggtagattgataactacttgtacatctcaaaaaaaaaaaaagagatcaaagctacattcaactcaaagtatcttaagctaagtcgagaaaaaaatgttaaaattgtgaagagacgcaatagaaaaacatttgaaacctcaaaaagcaagatacgaggcataaagagaatatataaataaactatgttggacatccaacatagcaaaagtttttacaagtgccacaaagggcaaatattgtctcggcttggtggccattttactaaaagtataaactatatatataatgactaagtctacatagtaggagacttagttggttcttcttcttcttaaacctcctcctctgcattgccagcgtcctcttttttggtcttcttgcaatgtgctagcatctctcaagtcctgtcacccagaaaactaaaatccatctcgggattggcaaaccaagcttggtaaattgatcgcctggaaattttgttgaccctatttttggtgtcaactttagccttttcaagttttctttcagcctcggcttggatagccttatttgcatcctcgagttctcaaatcttcttcaaggcattttcaagatcggtctgttgggttttgtgccctaataaaacccatttcaatataatcagatttactttttaataaagatcagaaataacattttatgtt

SEQ ID NO: 318931 - DNA, 1223 bp, Cannabis indica
acaatggatatcgtgtgaaatcaatttcttgttaataactttatgtaaaatagcaaacttttgtcatctttgatttagagtctagagtagttgtgatgttgctctcaataatattgatgtgtaaattagcaaaatatatatatatatattaatgtgtgtgtatatatgtatatttatatatacagtgagaagtatttaaataaaatagtaatcccatacagaacactaataaaaattaaataaacatcttacagtataataaaagaatattggcaaattaaagaaagaaaaaaaatcgatttaataaattaatcacacaaaattatgcaatgttgagagataaaaaaataatattgaaaaaatcttataattaaaaaaaactttctccttcgatttttttagagaactcaatttttatacaaattataattgaaagcaaataaaaaatttctagaacaaaactttgaatacttacaaattcctccaatgtgtattcatataaatgtactcatatgtgcattttgagttgttttaaaggccaatataaatgagagagagaacaatatatagtataattaaacaagcatgagttcacgtgctaacatagtgttagatatgacatactgttagatatggttgatctgattcattctctttttatagctatgaaataaaataaaatatacagggatatatgtatataggcccagttcagtctacaattaaaaagtagtgtcttatttatttaataaatcatccttgaagagattcatgtgattcaggaggtgaagttatttgtatttttgaaaaaaaaacttttaaatttcttatttttgtttaatttccttaccaaggtaaatatgtaaaatttgaacctaaaatacttaataagaaaaaaacccttagaaaaattttaccattcgtgcataggcgtatacggtgtataattgataaggtatctgctgtttgattttttattttattatttaattaattatttaaacaaaggttgtttaaatatagtaagtttaagttaggatatttttctaaactaatttattattattattattattattattattataatatttagactctattttaataaataagaatactttgactatatatactataggagacgtctatggtagacactctttatgacatgtttacttaaagggaatgggaatgaatggtatggtattgattcccataca

SEQ ID NO: 318932 - DNA, 661 bp, Cannabis indica
attaaaaaaaaataatcaaaaatcatgatcttgtacttcacttgatttgattcttgatttagaataatcgtacggtttaaaagtgttttctgaatattaattattacgtaattgtttttttttaatggtagagttacagcctttgataaatataaatatatatataaaatatgagattttatatattttttggtttttttttttaagagctaaagccaattagtgtaaaactctttgtatttaataataaatgtaatatttcaaatcagtttcttaattttgattggtttaggcccccactataacttgttttctttatttaattatttcctttaagtatgattgattttttttttaattttaatatcaaaagctgtgtatgtagtgcaagtaaataataataaaaaatgatgtaaaatcagtttcttaattctgattggtttaaggctacaccaacttgtttgttcacttaatttatttgatttaatattattattagtggtccgaaagtggcaagagttgtctaaccaatacaattatatcatttagtaatggttggactttggattatctaatagttttgtaataaattaagatagtggtgggttcaataataataataataataataataataataatagaattagtattttatttt

SEQ ID NO: 318933 - DNA, 651 bp, Cannabis indica
ttaatataatggaagggaataatccaattttaccctttttaaggtatcaatattactttttttaagtgtaattatattactaaaggaaaaatattatcatattaaatcttcaaaacaaacaagtaatgtttcacattactattcctttttactagtattaaattgttatttttctttttggggatactggcaattaatgataataatgtggaacaagctgaatatgaagaaacataggggaagaaattataaattgaaagatgtggaatgatgataatattcttagcatattcaaaggtgacgtggttgagatgtgtctatcttttccaattgcaatagtttttaaatctaaatctcttctacttataaggttgtgaaagtgacatgtcatctatccacatcactactccaagttttataaataagaattttgatcttaccaaatcacataaacttgcacctagaaaagtaaggagaagaaagaatattaaaattattacactataaattcaatttacaaatagagaaatattgacctttcatttgtattagagaattgttaaaaaatattattgcactactacaatgttagcctttagaggcagttttttcaaccccatttataaaaagggaagctaaagggtgtgaaaa

SEQ ID NO: 318934 - DNA, 495 bp, Cannabis indica
taaagtttttcctaggcaataatcactttttaagctggtaaaaaataatactattacttgcaattttaaaatgtgaacacaacaagctcactattttccaaaatccaaaggcaaaacttcttaaaccattctcaaatataaaaacaattatcaacttcgttaaaaaagaaagtaaatattattacttacctcattgtctttaccttcttgttatccattccacactctccaccattaaactagatcaccccaaaatcaatttcatcaaaaaatttcccctccatatatatgatatcttgtaaaattaactcaaaaaattcaaataatttttcttattcagactcattattttattatataatttttctatttatataaaaatatatatattttaaaaataaaatagtagaactagaaaaggaacacagagttaccttatcttttttcccctaatgaatgtatatttattagagttagtcccacattgttaatgtg

SEQ ID NO: 318935 - DNA, 663 bp, Cannabis indica
gggcataaaacccaacagatgctccgtcagtgcttgttctagaaaacgctcctgccaacgtgcaaagtactttaacttgcacttattttccttgatttttatgtcttcatatattttatgtcatcttttgactgtattatttttatttcgtccagaaatgtctcagaagatgattgaggctttgaaaaaaagagagtagggggagttcgggcttgtcccttccggccaaaaagtccaaaggtggtgagacttcgtcccaagagaaggcaccagttgaagaggtcattgatctctcaaaggagaaaccttttgtggacccttccaccttgaaagtcaccaaatccaaaggttcccgaggatagagtttgaatagaccagagcaggctaagactgggtctgagcttgtcaatggcggatttgaacaagttaggcccctgcccccactccgatgttatccacggagaccaaaagaggcaaagacatgcttaaccactatgtagctgggtcatttttggaggtgaacgagcagttgactggggtggacaatgacttgtccttggagttggtcctgggaggagttttaaaggaaattttgcgggtaagtcctttttaacatttttcttttattcttctttgactagtttagattttaatgtatttttt

SEQ ID NO: 318936 - DNA, 1189 bp, Cannabis indica
gtgaattaaaaaattaaaaaacaaaagtgttaccaaacggcacctaagctgttataggaataattgttaatttgtccttatacagtgttccaggcaacactggattttggttcataagtaaattcactcatttgtcaacaaaacggagtaaaaaaaaaacatcccaccctgactttgtagatttgtaaatttttttgcttaagttcgagcttgagattttaccctatatttggaaattagattttagaaccaaaaaaatactactataaaaaaagtctttagaagcaattattttagctgataattaaaaaaaggaagttaaggcatcgacatagtgagaagcattagtaaaggacatatgtcattgcttatttgataataattgatgtcatagatacacgctttggctaacatgtgttacctgagaaattagaggtccaaggtgacataaaattatggggttctttaatttttttttttctcttttgaaaaagaataaaagaaaattaacctttaaaaaattttcacataattaattatataaatgtgactcgtcttttattttgttgtagatcacgaaagctttgattgtgaatgaatgattaaccattaagtaggatgagaagatagcagtctaaaaacgaatgggagagttgaatgtttaagaaaaaagtgataacctaatttctagaaagttctatttacaaaaatatgggaaaatgaacatatgttttgatatatgtggcataaaaacttaattactctaaatatgatatattttttaaaaaaaaatacttacaaatatgggaaaaagtcacgaggaatgccataaaaaactttaaatttgtgtttctttttattttttttattttttttttctaaaaataaaacactaaaataaataaaaaatgatctcaagatgttgtctttttttttacaaaaattaaacatattttttttatttaaactactgtttgttcttttttttttattaaaaactaattatttcattaaaataagcagaaaaaaaataccagtttcatcaacatcatcctgaaaaaaataatataaaaaatataatctaaaaataatacaaattttaaaaatcagtttcataaacattgaaagaaaacttttaaatttcattaaaaaaataaaaaaataagtttcattatgttattacaaattt

SEQ ID NO: 318937 - DNA, 586 bp, Cannabis indica
ttaggtactcataaaagttaatatcgttatagttttacataaaaatatagcataaaatataattaaatataatataatacaatgcagtgcaatacggcgtactaaacaaattctataaattcatattattacgtactaatattccttccttgtttatatatattatataatattatcttctattacttcatgcacgtaatgtacctacaaaatatatacatgatgttgatatatttatatactatattgggttgggtggaaatatgtaatagaataatacgatgcatgaataataattaagacaactgcaacaaccatagaatatgaaaagatgaagctggttaagcatgaggatgttagaatacatatatatatataaattatcggaaaaatttagataacactaaatagtgggagtattcaaacacatcaagaatactcactagcaattatgcaagtactcgcctaaaatagcgagtactcaaagtataagttacgaaatagataaaaacgaaagcataattatagagaagacaaaagaattatagtggttcagttatgttaattccatttttggcatatttaa

SEQ ID NO: 318938 - DNA, 1029 bp, Cannabis indica
tgagtcaacttgtttgcagatcgtttgacaaaacacaattcaacattgtctaaagataaaagcaacgcacgaacatcatgcactaaaagaccaaaagaagatgacatagaaattttactttgaatagcttgtatgcataccaaactgtctgattccaaaatcacttgtccccaattatgccgatcaatccaacttgatgacagagagattaagatcagtggataatcgttctacaagttttctagatcctttgagttgttgatataactaatgaaaaatcagtgtgttaagttgttattccacttcgtcctagttataaactttggtgttgatcaatataatgattatgaataattgattttttgagttattggatgatatatgattagcagtggataatcgttttacaagtcttattttataagccaggacgggtcacaagaggtgttgatcaatagaattgattttgcaccaagaataggagttctcttaatcaaaaagtagtacccttattccaacattagcatactcaatggcgtacctaggattattatcaattaaaactttggctcctaaaaatctgcatatatcaagacttgcaatctcaaacgagaatcgacagaccgaacccaaaccagaaaaccataaacaatctcaaaccaaaaaatttactctcaaaccagaaaacaatggcaaaatcaagaaaaatctcaaaccagaaaacttaaactctcaaaccagaaaacaatggcaaaatcaagaacaatctcaaaccagcaaacaaaaaacaatcacaccatgtcacaaaagacaagacttgcagacggtggccgtcgttgatcggcgatgccgaccgatggcgtacggacgtggagcgagaggaagacgacactcctgtggcttccattcctgtaggtttttttcgttgtcaaacgtgaagcgagtagtagacgcgatattttctttatttttatatattattagtaactataatacatgcaaaaaaaaatttaataaattaatatatat

SEQ ID NO: 318939 - DNA, 2524 bp, Cannabis indica
ttatggctaattcaaaccaataaatctgtctctggtcaattgagggtttcttccctttccacccatgagagaagaaaacaaaacgagacaaatagaatattcactttatcatcaaacactttcttagcaaatatatgaaaaataattattaaagggccaatagatgaaatttttgaacatgtcatgaaaacagaaacttaaaacaaaaaaacaatatcagataataatactatactctttctttattctagttagtaaagaaacgaaagagaaaatgaaagcaaatcttattactttgcagtcggagcaaagggctgaggcttcttctgctgcaatggctttggggactgaggaacaccatctttgacagttgacgagacagtcaaacccgttgtatggttgttagactccgacccaccattattaacacctcgaggagaaaacaagttaccacctttaaccaaatcagccgcagatccaccttttccagagaaaacccacttgccagaaactccatcaatggcgtcagagaaacctctcttagctccagtgactaagcccagccccgcaagaccctcctctctttctggggactcggacccgggcaaacccagcctcagctcagtggccttaaggttcaaaccagaaccactttttttctcagaagacttgccagagctttccattgaaggaactgactctgataagcctatgtaatcatgctttaagggcatagacatgaaacggtaactttaacagatccgggagtgagatcctttggtcttcgatttctctgggttttactcttcgaagaagagaagaactgtagtgatagacgattgggcataggtctgactgggaatggcagagtgcgaaatcgacgtttcaaggggtgctacgtctagtggtggtgctcgtttgggcgttacgatgccgaagatgcccacaatctggcttggagatctgatgatcttagagaatgtagagggaagaagaggcggaagaagatgacgtctgtagggttagtttttggtggctggttgaagaagatgaaataaaaaaaaaaaagaaaaaataaaataaaataaaaataaaataaatttataattttaaaatatattgtttagttttttattttattttaaatttttttaattaaaattattatttggacaataaaaaattgacacgttgcattttattgggtttaacgaatccgttagaaaaaggaccaacggacaaacataaattgagaccttaggtattttcaccgccaatttttgaggttgaggactaatcggcatcaacctcaagtttttgaggacttttgccgcaattatccctaatataaataataagaaattttttttatttgttaagaaaaaaattagtgtgatatgtagtgtggctggagatgaaatagtgttaaaatttatactataatataagagctggactaatataaaaatttgggttgaagtttgtctttgctccaattccggcataaggttaggtcgaatttttttccttaatgaaaaagtgtttggagtcggattttcttttttccgcaactcaagttttttaagaaaacaaaaaaaaactttaaatttggtatatttcgatggaagaactgtagctagctgaattttgaatttgagtaggaggggaaaataatcggacggagattagagcaaatctcaagtgagaggcaaatctaactttaaatttgaaaaagagtaattcatagctaaactatttatacttttaactttggtaggactagcttctagacaaaaatttttttagggtaaaatctttcaaactatgattttgtggtggtctttagtgttttgtctattttggtgtgttaaagtgttaaggtggactgttaatgtgtatataagtgtacactacatatttttataggtccacctcattataattatttatataattaaaaattattttatattataaaaaataattaaaaaaacttttaaaatatttaattatttatgttattttgatttttgtccacttaatgtagcatgtctactaggccaacatcaatgccacgtgggagtatagcttgccaacaagtaggccaagctatctattcaacacttcaaacaacgaggggtttgagtacttgagagggacgacgaaataacgaaccagccacctcaagggaactggtcgaccacctctgggtggccctatggccagcataggccaaccagcttttggacaccatatggccggctagcatgcactctgtaggtgcatggtcggccaacctttggcctgaaaagtttttagtgcacaactttcatccgtgaacaagtcaaatcacgaattgggccttaacagtccacgaaaatagagaaaatattagcaacttttctattttcgaggaaaaatttagtaatttgtattttattaatttattatgtataataactttctttacctatttttaagagatattagaggtgtaagtgttgggttttaagccctaaataaa

SEQ ID NO: 318940 - DNA, 874 bp, Cannabis indica
tttttttttaaaatttttaaatattacaaataataaaactaaatgtatttttgtcaatatacaaattattttatttgaatataatgttcattacaaagttaaaccaaatatgataatatcatacttattataacttttattccattacattactatttatattacaattactattatcattatattaccatttatattacaattactattctcattacattacattacataatatcaaagcaaacacaaccttaattttgagccccttacaacaaagtattattcaagaggtagttactagttagctattaatatattaaaaggaacaataaacaaataaatataaataaaagcaaagacaagagggaccgtgtatgaaggggcaaaaaggtaaatatttgtataggacttttgtaagagaagcgtttagagacaacatattatgggaacaatagaggaagacggttattgtgaaagtgagattttcttagtcaaaaatctattaaagcttttcaattacatcaatcccaattgattctaatggtcaagatctttctaactccttgatttgcggacactaattaagaatcaaaacttcactcaaactcttacaccattttttctatttttttttttctatttagaataatgggtgagagtagcttattatttataggccattttgaatactcgctcaattgcaaagggggaatgtaaaacaaagtgaatggtggttattgggattgactattcaaaaacgtatattttaataatatcatttcaatttaaaggtacgggtgttcatcaaaccgttcaaattattcaaattgcccgcaccacaaaaaaaatacgatttgaaattctttgcagtgcg

SEQ ID NO: 318941 - DNA, 736 bp, Cannabis indica
aataaaacatacttggtagtaaatctagatcctggtaaaatatttccaacaacttccaccatatgtagtattctgggaagcttggggggaaaatgttatcggcgtttctggcagtggacatatgaaattcaagctgacatcaaagacccactagtaggcccctcaaagaagataaattgggcccagcccacttggacaggcccttccagaaatgtattccagctccgtgaccatagagccttccatcattgacaactcacgctggaagcaagtccggtaccgtgaggctagaggagtgagacagtgtgttcccagaagactggtctaatttctctttttattcctacatataaataaggaaacaatagctgccagatctcgatcgaggaccgtatcatgctaaatggggaaacttcttaaaatagatatcaagtaattagttcacagtcaagtgcccataatcaaagtacacggtgttgaccaaatccaactaaatctgatttgcctagtcagcaaatcctctccttcttgggttggacttcatgaagcagcgcaagtttgttgttcattgtaagtaccccaatagaggaaaaatagaaactaaatgtaattctcaaactactatatatacatatcaaatcctatggattaaaggttgaattctcttgcaaaacttgctcaggcaaacttgagaacatatattcattgtacttccaaaggcttttcaagctaaaga

SEQ ID NO: 318942 - DNA, 1054 bp, Cannabis indica
attcaacttaacaacatttaatagatactatttacagcttttattttattatattaattttcacaatacttcatttattaataacaattaacaaatataaaataaaatataattttgtgtaattttattatattaatttccacaaagctttaggcttaaatcagaaagctttgtggaaaagttcttcatttcaaatgtaatttgtatctttgattttatcttttcatttataaatggatacagctttctctacaaaaaaaaaaaaataataaataaataaaatataattttaaaaaaattaaaatgtctaataaatatttaaaataattgcacaaatgatcggtatgttggctagttagataaatatgatagagaatatcttatccctccagattttatagtggatcatttactacacctcgtgggtgtagaggtttcctaattttgcagtaggagtgttcgcagtgtgggtagtgtggtttttgaccatttttttaaactagtctgcatatgttgtttttgtaatttctcaaatcgcacttgcactggaaaattaaaaaaccgaaaaaccacaccgcaaaaaaatgttttggtgcggtgcggcttttgcgttttagagtatcaccaataattgaactatcgcaaatacaacaaatcttgagcaacacttgtcaaaaatatcataaggcttgaaaataaatataaaaaaaatggggaattaccccatatactatttttttaattttttttcaaatttacggttcgggtttctaaagtggctgcagcgctaattgcaataagggtttctatacgattttttgttgcaatttaagttgcagcgctagttgcaataggggtttctatgtgaatttccgtaaaaaatgcaaaaaaaaactgttttgaagtgtaaaaataaataaaaaaaaaaagaaccccgaaaaaaattaaagtttcaataatacaataattagtgggttttggatttggacatttacatattagacctaactaaatataaaaattagtatttttataaggaataattacataagac

SEQ ID NO: 318943 - DNA, 587 bp, Cannabis indica
gataactaatcagattgtaaagagttttatttagggcataaaacccaacactaacaaacatcacaacaatggatttacagagatttcttttaaaaaattacactataataaaactagcaaatattattttatcacaaacatcacaatgatatagtcacacaaagataataaaatcagcttaaaagagaaaaacacaatgagatctcaaccttacttgcttcagagcagtgaggaaatggactcccaacaacaacgcgacctaagcaagggactcccgacgatcaaacttttgtaggtgaccttaaatttctaaaaaacaaaaaaaatgagactcttttgtcttttctccaaatttttactgccagcaaagagaaaaaaaatataaagaagttcttaaaagttacaaacttacaatggaggaacacgccactcttggagccgaagggaagaaaacacagtggcacggctgggagaactagacggtgggtggcgtggtgtggcctgaagatggtggcgcgggttggaaacctgtacggtggtggtgggacggctgagagtgagttgagagggttttttttcaaagaaaa

SEQ ID NO: 318944 - DNA, 788 bp, Cannabis indica
gtaagaataggtgagtgtatggtaaggtaaggtgcatgaggttctatctcaaaactaattagcgataagtaaaatagtctatatgttcttatatatggctcaatactctactatttatttcatgtaggacaaagtccacaataacttatcaacctaactattaaataaatggcaatctaataataaattatggaaaaaatatttatttccattattacatctaatacttatctgtttagtgcattaattacatttcaactagcatatgtataagttagttgaattgatactcaatgattgctattgtaattttgtggttcataatcacataagcaaattaaattgtttatataaataaagttaatttttctttcaaaaaaataaagtaaatttgtatttcacgggggacaattccaataattttattgtttgggtgtacttttttcaaaaataaaataaaaatagcaaaagtctacaatggccttgagagagaaaaaaaaatcatacttattcattattatatttattgaacaatatgctttattattatgaaagtataatacatatatatgaaatttattacattgaataaaggaataatagaaataacatattgccattcaataaaaaatagaaataacacattgcccattaccattggagacaaccgtattcttcagagaatgtttatataataaaacggaaattaaataggcaaattggcccattagctcagttggttagagcgtcgtgctataacgcgaaggtcgcaggttcgaaacctgcat

SEQ ID NO: 318945 - DNA, 1229 bp, Cannabis indica
aagcatgctagaaacactcgtgttggtttgtaaagtcagtcatcattccatgaagcagttagaatggcgtgctcgtgtataatagacatcattctatgggtgtaagggcccaatggaagcttaaagcggagacgttacaaggggtgtgtataaaattaatctaatccaataacaaccgatcggtccaattataaccaatcaaatattggatgtccaattgtgatcagattggaagtttttttttctttgaatatccaattagatcggatcgaatgttggatatggtgtccaaaaatctaatacatctaacatccaatcaaactacttaatattttcatttattttgaatgagtaatttaattttatgttattatgcgtaataaaaatatatgtctatataaaaattaacattaaaacttttctttttggattggatggatctaatccaatccaatatatactggatctaaaatattggatggattcgatctgatccaatccaaaaaatactaggtctaaaatatttgataaaattgaattactgcaatagatatgcatgaaataaatccaatggataaaactgttccaatctaacatccaatggatattggatcgattggatgactgaaatgaattggatcggatcggatttgatggtaaaatctaacatccaatatataattggattggatcgggataggcctaaaaatattgaatgtagtccaatgaacacccctaatcttaagtgtgcattggttgactttctctcagatgatgtggcagtctatctccacatgtttggtccgctcgtggtaaacgagattttcagaaatgtaaatagctgcatcgttgtcataatatagaagggcatgaatggtgggagtgattccaaaatctttgagtatggccatcatccaggtgacttcacaagtggcctgtgacatagcgcgatatttagcttctgcagaggatcgagagactgtttgttgtttttttttttattattatttctatgagatgagggaggatcctaagaacacacagtaaccagtaatagagtgcctagtatcttgacaacttttccaatattttaaattaatatatgggaaatcgttgatcaattataggccgtaattcgcaattaataaaaaaatactgggttttttttatttttacacttcaaaatattttttttgtatttttacggaattctacatagaaactcttat

SEQ ID NO: 318946 - DNA, 1671 bp, Cannabis indica
ataaatgtgatcaatcataaagcagcccccaacaattgcaaacttgtgacgactatgattgttctagcattttcgctgtatcgagaaaaaatatactcccaagaaaaattgtgatggatcatatataaataataaattataagattaataataaataataagatgtgatgagattatcaaggctaccgagaaattctttgagatttatatggacaatcttcgtgtggggactttgagcttctgagtaaattagcgccatcttactgcattttcctatgagaggaaactggagaacaaggttctcccccaaagttgggtcagcctaattagagagaataaggtcaatttaactctgtaaatgagtttatgtaaacaaaaaattagaacccaatagatcagtttacccaaattcaaaggtctataaactctataatctagaaattattcacaaaaaagcacaaattatagccaaaaaaaagtaaattagtaccttgtgaaacctagaatccttcccatttggaggagaacgagccatagctgaacagagaagcaaatatcactcttttttcttaaccactcttaaaaaagaagatcatgtagttgtaggtggaaaaattaggcaactaaaacaatattctattttttattttagaaaaagaaaaaaggttttacagagaaaagtagtagtaggagtacccaatcaaagctctcgcggaggaagaaaacccacatagactctgtaaatctgaagctaaagaacgaatctcgatgctattcctcgctatacaagcattgaaccacagattatcgtcttcatcatcattatcggtgtttcgaacggtgaagctccgagcgtcgactccaacatttcgaagtttggcgggtgatcgtcctcttcatcatcatcatcgtcgtttcgaacgatgaagctccaagcgtcgacgccaacattttgaagattggcgagtatcgaaccacagattgtcgtcttttcacctttgtaatccttaattcgttgccttgtaggcaaataatctccttcagatatgcctatatataaagtggggttttttcgaagtctccgtggaggctgccaatcgtagttaattatagctgtgtatacgattgggattacgatatatatagggttttagatttggaaaaataatctccggttgttttctttttaaatagttgtgatttttcaatatttaatatcagttcaaatattaataggatttgttttattattattttattaaataaaaattaaaaattacccataaatttctcataaactaagaatttcggttatataggcatattttatatagaatagatatatatacatatatatcattttgtctttgcttcgtcagatctgctgcactgcacaccattggagctgccaagagagaatcgtgacagatcgagaaattttgggagctgcaaagctaacggtgaggttccttccacgatcgctggtcgagaatggcctagccctcgttttctgcattttctttctaattcagatatgtctctcttctcttattattctattttctctacaggtcaccattcttagaccttcatacttgtccaacaggttgcatcgtcgaggtttgtggttgttgttatgatttgtggtgctaattttttttttttttttat

SEQ ID NO: 318947 - DNA, 506 bp, Cannabis indica
tattttatttttttgtaaaaaaagccccgtttcaaattttgccctaggcctctcaacaccttgagacgggcctgaatagaccatgagataatgatctttcaacccagaggagatttaggagtacttgttatttttctttattttgcaaaaagcaactcatccagagaagagttaattctataaaaattaatcagaaaaatgtttttttttctaatagtacatattactttttaaaaaggttgaggtctagtttcataatatacaagagtataggatgtatagtctagtaggtattaataaattcagggaatttttgttccatatagtactatttccttagaaatcattaccattaacttgaaaaaaaaaaaaaatgggtaatgaaataaagtgaatttttgcccaaaaaaagtgaaatccaaattaagtcagcggggcatatatgaatgatttgaacgagaattccaaagcttaaagtcaatattgtgtctatatatagatactac

SEQ ID NO: 318948 - DNA, 776 bp, Cannabis indica
tttttgcccaaaaaaagtgaaatccaaattaagtcagcggggcatatatgaatgatttgaacgagaattccaaagcttaaagtcaatattgtgtctatatatagatacgcgtaagaatttgttggactactaagacaaggctcccgtgatgtaagactagtttgtgaaatatatgtacgtattgattaaataattaaggatgcatagtagttagagtgtgaaagcctccatttatgtggttttcattacgtacgtactagctaacactgcatctcctgactgcattattattccaaaaaaaatatcagacacagttgtatactccattactgcactcctacgtacatgaattgtcaattactatttccactctcttttataagtttttcctcccttaaaaaaacaatcaacaatagcataaaaagaatcagtgattatatgtaacctataaatattttgcctataacttatatagctagctataaattgaaggatgctggagctaactatcaaaagttagtaaataaaatgttcaaaaatcatattggatgaaatatggaagaagtatatgtggataacatgtttgtcaaatctaggaaggctagggagcacatagaggatctagatgaatgtttcaaaatcctaaaataatataacatgaaacttaattccttaaagtgttctttcggggtcaccttgggtaagtttcttggatttattgttaatactcaaggaatagaagccaacccagagaaaatacaagcccaccaacaaaa

SEQ ID NO: 318949 - DNA, 699 bp, Cannabis indica
tttacagttttggttattacagtgatctttatgtgggttgctacgtaaattttagttacaatttaaattatttcgttggttggtatatgagtttctatgtggatttctataaaaatgtaaaaaaaaatatattttaaagtgtaaaaataaaaaataaaaacctaataataataataatagtatcccaaaaataattaggtaactagcccgagcaaagataaccaagtcacgacaaatgatgaaagttgctgcgaataccgtttgggcgtacaaattatatggatgaacgggaatgaaattttgccaaaagtcgaaatgttttaccatatacttgtaaagagtgaaagagaatgtacataatagagttacattttttttttcttccaaaaaatgcatataaaaaacataggagattgattgtaattttgtaattagatttcaaagaaagttatataagttataaatatgttttcaggtaataaaaaaacttctctgagttgtaaaaaaataaataaataaataatctattaccataataaaaatgacaatattttagaacttaaccaagtaaattattaaaaaattatttgttcttacacatatatactcataataattagaggtgttcattagatcacatttaatagatttggacccaaccaatcaaatccaactatttattggatattgaattttgtc

SEQ ID NO: 318950 - DNA, 1227 bp, Cannabis indica
ttggattggatcgtgcggattggtttgaatcaaattcttagtgaacacccctaaattatattattcaaaaataataacaatctctcattaaattaaatattatcttttagtaacaaatttttaattttataatatttatttaattaatcaaaatataacacatgtaaatagaaatataatgtgtggctattaataaaagaaagtaaacgtataagagattatgtacataatagagtttgttagctttagtagattgctttctataaatgtgttctatttgctcaaggaacatatattgctctctcccctttaaattgatgttactataccatctaaagtatgggccaatattcaatgtacatctccttccaaagcaaaaaatcactataataacagaataaaattccatacagggcacactattacaaaatgggggagaaatcttatacattccagaaaacttactactaacacgagaaaaaatatgaattcaatttaataatgcttatttggtatcctgtattttaaagtcatacatatttagtaccctaaatttaatttttttttatataaaattttatcaatacaatcatattgtctaaaattttatgaattcaaaattcaaatttaattatttgattacatataactaagatctgtttagttaaattgataaaattgtatcgattaaattttatatatgtacaatttaaaaatatgaagtaccaattaagtattattaaaaatacaggataccgaatatatttttttataaaaattaatacaaagtactaaatgaggatattctcaatttgtactaagaaaattaaaatagaaatatttttggaattaaagttatttaatcaaacctacagttagctagctagacccaatagttctgtctaaaataagaatattaacaactaagaaacaaaaatgagctttgcgcaattttaaagcataggaacatatatatttaatgttatatttatttaattaattataattttttaaaagatatatggaaaatttctcaataaatattacccatgaattttaaaaatatttaataattaaattttgatatgataatgaattaataaatgagaaatttgaatttttatacttagtttaactactgttgactgaggttttcggcaaccaataaaataataatagtttagagagctataagaaattaagaaagagattttttacgtggttggg

SEQ ID NO: 318951 - DNA, 782 bp, Cannabis indica
aaataaaaaaaaataaaataacactctttaaatgagaaaataaataaaatatctactaaaacaatacttgaatgagtgtactatagtcttaccaaaattaattagtgatataaaggtggaaactcatgtatgttagttttttatttcgaaataataataataatgtattttttttttttgacaatataataataataatgtatgttaattgctttttaacatttttttgctaaaatagttgctttttaaatttatgaagagacacttagcaacttttcaacgatgtgacccaaaccaagaagagagtacaatatcgagattgaggtgcacatgatcataatatataatcttttttcatgcagtaatataccccaaattcattcatacctgttattattttcctcgatttgtaagagagatgatcgattggatttttatatctagaaatcgttttttttatccaatgggtgagaaataaattataacatttttgaattgatatgaattttgataaaatatacaatgtgacaagtaataaatacaatatgtaatattatatttttttaatagttaatttttttttgtagttaattttttttttgtaaccaataaaattaattttctattaaatcaaattagctactaaaatagcttccaaactagcagaaacataactcccgcaggaaacacagccaggaatagaaccagaagaacgagctaaaaagttacccgcctagttttcggaccgtttaacaaaattaattgaaatagaaaacaaaaga

SEQ ID NO: 318952 - DNA, 1251 bp, Cannabis indica
attgacatagaaatgatcaatgaggaattgttagtcatgggttcattaaaaaattgaaggacattaaaaaaatatatattaggcctatttttggggcccaatagcccattttgcagcctataagggccgcccgtgggaatggggctccatgaagttagccaacatataattttgtttcttaatttctctttggaagagtagtatcgtatcttatttattttttttattgagattaatagcggagatttttcttgcagtacccttatgggtaatcgattaactggctcaattcctagagagctagcaaacatcaccactctccagtgtttgttagtttttttctatatcacgtaccctttttataattatatgtgaagcttattctttttaattaaagaattattacaatagactgtatttaaatgtgttcctcttgtagagttgttgagtttaaaaatactttaaagctctctctttataatctggctagaaattcttttacttgcttgatttttgtaaacttttaagaaatagttacttataatttttgtgcgatttttactaaacatatatagtagctagtgatgaaatggactttattatatatctcatcaatatatatttatgattaacaatgttatatatatatatataaattctttgtgtgttgtctattatacgcaacttacttctaactatttcattggacaaatacttgaaacatttgcgaggctgacaacgttgaaagatttgtaagattttattaatagagctatttctttggcaattataatctccataaaatcagatattgttcctaacttgatagttagaaatactagtattaattgacatactttttgctatttccatcattttgcagtcggattgcagacaatcaattttcttgaatatactgaaagaattagacaaatgtcacaaaattgtgagatgattatttatagacttttttagggtatatgtagggccggccctaggcataggcggcctaagcccgtgcatagggcccacactttttgggggcccaaaataaaaaaataaaaaattttattaggcttttatttaagtaaattttatgtatattgtaaacaataaatattcatagtttagttgattgaggtggatgacatattattcacggttatgagttcaaatcccataacactcttcttttgatattttttatatattttttagggccccaatatttaagaggaaattagactctat

SEQ ID NO: 318953 - DNA, 1108 bp, Cannabis indica
caagttgatctagaggaggttaatgaataagctgcgaattagaatacaacagtaatatgtatggtttttggggccgatctcctaatggttgtttttgagggattcatcaaaacaatttggggatatcttgggatagctcaaattgccaaaatgataatgggtagaatatgctcaaaaattagtcatgctttttttttaatgaagaatggtgtgatatgtttcctaattccatagctcactttggttaggaaatcatctcagatcactatttctgtgtcattacttcaaaagatttagtgaacattggtgtcaaaccctttttgttctttattttttaggctaaccacccagattttaagagcccgattttaacaagctagagaaaacacgttgctgccacatgattaaaaagtgtaaatctgaatctcatgagagtgaaacactgccttaagaagttcaacaaagaaacaattggagatatgggtagatcttataaaaaatcagagaaaaatacccgaaagctaaatatttggcacaagataattagagagacactaatcatcaagagcaagagaaagcagttgttgataactttagttgtcattagaaaatcttttaaaagttcttaaggcaatgatgtaaaatcaagtggcttcacaatggagatgataatacttctttcttttatgccttcctaaagaagagagaaatagaaaacaaaattgtttcttttgttactgaacagggttcaatcaatgataattttttagatgtagtgggtcacttcttaagccatttcagaggtcttatgggtacaaagaatagaggttccaacaatgttagtcctgactattttaaccagaaaactagactcaatttagaccagcaacttatgttattgaagcccttttctcataaggaaatcaagagacccatgttcaatattttagacaataaatctcctgtactcgattgctttgggtacggtctttttaaggcaatctagtctgaaattagatcagaagtatgttctgttggaaattattttaccaggatcttagatctactcacaagtatgttcattaacatcctaaataagaactttcta

SEQ ID NO: 318954 - DNA, 618 bp, Cannabis indica
gcataaaacccaacagaacaatgcttctaatcttgaagaatagctggaggaagctctcaagtttgagatagatgagttgataaaggagcttgttccacggaacaaccactttgtgaaaaaaaattgatgctacgaaagcttttctctaatgttagtgtaagtgcaacactttctgtatggcaaattatgtgggtggttatccattcagatttttgacttttcctctttactgtcttggttctttacattgaccatctaagttggtcttagttgtatctgtttagtctcttttgtttttactgtttgccatgtcagcttttagcttttatatactttactcgagtatgcatcggtgccagctggcttcagcggttgtagttagttaactgagccatttcttttacaacttggtatataatatgctcatgtggctttttctaactaactctcatttttggtagaatcgtctttgattcttgctctcctagggaaaaatatttctttggtgtttatgtgttatttgcagatagaaattcattgaatcttcaagagcttgaagaaggagaacaaatttgttggaattatatttaccaggaacttagatctactcacaagtat

SEQ ID NO: 318955 - DNA, 1170 bp, Cannabis indica
tttttactctactccgatcgggtttttttaggtcagatagtcattagagggttttttttttattatttattttgctctaataccatattagaatttaggataagatagatgtggctcaatctcaaaactaattggaaatgtgaggagtagcccatgcatcttatgtctgttatttagttccacatattatcaatgtgggactctctaacaaaaaataataataataatttgaatataattaagttctcaattctgatgagcttgatcccacagaatgggctatttatatgaatatgcttttatatttatgttatattaaatgtggttatataacaaaagtattattttttaaatattatagtttaaatttaaactcactatacatatctctcttattttttatgttatattaaattagtaaacaatctgcgctttaaggcgaatatttaaaaaatttaaattatatatatgaaataaattatgtattttattaaatgaataactaaataataaaaattgtattaaattttaactttattaattttccacataatttttctttcaatattatgataagttaagtgtaagtagactcgacttgtatttacaatattttatttttataatggaagtgtgacatgtcctatataataatatgtcaagcttggtcgatgctttcaagccaagcatgacccataagcacgaatcctttgtgcctagcccatgtctgggccagatttcagtggactagcccatttatatttagtgggtaggtcgtatttattattatataagtcataatatctttatgacaaaattgatactttttcctattttctaaagaagattttaattttaaacttttaacacatgtgaacataaacttcatatttttgatattagtattagagcagagccttcaggatgcatgctttctggtttccctccggtacccaaaatgggtttttggtccacccaaattggttttgtggtggtatttggtacctcttttggggttttaatcataatcatttcattttcttcctcattaattgcaaaatttattgccctgacgattattatcttctcaatctttcttcagaccacaacttctactgcatttattatcttccagtgtctcgtttaagtccaaatttacatctgcattta

SEQ ID NO: 318956 - DNA, 510 bp, Cannabis indica
ataaaattagaggtagttttgattaattgataaataaaagaggtatttctcaatataccctttttataaatacccaaaataaaaataagttcacgttttaaaggatttattttgtgtttaccttttaataacttttttttttacaaaaaataagaacctctattttttggttgtttcataaaaaatattgttttcaagttgttggaatactgtattatatttttgtaatgtaaaaataacgatatttttcaaaaaaaaaagaaaagaaaataagtcaataaattttttaaaaaaatatctgtgaaaaagtaattttaaatattttatgtaaatttcagttaaaatattagtagagaatctatggggagaataaattgtttgatttgttattaaagctcttggaatttgcattactaaagaagattatatgttctttctatgaaatggaaaatgttatttagaatttttatcccttaaattatatatgttttagggttaattttacaaatg

SEQ ID NO: 318957 - DNA, 907 bp, Cannabis indica
atacaacttacattgtattaaaaattttagtcctaataattaatacattatattgttttatccaaatataaccttatttattattttatcaaatacgattcttatacgacctaccaaacaagtcgttttaataatactatatatatatatatgagaatttcttgagtacaaatattttgctacatgtctcactatactcaagtaaaacaattttatgttaagatccaaaatagaagttttctatatgttaatgtttggtccactgccaagcatgcggtggccggcactattaaaaatcttacattagtcataataaaaatttagtttaaaattgaaaaaattattacaattaattaattataaattattatttctatgttattattattaaaaggtagtcaaatgtattaatcacaaaaattataatttgatgtgattaaatgtatttttattcattatatttgttgtgactaaaactaaaccagtaacaacttatatttaaatattatattttaatcacaaattaataattttttgttgtgactagaaattatatttaatcataaaaaattcatattataactaaaaaattattacttaaactagtttttttatgtaatacgggtttgttttctatgtttattcaagcatgcatctagttttaattgaggaattaatatatttggcatggggatttcttattatatattttggaaaatgattagagtagtaatattattccataagtggtaattttaacacaatatatttaatattaataatttacgtaattttttcataataatttatgagatgcacatgtttaactaataatataatataattcaattaatataactaaatataatattttttttgatatataactaaatacaattataaattt

SEQ ID NO: 318958 - DNA, 2133 bp, Cannabis indica
atatatatatataataacaatatatagtactagttcgtagttccaaaagaagaagaatgaaaccctgatctcatcttggctggactatatatatatatatacattatccttttggattcaaaaccctatttcatataatgaatgtttggttgactactttttattatattgcgtgtacatatgtacatataatatatttataaatatacatttatataatatatgtggatgatgatgattgatgatgatgatgatcttcagcacctgagcctccgtactaaccactccattttagcatttattatataaacacttcacaacactttctttcttaagattttatgctcaacagaataagtaaacatgttaatatttatatatttgttatataaaaataaactacaaaaaaaaaatatgctagttattaattgtttgtaatgatattgtatttgtaaacttttgtcgtaaacaatattaattaataatccatttattttttttttgacaattaattaataatccatttattcattatgaataatttatatatttctcaacaactttctagaaaataataaatatattattaatacgataatatatgttggtgtgaaattaattaccacaaaaaaatttattacttgtcacaaccaaatttgtgattaaaagtaagaaaattgtgactaattataaattattatatttatatatgttgtgactaaaatgttcgtggctaaaaatgttaatgtgatttttcgtcaactgatctaagaagatcgtaaataaaagaagaccacggcaatctaactaataatggacaccaggaatttatagtagttcacccccatgtcgcgatagtaatagggctacgtctacttgtagttttattgattggatcaaacacaccagagttatgttctcaagagtgtggataaaagtacagcaaaggatttctaagtgaaatcttaatcgagacttatgaatataaggctcatgggagacttgatattcataaatatcatctaaattaatagttgtaaagttcttaggaacaataaactaataatttgtaaagaaaattgtgtatcaatggtgttttgaagtctggtatacgttgccttgcctttgtatggtggactcaataaacaagatgaaggaatcaatgtagtgttcttggttgccttcaagtaattctgtaggagaaggtttcagagtagaagatccaaaagagagagaaaaagggtcccaaaaagaagatccttttctcagcctcctacttgatgtatatataggctagagagtttgttagtgatccctcacacatcgggatatctcattaacaaatcgcgtataccactcttttttatgaataaagtatttcaagtaaataaatatcaataacaatctctttgtatccaggcaaatatcctgcaaatattggacactctacaagaaatgtcacttttgtcagcacaattttgcgttggcaaaagtttagtattgtgttggcaaaatgaaatctacttttgatgttttggtaatatataggggttggcaaatcaacgttggtattagaccttttgttggcgcaaaatgaaaagtgctggcaaaaatgacttttcccaacacataaatgaactggtaaaaattgacttttattactataaatgtgcgctagtaaaattttagtgtcttcaaggtactcttggcatgtgggttcttatgcaagagtagctattttatttatttatttatttatgaaaattaggtataacaaaaagtgttaatcacaaaaattataattttttgtaattaaatgtgtttagtattgtgtgattaaaactaaattagtaacaattaacttgtaactagatattatatatgttttaatcataaagtgttatcataacaccttgccattagtgagcaatattacctaaaatttaatatcttgaattgggttttaatctattaaaatttagaataagacactacaagaaatgttacttttgtgctggtaaaataaaatttacttgtgatgtgttagcaaaagggagttggcaaatcaatattagtattagaatttttgccagcataaaataaaaagcactagcaaaaatgatttttcccaac

SEQ ID NO: 318959 - DNA, 657 bp, Cannabis indica
agtctattacttgtttacgatacgtacacttgcgtgttaaaaaataccacaacacaaatttaggagaaaatatgaaaattccaattaatcccacctataaaataaaaactatcctatctaatcagtacccaaaagatttttcagtttctctctctaaaaatgactccgagaaagatttctcctgctccagcggtgaccgccacaacaccggcgactgctcccactccatccaccgatgctacatctccatcatcgatctttgattctccttacggctctccttcagtgatctctgattctcctgatgatgctccttcaccagctcaaaacggtgctacttcgaattcgttcactgttgtggatctatggccattgtcactttggcctcgattttcatcatgtaaagagctgagttgagtttttattcttttgtttttacgggatttgttgatttttattgatttgttacaattaattcttttattattatgattatttctggtgtacctatttatttgattcaagatttatattatgattatcgtatcaattaatcccacctatttggtcaggatttttgaatatatacaacttaggctttagcttgaggccccatacttaattcttctagttgtaaaaaaataatttaatatcatt

SEQ ID NO: 318960 - DNA, 653 bp, Cannabis indica
aatttttaaaaaaaattaacaaacaatataaaatatttagagaactcataattataagtcttaaatttaatatatatataggcaaacacttataatacttaatatcacgataaaatatcgttctataattaattaatgattttttttttaaaataaaacaaataaaatacaatattgaattatactaccctttaatatttttatttatatttatagatagatatttaatggaagggtcaaaagtgaaaagagcttggtcgtggtcggtacagtgtgagcacgtgtataattaggttgcaacggaccatatagagtagagttagagaggcccgtggccggtatttgctaagctaagcccacgccatgcccatctacatcgccattaggtaatggctttagtcagcaatctttgaaattccctaatttctttttctttttctttgaaaattcaaattgcacattttccatatttctaaaattatttttggttcctgaccacacaaaacaatatatataaatatatatatacaaataataataaaaaaaagtaaagtaattactctgcctctgaagttttgttagtagtttttttttttaatttctttttttattgttttccttttttttttttactttaactatagttattaaag

SEQ ID NO: 318961 - DNA, 1470 bp, Cannabis indica
taatatattgagttagtgcattttatttgttctatagtagaagacacaagaaaaataatttgttttcacatagatacatacacataaatttaaatatatatactagcttacttattttattaatggatacatatatattaacatatatataagcatatgtcttgtctaaatgacatgttttgagagtactctgtgtgagttttgtttgagtgtgtgatctttgtttgtctattctgggatttgggaggatggcttcaagtagtcaaaatgggaaagacttggtggacatgtatgcacagattcaactgggggaggaggacgaggaggagttcttatagctattgatcaagaggaggagattcaagcttttgatgacaggtggtgtctagtgggaaagtttcttactggtcgcacaatagattttgatgctatgcaacacatgatggcatccttatggcaaccaggtaaaggagtatacataaaggaattggatactaatcggtatctttttcaattctatcatgaactcgatatccaatccgtaattgatgggagtccatggacattcaatcgtattcaacttgtctttcatcggttgaagaggggggaggatcctcgaatggttcgattgcacaaactggatatgtgggttcaactgcatgacttaaagtatggcttcatgtctgaatgggtggtgaaacatgttgggaattatattgggacctttgtgaaatctgatccaaagaacttttttggaatatggcgagattatctctgtgttcgtgttacaaatgacatagagaaacctctcaagagacgtatgaaattgatcaaaaatgatggtgaatggatctggacaacttttaagtatgaacatgttccaatgttctgctttatatgtggccttattggtcattctgagagattctgtccaaggagatttgatcagcattttgatgactcaagcagattgtatggtgagtggatgaaagctcctacaaggaagaagaattacctgataggagcccaatggctacgaacaggacgggatgaggatgaaggggttgttgatggtggcgactgtgatcggagtaagatgtctggtgcgatgtttaatgctccagctgtaattctacctgatgggaggaatcatggagagaatcatggagggtatatggatacagatcaaacgtgatatcaaagggagaaatttgtgggagtcaatgatatcaataatgaagaaattggtattaatgcggagataaggtctgatggtcaattacatgatcgtcaaattgatactgaatctatgttgatattagaaaacaaaagacgacatacagaggaggcaaaacaagtaggaacacgcgaggtggagaataatatgatgggtagttttgatgaagttagtcatgatccaaaaaacgttatacaggtgggccttggtgttcaggcccaccaatcatcatg

SEQ ID NO: 318962 - DNA, 1137 bp, Cannabis indica
agtgggagtgctaacataaatatagaatctatagcttctatttggcgaatagaaagtaaaggatgatttccttcgagcttaattgagttagtacgactatgttgtctatccttatttaattagaatatacaatgtttgagttgttgtctattttttttaagatgtggtctatgacaaagagagagttgatttgtccaatttttctgatgtcatggttgagagcattttgagagagtatttgctcattttttgtgtggctactcgacaaaataaaatatgtcttaatgagttatatatattgaattgaaagaaatagttgtaaagactttgacaattattatttttattattattattattattattattattattattattattattattatttgattatacatgaatcaaaattttttatttttggttaaaaaagcaataatcattatattttttataatttcttgaagatttttgtatttctagattttgaaattattgatatataataaatatgatgataagtttatgctataattttttttttttataaaaataaatagtacatgttatgtttctaaggaattcaaaatgatttccaatttgtgtggagtgcagacacactttatgtacgtggtcgaaagtaggtgacaattaagtgattaagcaagatttttttttattatatgaaaacaatatatataattgtgtagtatgtgtttatttatgtgtatgttattactttttatcaatataaattaagtccctattctctaaattcatataattgtaacaattgatgcaagttttaaatttaatttttatcatgtataggtatagtgtatttggtgttggttgaagagtgcaaagttagcttgcttccttagaaaaggtaattactaaaactttaataatatttatttaaaagagtttgattattttagatattcattcgtagtgaagtaagttctgtgaataaatatgttgcggtcggatgggtgacaaatatttttatacttaatatttttgtgattaatttacattcataaatattaggttatgaggatgataaaagatctagttcagccgcctaatcgacgtgactatattaagaaagaggtacataaatatttgtaa

SEQ ID NO: 318963 - DNA, 1300 bp, Cannabis indica
taggtaaaaaaaattattgtatagaatttgaaatattttttttacttattataagatttttcttttatacaaaaatatagactattaatttatattattgtatttttatgttgtttttataagactccataaaattataataaaataataaagaaaaatcataattattaaaaaatgataattaacgtcaactagtagcattcctctataacaaaagtgtatttcatatgaataaactttattactggtatttgtctaaattttatgtgaattatattattacaattgtgggatttaattggaaactatgaagggtgggttcgtacgagatgcctatgaccaactaataagttgaaattaaattcaaagctgtttgattaagatttaaataaattacacaatcacaggcagcagtaattattattagtcaacacagaaaataattatatttatatattccgtaagtgatgacatcatttaatttaaattattctactgcgtcgtcacttcactcgttatatataaatatatatttttatataaatagtaacaattgtatataagtttacaaaaggaaaaccaccacacaaaacaaacacaagtagtaatggtagaccattaccaaccttggctttgtcaccataattaattattaatggggttacatcaaaacctctaatctactttgtattcatttttatatttatatatatttgtaatttgtcttttatgtttagttcgtggtggtagatctgttttccatattaagttggggtttgtaaataaatttatttaaggatctttatcatgttaagaccattgaaatggaaaatgtaaaaattgtacattggagtacagttttaaaaatattaattttttttataattttaatagaagtattaaattttgcattaaattttataattacacattagagcacaatttttaaaattgatgaaaatgtataatagtgttttttttatcaaatataacataatttttccatttctcattaaagatagtctaattaatattttgatttaaaaaattaaaattagtaattttatcatcaattttattattattttaagagttttttgtggctaaaccctctcaactatcatttcgcttgcaattaaccgtttaagttcagattttagcggtgaaaccccaaactattaaactcttaccaaatttaaggtgacatctactttttataattaaccaccaagatgaatttcttatgtattgtacacgtaacacgtttatattgttacatcttatattattatttaaaaat

SEQ ID NO: 318964 - DNA, 989 bp, Cannabis indica
acccaactaaattcttttaaatataacattaaaaaaaaggttgaaacatagatctggaaattaataaaaaaaatagactgtagcttctgaaattgtttttatataaatgcataattgaagtaaatgaattttaatatacataatttctggaaaaaaaatgttgattaagaattaaaataaaattttaaattatctaaagttgttctagagttgttcttctttaattacatgaactttattggcaaatatggatatagataaaatctggacactcaaatgatagatggaaaattgaaacaaaaaatacaacatcgatggttgtcttcgcgttattttacaattattgtttgtttgtgaaaatgttgattgtttaaatactgtcaaaaaattgcaggttatggaatctatacccattcttttgaagagcaatgggcaatgggaagaaagaaaaaattatgtcaattatgtggctagtggagaattcataccaaaggattacaaatatgaacagctcgtatagattctactctctttattggaatccgatccaacaacaacaaccatgcaaatccaataccaagtaaaagaaggaataccttcgataaaaatattcaacgatccgagccttttttttacttgcaactgaagatcgaagaaaataatttcaccacatatccattaagtgtcaacacgcagaacaataacacaaaaatcgctgcaatacctatgatcacatcaaaaataacacaagaacaaggaaattttgaaatgcttcagaacaacgcaccaacaacagaatcaaacacattgcaacaaccattagagaagaaagaaggaactgaaacaaaagaagcagacaacaaccaataattttcttgctgatgttatgaactacttggtgggccaataattttcattattagaagtttatactttcaattaattatattttattatattctcgagaataattgaattgaaaacatgta

SEQ ID NO: 318965 - DNA, 1419 bp, Cannabis indica
cctatttgaagctaagacattcactttaatatatgtcccatctagtgctcctaagcaattcttaaaccatttccacctttcatcgatacaatcatctcgaattgccacaggttttttagtaataagtcatgaagatgtaacaaagcatttaacaccatattgaagtgtctactaacagtttcaccagatcgtgcaaattggcgtctcacaattctatttttaacatcatgagctattatatgtaagaaaattgctaccatttcttcaacatccacatttatactccccttcaatcctccagtggttttgaggtgatgacataaaatgaaaaatgttcttctatccatacgagtactctctatgcatgctaagtcactttcataaatcattctataataatttaattgacgaatttgatgcctacataaagaagttccactcatatatttttttcatttactcggtccctataaatgatcataaaaatgtaaaatatgaacaataactttatgtcatttaaaatctctatcaattgtcctaaattcgcaataaatttttttttgtggctagagaaagttgagtcatatctgtaaacaaattacatctatattagtaattttttttggacaaagtatctatattaattttaattgtaagagtgatcttactaactttgaagattattgatgccatacataaataatgattatttagattcagttctatattgtatatgacatagaattaatattgaggttaaataataagaagaattttcttaagtagtgctagttgtttaccactttaattctcacaaatttaaaattcattttttaaaaaaggaaagattttaaaataaaaaattaaaattattcaattatgttaacaatatatacatatataaaacactaaccggattccaagacaaactctccttcattccaaaaacaatatatatatacatatatatttcttttatttttttatttttactttatctttcttaacagaatatatatatacgatcacctttcactaacaaaaaactttatatatatgtgagcagctttaatgtattaactatggtaaaatatatccacactcaaatcgttagaagtgaaagaacaaaaaaaagaagtcttaatttttatatatacttacgatcatccacatatatatatataaaatacatatactctgaggcttgtttttaagtgagcaaactcaaaataattaggacattagatatgattttagagctcactaacctattccaagtaatgagtagaacccaagctacaagcagtggccaaagttgcaacatcgagagagctgtaacgttccgctgttatattatttataatataataagtgtagattaaatgtagtaatatatattattatgtgaataatatgtat

SEQ ID NO: 318966 - DNA, 884 bp, Cannabis indica
tctttaacagttgaagtgcgtttgttccacacaactttgtttcgagccttccacaaagcccaacagagagttgcaacacgacaaataaaatctttgtcatttgttttctgcagcagctcaaaccagtggccaaaagaaaaggagaagtcaatcgtagcaggccaaccaaaaactgcccagcaagatcgagcaaagtcacaagttaaaagggcatgagttgttgtttctacagtagcttggcaaaccgggcattgagaggatattggtacaggtttcgtgacgaggttgacacaggttgggagtgaacctgcaattgctcgccacaggaaattcagaaccttgggaggtagcttcaggtgctagaatttttgccaaaaaccagagttgtttggccgcacctcgactggtttttgactctgcaacagctgatatgcactttgcacagtgaaattgctttgatagtctgctgtccatgcccaactatcgggtctagagttggtaccaagtggaatgcctaagattaattcagcttctttaggagaaaatagatcatgaactgcctcaacatcccagcagtttgtattggtttgaagaagagaatttacattgtgattggtgaggccaggatcgttagaagagacatacttattactggatgatggaagccaaggagagcccataatttttgtatctttaccatcacctataacacgagcagcccctaattgaaccaaatcctttgcaccccaaatactgcgccacacaaagcttgggttatttccaagatcggatgagagaaaatctatatttggaaaatattttgctttgtaaactctaccagcaagagagtcaggcttacataataactgttggatatattttac

SEQ ID NO: 318967 - DNA, 1000 bp, Cannabis indica
gggcataaaacccaacagcatctgctacgacaattggagtagtgatccaagctaacgtagccgcagttgctgccgtgccaatggtagcacaagccaatcctgacctaccaggagggatagaccaagagagcctactacgaccattgaagatgatcaagcagaagagaaatccaatttacaaactccatggcacctcaccttttactgaggagatgcgacaagcttgactcccgaaatgcttcaggctatgcaagttgctgaaatacaaaggtactactaatcccatagattatttagataaatttaatacaattatggaagtaggttaagtactgcaggtagcaaagtgttgtatagtcgcgacaaccttggaaacactcacgattagttcagcctattggagtatgttttaccagaatctcgatttactaccataatgtatgttatttaacatcctaaatatgaatctctaaaataatgtaaataaacacatataaagtttcagaaacattacagtgggtgcagcggaatattaatggctccttccactcagatctctaacccttgtatcctgtctgctgtagcagggtatcaccaagatctcagtccgaatctctttctcttgaaactagattcttcacagccttacacagtatgattgagtaccacttgatgtgtgtgagcacttactctatcactaaagggtatgaaaatatgaagagagaaagagaagacgagtagttcgaaaatagtaggagtgatggttgaggaaattttgactgaaggcttgaatttcatcatcttttagtgtgagccatcactatctatttataggcaaccacctaggtttaggttagaatttattaggcattaaaatattggaaaaattaaatggtaaatccctagtaagtggccggccataggatgtgggccccactttggaattctgccatttttcaacaatttttccttattttctcaaaaataccatttttccaat

SEQ ID NO: 318968 - DNA, 950 bp, Cannabis indica
ctataaaaaagcttttaaaaatagtgactttgtgcaatggccccaagctgcccaaaatttgaaccggtcctgtatatatgtgttgtaacatatatttaattcaatcttttattttagttcattatattattctacattaaaattatatcttaattttcttctatcataataaaatctcaaacaaatataatataatattatatttttttttatatatatgaggataagaaattcttgtggactgtgcacatgcttatgtgggtcgaggttttataattttgttttattttgtatctttttttgtttttggaaacttatgaatgtgaaagcaaaaaagataaaagaggatcaaataaagacattttggaaagcaaaaattgaccctttcaaaaaaaaaaagaagacaaaatatattaaattcatcgaagaaaaaaaattaacacgtgcgaagtaaaataatctaaaataaaataacacatgcccataatataatattataatgtagaatatatttaaagattagtgtactatcataaaggcaatgacacctttaatgatgagtttaataattttaaattaaatatgatattaaaatggagcaattagggcattcctatttctatttcaaaaaattatgtcacttaattctttttttatgataatgtttattataattatttagatatattttattaattttttttataaaattttaaataatttatattactgaaaataagttttaaaataattttatttaacgcaagccttaaaaaaatggttcatatttttgacaaggtgaattgattataatttctaaaaaatttgtgtgaaattctaataactatattatatatcgtcgtataaaaaaaagttaacattgtaatcaatttatgtgtcaaaaacttaaaaataatgtaaaataggtcatttttctcaaaaaaaaaaaa

SEQ ID NO: 318969 - DNA, 589 bp, Cannabis indica
ttagtttactacgcgtgtttaaaattttaaatctttacaaaacttttttggctgatgttgtgactaaaacgaacactgtcttgaaaatagtccttcaatatgtgtttttggacacagagtttaactaaaaagttataacaggaggctgacggcagcactcttctttaagtaaatatcttactagttttatctttactatgtctaaaatagaataataatcgattgaagccaagacccctaaattattaatagaaagttgatattgtatttaatatctattataatagggccaacccaagtggtttgaagcggagcgaaaaattaaaattcagtcgtttattaaaaaaaaattatcaattaatacatcataaatttattattattaaaaaaaaatacttcataaatttataaatgttatcaatttttttaagtgtatatttgtcgttatgaacatttattatttatactatatattataaaaaatatttattatattatgtataaaatgaaagaataattacataaaacacaattttttataaaaaaaattacattttatatttttttaagatttattttttatattttt

SEQ ID NO: 318970 - DNA, 543 bp, Cannabis indica
aaaagccatttgcacatgattttccaatgtcaacactaggaccttcacaacaatgaaataaattaccaaactttgatacgcatatgtagagaaagaacaattaaggtacataacttaaaaaaacatcaaatcttaatacaaaagttataataagtctttcctatcatcatcatccaatcaataccaataccatcatcatcatcatcatcatcaacaatcatcacccacatctcgtaaaagttagaaaaatcgatttgtccaatgagaaacatttactaacctatcttctagtaagtctttccttatttctgggagaatattcactttttcaataacacaacgaaaattgatttagggacatggtagggactactccccaagccatgcaagcacacaaaggagaccatcttcttcttaccatttttattatgaccaaagttataataatggtggtgtttcattgcgaataaggggtcatcattaataagatgaaaccaagacttacaaactaacctacaatttactacagaatcaacatcatcc

SEQ ID NO: 318971 - DNA, 717 bp, Cannabis indica
catgatgaaaataatctggtctagaaagtgcaatttgtccatatatattttgttgttcaagttaaaatgtttgcgttaagaaaaaattaaataaaaggtctttttttatttttagttttttggttgggttttttttttatttggttgtggctagaaatggatctacaacaataagcatggtataattaattcataattgttagttttcaacaaaagaatgatttgggtgccgaagtttctcttcatatatagtaataataataatgtttgacgcaatcatagattatttattatgtgttacatgagataaatgcttacatgatattacatatatacaatgtataatatataataagcagattttcattctattaacattagtaatcgctaatgtttttatgaatagatgatgagaaatgcaaaaggtttaagtggtatttatcagtataattaattaagtattgaattttatataatttaatgtaatgattttcatagaatatcgtcaattaatggcaatgtgtcatatgtaaatagttttaggtactactgctacctattacctaataagatactcataaaaataaagaattgttaaaagagtgtttagcacatttattagtgttatactattattagtgtaattaagtattaaattttttataacttaaaaaatatgtaatgaccgctctggtaatgtggattagtaaaggcaat

SEQ ID NO: 318972 - DNA, 687 bp, Cannabis indica
agattgtaaagggttttatttagggcacaaaaccaaacacctacaacctctaaatgatttgacttcctgtatgtgagcatgtaatcttttgttccatgaagatacctcataaccctcttggctgctatccaattgtccaaatcaaggttgcttaaatatatgcgtaacaccccaacaatatatgcaatatctggatgcgtacatacctggagatacattagactcccaacatctgatgcatagggaatctattgcatttccttaatttcaaggttacttttaggatattgactaagaccgaatttgtctcctttagcaacaggggtatcacctggcctacaatcttgcatgccaaaccttttgagtacttcatcgatataactcttttgtgattatctaagaataccgtgggaacgatctcgaggtatttgaattcctgaaacaaaagaggcatcactaagatctttcattaaattgcttagatagaaacctcttggttttatgcaataagcctatatcattagtggcaagcaatatgtcctccacatatataaccagaaatatgtatttactcttaagaaacttgtgatatacacaatcattaatagtattcatctcaaaatcaaatgatacaattacttgatgaaacttgtgataccattgacgagaagcttgcttgagtttata

SEQ ID NO: 318973 - DNA, 500 bp, Cannabis indica
agtatttttgaaaaaaaattcgtgtgacagtatttttgtaaaagttaacccaaattccagtatttttgtaaatttcccttaaaaatattggtacgacacgatccatttttttaaaagcacggataaatatgggcctagctagcacgacacacacaaacttacacactgttggcgtgtctatcaccatcatcagtgtcataccacagttgatataattaagtatcaggtcttgtatacttagtatttccaaccatgttctcgaaacacaatacttagctgaaataggaagcgagacttgaaaaaataagcttcaaccatataaaaaatcactctctataataaaaaatagatagtaagctctctaaatataaggagttcctacttttttgttaaacttctttatttttacattattttgtaaattaatttatatttgttaaatttatattataaatattattaaaataattaaatattaactatagtagaaagtatgttga

SEQ ID NO: 318974 - DNA, 1020 bp, Cannabis indica
catgattaagactgctctactaatggtcgtcgttgttatatgtataactcttttatgataaacgacacgttgataaaagatgttagttcatatcggtccagtcatgcataatcaaattatatatagtacctttactaattttctatccacatatgtgattggaattaaaatcacacgcattatagtatagcgcttagtaaaccgtacttagtaattccatattaaagattccatactttaatacactaccgacatattttgtttatattatatgatcttctcttatacttccttacaagataatgcccactctttatgaatattaaatttttagatatttattaattatatttctataatttatatattcatttatcttatacttgtatttcatatgttctctaatatattatccattaaatacttacttttagggcattattgacctcaaaaagtgatcaaccgatagcgaggttgtgcagatctaatgcttgccacgtgtgtgcataaataataatgaaaagtaatagacaataggatttgttatagaggttcagcccccttgtgataacgggtatgacctactttccttttagttgtattataccaagggaattactatccatatcgctataggtgggatctgctatagtacccttaggattacaatgtacgaatcaatgcatggaaaaactcaagtgctggacagccttgggtgttggacgacctagagtagggctgaaatattgaccgagtttgacctgatcttgaccaacttgcctggacctgacccggtcaacccaaaaaatgaaaaagatttgttttgttcgggcgggtcgggttcaacccggtacacttttaggcgggctcgcgggttggttctttatggtcaccgggttttgagttgaacccgaacccgccaaccaactcggtcactttttatttttattttttattacatatataatatattaaaaataaaaaaaaacctaaaatgtaatcattttatttttattacat

SEQ ID NO: 318975 - DNA, 1360 bp, Cannabis indica
aaaagttaaaaaaaaaaaagtattatattatatataaaaagggaagtgagtatttaattacataaggttattgtgggaaagttaactaaccgaaaaaaatagaagcagtggaaaggttagtgaattaaatgaatgaaaaagtaaatagacatgtggcagttatttgttggagggacaggattagaataggaaaattgggacaggtgattttccttcataattcaaacccttatatatgtatacataagttatatatacataaaattaagtattatttaattacaaaagttttaattagtttattatatggaggttatgaagatcttaatttcttaacggctattctaatttgtttggcccactttgtttgtacttattgcttgatgagaaatcatatgaagagcttcaataatgactaccttttgtagccctatattaacttgtatcccttgtttgcacgtttaattttacactaattattattggacccttcctttttttcaccacgactacctacctacccacccaatctcccaaagtagtcttactcttattaaagttttggctaattaacatttttaccaaaaattattattactatcaaaattgtgacccttaattttttttttctttaaaaatattctctaaactattaatagtgttaaaatatagaacttttgttaaatttatcttatgtgactaataaaataatttgtcactacaaaaatttttacttttagtcacaataaaatttgtgattaaaagtaaaaaaagttgtgacactaaaaagtctgtggctaaaaatattagtcacaaaaattacaacttattgtgactaaatgtatttgtaaccacaatatttgttgtgactaaaactaaattagtgactacttgtatctaaagattatgttatagtcacaagtaaatttttattgtgactaaaagtcacatttagtcacaaaaatttatgttgtaactaaaagttatcactaaaagtaataattttttgtagtgtgtgattgatacattattgttacatcactagaatttatataaaaattcaagattttctttttcttaccaacaaaaaaaatagtttattctattcattcattgttatttagaaaaaaattaaattacacgtatggcgacaatgatgcagtgtaacctcgaacatttcgtaagtcatattataaaactgagagatcctacatttcagcactaacaataattcaaaagaatttttaaccaaagaaaaaaaaattaagaaggcaccatttgatagaatagtttgaggttaaaaattctatacaactaagagcatgtttggtattgttttctgttttttgttttaaaaaat

SEQ ID NO: 318976 - DNA, 566 bp, Cannabis indica
acttccttcaatatatgtgatgtattttttttttttaattttgtgttcttattttaattttttttctcaccattgaaatttaatacataatggtaaatacataatattattgattgacagtataaaaacatgtatcatatttaaaattaaaccaactgccatattattcttgaaatcaattaaagtgtcagaataatataactcatttaatatgattgtttagtataactacactgggcaatgcagtttcaccaaccaacctataaaagttgctggagacatctttgtgcaggttgcccatgccatagaacccagtaaagtgataactattgactgaggaatggaatataaacacaaccctttagatgcctaagataaataaaaaaggctatagtacttaaaaactattggttctctatcaagttattatatgaagcatgtaatagtaagatacaagtggacatcagtatatgaagtggtgggggctggactatgaacaccacttcatgagaatgtacttatactgaatagaattgtgctgctgtgttaagggaatcagttagatc

SEQ ID NO: 318977 - DNA, 913 bp, Cannabis indica
tttgtgacgtgcggctgaaggtaagggcaagtggtatttttgtaatattttcattttgtgctgtacaaatgttcattgggccggcccacagtattgttgtaatatttttccatttttagaatattcctgtttttttccctaatttttattattatatgtatttctaaaaatttattatttatcaagattttcataaattaaataaaaaaaaagcttcagaaataaaaaaatagtaagtaatagagaagtaatttttacgtagttcgagcgttaataatctctagtttacgagttagttgtattggctccttggtaaattggatacttgcatttctaaactccaagatcaattacaagctatccaaagtttgctggcgggatccaggtcatggaatcgtgaggcgaaaattaggaaggatcttaatgaggcgctaagaagaaaatcaatttattggcaacaaaaatctcgtatttcttgaatccatgatggggataaatgttccaagtttttctttcttaccgcaacgatccgaaatagaaggagctcagtggatagtattttgaataaggccgaaatttggataaccgatagagatgaaattggcaatgaattcactgactacatgaaggatatatttagtaacccggccatggggcctttggaaagcttagaccatttgatctctgatcatctctctccttcggaacaagcagagatggaagttatccctagccaggaagagataagacaaacgttgttcgctatgggtagcttgaaggcttcgggccctgacggtatgtctgtcctcttcttcaagcactactggaacgttgtggggaaagatttttgtgatgcggtggatgacttcttccgatcggggaatttatgttggatattattttaccaggatct

SEQ ID NO: 318978 - DNA, 2604 bp, Cannabis indica
agagagagagagaaactcacaagaacattctctgtataagaactctcattaatacaaaagactcgtggactacgactgattaatgcccgaatcatgtaaaaatcacctgcattaattattccagagctctcatcattatctcatttaatcggttacggaaaaccttggtcaacattttggttattccagagctctcatcattatctcatttaatcggttgtcgaaaacctcggtcaacattttggtgctttcattgagagatgtcggaagcgttgttgagaagacaacagtcaaagaatcagaacaacaatggtggaaactcaaacaacacacaccaacctcatcctcgccaggatactcagaactcggaacttggaaggcgaagaagtagcctcatgagtaaatgtgggctctgaggaacgagatgagacaaacgatgaggaatatgaagaaaactttgaagggtacgacacttacgacagaaatagctatactgaactgctggtcctaaggcaaaaggcgactgatcatgaagccgaactagctgcccaaaaagaacagaataagaggatgcaagagataatggtcgccatgcaaaaagctatagaaatggctggaatacatgtacattccaatgtcatccccgtgggaccagaggaaatacaagaagaatcctcgccaagcactcagaggcccaagaccagggaaccaagccctatacggtaccctttcgaggagaaccctgaaaaaaaaaacccctacttcgatccctaggagaaataggaaggcacagaatccgcaaaaagtccaccctaatttcccaaaacggaaaggtccgtagaggggcaagctccctcgagcgagtcttggctctcaggatcgagaggaccgaaatagcgtattcgtgcaccaagaacccagggaaagggggaggaaaagtcagaggtatcccccggctcatctaagacaaaaaatcaatgagaagcatggtgacttaagaaaccatcttgaaaagaaaaaacgcgcattgccagtccttagaggcaccttaaacgaaggaatcttggctgaattggcaatactacgcaaagacattggtagagtctcccagagaaaaaaacagatgattcagactgattgtgaggatcgggaaccatgcacccgacacatactagatgcagaactccccaaaaattttaagatgcccgaaatggtaacttacacgggagattcggaccccagtgaccatctatctcggtttaacaaggtgataaccgtcatgagggtcagcaatgacgtaaagtgtttatgctttccactaacgttggacggttcagctgaggaatggtttaaaaagtttgagctaggatcagtggactgttagaacaaattacaattcagtttccggagacagattgttgcggcaaggaagataaacctcgaggtcagcgccttgactaacataaaataactgcccacgaaaaccttaaagaacttcataaaaagattcaaagaggaggcctcaaagactaagaaggtggatgacggacaacagctggcccttcttcaagctggaatccgcaagagggagtagctaacctctaggactttcagaaaagggtccaaaaatatattaacttggaagaagcccaaatagtggcttacggaggatactactcgaccggagaatcaggatatgtacttggagcacagcttctgggagccccatctcttaccactcctcaaatgagcggaatacaattctccgctaccccaggatataatcaaagatagctcccgcatgatcacactttggggcatccatgagagaggagcctctcttttcaatttttttgacaaaatagactaatattgagttatcaagttatgagactgtcatgttctatttataggctttcatctagggctaggtttaaatatatggattaagaaaaagataaataaatggctaaaaaaataattaagtggccagccattattgtggatccgactagtcataattttaccattttatttcaataacttatcttttcattcataaataccatattttaactttaaaccaattaaatgtcaaatctatttatttaataattaaaattaattatcgaataaaattatcatttatcttatttattaataagaccttacaaagtctcttaattaacaaataaaccctaaaatctcttttcttcacaattaagtccttccttaatgaaaaatcataaataagacatagtctaatttagaattataatagattaattaaaattaattaactgagtctacaagcagtgttatctcaactaatgtggggaccatgagcctatataatcaagcttccaataagtagatcaaaaatttactaagtaaaatttctaacttattaatttctcctgactccactattgatttggaattaaactctgaattatatagaacgttgtatatgttccaagatataaatacgctattaattatccattattttaatccaaataattaaagatcctctatagatgattcacatcgagtagggacacatttaccgttctacccctcgatatattttatccttaaaac

SEQ ID NO: 318979 - DNA, 1363 bp, Cannabis indica
agcgttatatagatagggaaaataagacctcttggtcattacaaaggataaaaacaggtatcaaggaaggttccacaaaaccttaatgtttcgagcaaaagcccattttgccacattatgggcagcaaaattacaacatcgcaaaataaacgaaaaattacacgataaaaagtttttagagagttgattacataaagagacataattatcaatattccataacgaatgtagacccttcagcgctttgataaccatttctaaatcactctccaccaagataaagttgtggcccctgagtctagccgagtcaagggcaaggcaacatgcagctgcttctcctatcaacgggtccctaaagccaagcttggaaacaacagcccacagaaccttccctgaatgatttctagccatggctgcaatgcacatagaatttccaccaaccctagcatcacaattgattttgatccagtcctcaggcggcggtgtccaaggaggaggagccacaggtaacatcggaggaaataagcatgccacataatctgtataacaatgagagatagagtcaattgttgttaaaatgttatgcagtttcaagttgtgtaccttgtcattttgggttctccaaatagtgtccacaatgactgaagcatataggaataccttatcagagtccacatcgttagcttttagcttccaaaggaatttaacccagtctcaagcccgaccaccagagtcatggattgggaacacccccaagggagatgacctctagagatggtaagcaaagttacaatataggaacaggtgttccattgattcctcagcctcctcacacaaagggcaagtcacatcttcaatttggattctcttggccaggattccacggagcggcaaagcattcgaaaggataccccaccataagattttatgtctttccagaattttggaattccatagtctactccatagtgttggagccaccacacaggcggaggctctttccaaagcttgaatcaaataagccgacttcgtggtgaatttcccgtttccttctttggtccaaatccacctgtctttcccttgaccagaaggcctgccccctttcaggatatcattgattgtttggaagtcaaacagggactcgagcttagggatatctcaatccccatcactcgtaagccaccttagtcaccctctcaggacaagaagtaatgggtttcgggtagtactctttcccatgaacaacccacaggtcattccaaacgtttgtttcttccccattcgatataaccttacaagcccctttcctgagaatatctatcgatttaaccacatttttctagaaccaagagtctgaatcttt

SEQ ID NO: 318980 - DNA, 1134 bp, Cannabis indica
ttacaaatttttttgtacagccctacttcaaacattcaaatcttcaaagctaaaactaagaacttcaaagtaaattctcaaaatttgaatacccaaaataaaatcaaaagcctcatacttcaatctagatgttcaatataagaacacaatagtctagccacaccaaaatcatcataatccaccaaaattaccacaacatgcatccataatccaagaacaaggttttatagcttcaaataaaatcagaaataacataagcaaaagggattagaaagttttactacaaattcctcatgcttctagtaaaaattcacacaaaacccacaccaaatcaagcattttctcttaaaattgtatttgaacaaaagcatagaaagagggccgtttggggttgaagaaaacccagaaaaaaagagtttatttgctaaaaattagattttattgaaatatacataattggtcaaaagaccaaaatacccctatggcatatatatagacataaacataacaagggtaaattggtcaaaaccactcacatacatatatctcaataattcaaattttctcatttatcatataaataccataaataaatcgtgaaaaatgtattttgggccccgaaccaagttcatcccaaaatactcggttgtgactataccgcgtcgacttgtcagaaaatacctacagatagacaaaataaacatactatataatattatagtcaataagcacaatatatcaaaaaaatacgattttacccttctcgagtcaaaattacgatgacacccttaacacaccaacaggtacttaaaatgcaataaactataataatttcacatattaaattatataataatataatttctcattaatacataattaacttagctagggttgctaatctggttattaaaccttaggatattacacctcgggtcctcaagtgctcaaaaatcaacttgcttcgaatataatttcgatgcctcaaatatgtctgtggtgtgtcaagtcgatgtctcaatgtaagttttggtcacttttcactaagatagtcccgtaaactgaaatcctaattgacgatgtcaacttggacgttgggtggaaaccttaggtgcccaggttggcttctaggtt

SEQ ID NO: 318981 - DNA, 733 bp, Cannabis indica
attaacaatgaatgtgatccttgcgtaaccgattggacacctactttgtatataaaggggtgatccaccatgaaaatggcacctacgaatcctttgctacagtggactaagcagatcacaatctgactgaaccactataaatctttgtcttatttacattttccagccttgttgtttgttcttgcattcccagtcgagtactcgccattctaggtcgaatactcgcacttgtcacttccctgaaaattctcttttatattaattaaataatacattttggtgttgcgaaattcactcaacaacagtaactatcttgaacttgttggcgtttaaaatattaaggtaatagtttgttatttttcattccatttcatcatttctttgaagcataattattattatttttaataatgattatatatttaaatataatacttggtttgttattaatattttttgttatttcagttatatttttattttgaaataaactttatttagtttgttattaagattctttattatttcagttaattttttttctttaataaactttatttggtgaggatgtcaattacaattcggtaaaaagtttatcattattgttataatattttttaggaaaattctacaatgcacccccttaaaattgatatattgatgcacccctatctgttttagcatctgaaataattttttagtcaaattttttctcatggtcatgtatgttata

SEQ ID NO: 318982 - DNA, 1220 bp, Cannabis indica
gtgttttaaaataaaataaaaaccattaaaccaaaaaaaaaataaattttttttcctctttctttcttcctgatgcttcttcttctcttccccttttcagccctaccagtgccataactcctccacacctgagctcatgacccaagcaatctagcctcaaagatccactatcctccacttagtcgtggcctagctgtgctccgcctccatcatacatccgttcatccaatttctaaggtcaaagatgttcgcttcgttcttcacttctcagttcttcttcttcttcatattttcttgttactcatcactgtctgagacctagatggagcttggagacaagttttttaggcggaggagttgtgacagtaagctttctcaattgctacaaaatcaacgaaggctaaaaactcaaattttagagcaacgatgggtcagttctgggatggtgcaatatggatatggatgccgtggtttttcagatcattggagagatttttatattttcttgaatgagtactatgttcatttattttttaggagattgctaaatttgaaatttgaatattgttttgatttagatgatgaaaaaaaagttacaagttttttttttcctctgtgttctgagataaaacatctgagataaacattatgacattggaaagtgagagtgagaaaaaaggcaaaaaaaaaaaaagttgtagataaaataaatatttttttttggaatttgtatttagttttattgatatttggttttgatgaaatattatttatgatgtaaattgagattatgattttatgagtatattttgagattttgagaagaagaaagtagggatgaaaattatgcaagaaaaatggattttttttttcttcagttgaatagtttttattttgttatgattttcttgttaaaacactaaaataagatttatttgacatttggatatatatataaataatttataaatgacacgtgaatatttaaattgtcactttatattattatgttgagctggatcaaaacacgtaatgggttaataggatatatgaacaaaatagtggatttgcaaacagaatgaaacttaaggtagtttttccaacaaaataaaagaaaaatgggttaagtgtagaataaattaaacataaaggggtttaggttcaaatttctcttcagtttttagtgcaacaactctaatgattcacaccaaatattctac

SEQ ID NO: 318983 - DNA, 671 bp, Cannabis indica
gatgtatattacaactacaatatatttggaatataacttcttaaagtaataaaataagaacatgcatgttatattttaaaaattatatattcaatttttttttttaagattttatagtttttttatttaatttttaaattttttatgaatttgaattatatatatacataaaatacttgttgtttctatactatttttgtataacaaatttatatatactatagtctatagtgttgacgtgctgttgtatattcaggcccgtctcaaggtgttgagaggcctagggcgaaatttgaaacgggactttttttacaaaaaaaataaaataaatattatataattttatttatttttactttgagattattattgaaattttgacacaatataatttaattttttatcttcatataacaaataatttttctcaccatataaggtaacttaacgtaatatttaattataattaatagcatctttattgaagtgttatatattttaggacttttgtaaaaaaaaaaaaaaaaaataagtaatgtcaaaaattaattgttaatttttttttaaattatatgtaataaatttttataaattttaaaaaattaaataaataattaataaatatatttttatttaagttataatattcttgttagttattttttaaaaat

SEQ ID NO: 318984 - DNA, 681 bp, Cannabis indica
acaacaaaataataataaaaaatccaaaaaattctccactagttcccctcgtaggagtatgggctatgtctcagtcctagtgtggctaatcatcctctcggaccagctactaatcatcgccttagtaagttattgcctcaccaactaagtaatcccaaaaagaaatcgacatcaattcaaaacctagaacaaaataaagttttataagattaaaaaaattccactacgcacctcacgtctatgtcataatagatccgaacgcttgcccggaatcgacttccaaatcataattgctctagtgaataactaaagaaaatagatagatgggagatggaagataaaaaagaaacgtctaaatatctaaagaagggcgtgaacttttgtacgtcgtatgcctacgttttctgaaacatttctggttgttttggtagatgaagacggaattattagagtcgatgttccttttcgaagggcaaaatcaaaatatagttgttgaacaagtaggtgtaactgttgagttcttggcggtgaactcaatggaatcagttatagtgatcctgctattgtgaaaaaatatgctagacgtgcacaattaggtaaaaattttgaactagatcgtgctactttgaaatccgatagttattttttttttattgttatggcataaactaatcttataaa

SEQ ID NO: 318985 - DNA, 1614 bp, Cannabis indica
tcctggtaaaataatttccaaaacaaggtacctctcatgcagccggtgcacaagtggaaaatgattaaaaaggtgtagctactaataaaagccaagattggaacaccattgcttagactcaagatgagaacaccgagaacgttgcagaaggtcatggtgatggcaaaaatacttaggattatgaaaaggacaatgacaattactactataaagattgatattataaagatggttgctattatgagaatgaccctagtgtggtgtgagtaattgcagagttagaggctacacaggcagccctaaatgagcatcaaaggcttattgctcaaatgaaaaaaaccatggagcagcttcagagcaagtttgatggtttggctaggactgatggaaagccatctgtagatgcggtgactgaggggcaagcccgtgagcaaactaatgctgaaacttcaaaccctcacatggacaaaggtaacggccaagtaggtgaacctccacaaaagactgctcctaaacctcatcaaaaagatacacctctggtcggacaaccctcgaggacgcaaaaggccactggcgctttttagcttagacacccttctaaccatcgagatagggttgcaccaaaaggaccaaccgcaaaagtccctacgcctagaagacgtgtagatccttctattcaaccaattaatatgggacgattgttgtcagccattctagagacagttggtctacggtagatctgcggtggcggttggatacaaaatacgagaggtacaagagcaaaaaggcgaggccacatggggtgacctaagaaatcatctaagtgatatgatgaggggacgtgatctcccggaaaaagttataccaagaggttggaagaacaaatttctaccttgacttagttggtaagaaagaaaagtggagcattgtcagattcagaggatgaggacccagaaccctgtgttaggagaatcacagagactccactccctgaaaaactttaagatgccccacattgaattgtatgaggggagaattgatccgtgagcacatcaggcgaaatacaacaagatgatgcaagtggcctgcgttagcgatgatgctaaatgtttatgtttttctctaactctaaccaagtctgtagaagactgatggaagcagttggatccaggatcgatcgatagctggatggatttacagtcggcattcggcaagcaatttattgccacacgtgagaaggacatggaagtcggtaccttaccaatgtcaagcaacaacctaatgaaagtctgaaggctttcattcaaagaatgatggaggcgactgccaaaataagggttagtgacaatctaaagctgatggccctccaatgaggactagctatttattccttgttgtggggacaaatgtagagaaagagaggcgagaccctaagtgaattcatggcaaaggcccaaggtatagttaaccttgaggatgcctatagtcaagcctttagagtccctcttccatcaacgcgtactatagctgctccaagttttgcatcccaaactcctgccccatctttgtcccttccaagacctcagtactctctgactgtctacggacctactg

SEQ ID NO: 318986 - DNA, 1050 bp, Cannabis indica
ttttcatggaaaattctataattctcgaacattcatcaattcacacataaaccaatatgaacacatttcaaatcaataaattgatcgttttaaacccatatttcatgaatgtaatataagcatagggtaaataccatttctgatcctgaatatgagttactctatttataaccatttagttttgagatgaggctattgggatttgaactctcaacctcttagttgttaaactaatcaaattactactaggttacaacacatatttagcattaaaagtattattatttattttattactaactatatatttttttttaaatggggccttcagcggtggggggcctacggcggctgcctccttcgtctaacctcagggccagccctgctaacggactttcgatctacatctattcagatggttagccagccacatgagattcagatagtgcaaatacgctaaagatcgaaacaaaaataaagcaagctcacaatttttgataggataatttaaaattagtgagcaaaaataaccatcatcttaataaatatcggagaacattgacttatatataagaaatgacacaatgaaaaataagtttaaaaaaaccatagaaatgatggcaaaaattacttaatttttaatattttaaaatttattatttactttttacaataaaaatgatttgtttaaatcattaattaactaaaattatgtttaacatttttcaatttagtaaacttatttttaaatacttatctatgtatctatatattgatataaaggaaagtataaagtaggtgaggtgacatcttataatttttttcacctattttattagaattactgaatttagtataattttgtgatttcttttttctattaagcaaaagtcccacatggtttgcaaatgatgtgtgtgttgtatttctaagctataaataaagtagttttacattcactttatttaatcatgggtgattgaccttgaatatctcaatcttgcctaattagttataattttttttgaattaattagtgtgtgcatattg

SEQ ID NO: 318987 - DNA, 643 bp, Cannabis indica
ttttttttttttggtttattttggagttataaagttgtcttctgtagctacagaaaaactgtttcagtactagttttattatttcgcattcagccgtttttctctttcaatttttttcatgatcttccacagagatctgggtatcaaataacatagtgtgggctattcctcaacaatatatatgaatgaaaactatagagaaagagaggctataaggtggccactagaatgaggaaaaggagggctttctttttctgacaagaaactgaaagtgaattgcttcgctttagggttctcacatcactttctttatgtaggccatcactagggttaagctttattttatagctaattaagtaattaattaaaataaaaagataaattagaataataaatcttatgtagttgatttctatagagttgtgcttggatttatgagcgctcttcaatttatgaagttcattagacctaaattgactttatctttttaattatgacataactaattaatttcattgttaacgcagatttttgttaaccaaaattaaatagccttttagtagtaaatattcgacataaattaataagtaataaaatatataataactctagatatttttacgtgattttgtagttaaaatct

SEQ ID NO: 318988 - DNA, 647 bp, Cannabis indica
tggcactaaaatgaacttagtgaaatcagatgcaactaactacagaaaagatgttagacaaacaaatactgatgcagaaacactgaacaagagtattatctaatttgccacacaaaacattacacttacagacttcaaaattttgattcatcagcttttggtgagccatcttcttttttgagagctttattgttgtttaatggagttgatacaatcttgcatccttccattttaaacttcttcaatagtgtctctatatacttcttttgtgggataaagatcccatctattttttgagttatttcgatctggagaaagtagtgtatttatcccagatcggtcatctcaaaacttttcatcatgtcttctttaaacttctttatcatcttcttattatttctcgtacagatgagatcattaacatataaagtgacaattattttataattaacaccttgtgtttttatgtatagtgttggctcaagtttgctccttctgaatcattattcaatgaagtaatggttggttctattgtatcaggctcgcggagctttctttaagccctacaaggcctttttcaacttgagaactttatcttctagtcctttccccacgaggccatgtatatgctgggttttatgccctaa

SEQ ID NO: 318989 - DNA, 744 bp, Cannabis indica
tttttttttatttcttttcgtttttcttcctttatatatgtttctttatttttgcatcattttttgctagagagggtttttatattgaatttttaagtaataatttagggctaggaattttaaggttatctaattcacaagtcttgggttttaacggtgctctatttttctaagaattatttttggggaattatacttggtgacaataccatgtaccattctaatctagaacttgcacacccagaccctttagaatcaaattaccctcaatttcaggcagtaattttttaacctaaaattcataaaccccagtccttactcaaaattaatgatgaaaaaaattagaaaacacactattaggattaaccaagaagaggtatccatctactataggtgattcttacatggagtcataaagggtaggtgtcgttgtcttcgagaagcagcttggcttgagtcacctaacttagcaaatattccctaagcaaagtcattatttttaccacaagtcactgtttgttttcaaccaagtgatttggattttgacattatggtgttagattttgtgccctaaattaaactctattccaatgtaatcttgaatattcatttatcaataaagaaaaagatttatttcattgcttgtttaatgtgttatttggttcatgtgatcatttatttgatttataaattcatccaaattcttatcacgttgatattcttgtttattgtgatgtcaacaca

SEQ ID NO: 318990 - DNA, 1147 bp, Cannabis indica
ttgtagggtaggtatagacatgctcctgacctacctaggattttgcaaaaatcccactaatggagtaaatacatgcaacaaagagctgattgctgggcctcttagaaggaattgtgtttgacgttgaagcagctggacaatacgggaccactgcacgtaggggacgtgtgttgccaaaagatttaaccttgaaaagtaaatgcctggaataaccgtctagaaaaaaatgtatatgaggtgcgtgcactaccatgtctcgacacaaggacaagatccgattctgtgtcagaaaaagcacaaccgtcgttgggcgatttggatttgtatccaaggtagacgtctgcaactcttttgggcggtcagcgtccgcgataggccctttgagtattcgtccatgtatcatttcggcagtctgtgagcttggacgaaactggattccgtagtagtattatgtcttttgtattcgggaagctgaattaaggtgagataagcctcttgctctgcataccttttagtcttgacctgttcccagattagttagtgaagcttctttgtgactaattttattaaggggttttaatatttagttaaatctaaatattatcttttcctataacccatatatgtagctcaataatttaatatgagttaatgggctgattaatctaatactatatagtcaatattaaaaaataaaaagtagcttacttatagatgttgctcatgtttcaaagaatagtttttgatttgttgataaaatgagagtttctctagcttattttttaaattgaaaaaagtattcataattaaggtcagagcatttctctttactttttctttctaaaaattagagcgtctggacttagcaatttttctgtaatatatctagtgagaataaagaaactcgaagtaaacgtagctttattactgtcgcggtacagggaatgaattattataaatttttgtgtttctttatttacacttaacatatctctcatttttgccaattagcaagtcgatgtggcttaggggtccgtgtcaagatttctcaagtcaacaatactaaatatattattgtattaaataatatcaatgcaatacaatacaatgtaatgttatacaatacaatataatacaatacaacata

SEQ ID NO: 318991 - DNA, 874 bp, Cannabis indica
cagagtgaagaaacgaataacatgcaaaagaagaagaaaatataaattgtgacggtcggagacacttacttgtacaaatccaccgtgacggtcagagacggagctggagacacaaaagacgaagtacaccagatagtcatttactacttcagtttcctccctctaatttgaaaatgattctatgccctaaagaagaaaaatcgtcacttgccctaacaagaaatgaaccaccacgactatgaaactaaactcacgaaggagaaggaaagagaaatgtggttggaaaagagaaactgtcagtacatcaatcaatatcaactttttaaaaatattgatattttaatacaataccaaacggttaccaagtttttaaagcctaactacccctatattaaccccagccctctcatcatgcagcttccctatcctatggctacaatacaatcacgaattgtatatctttatttatcattatgggacaaaatcgtgtccctatattttcttcactattttttatctcaaacaacaaaatgagtaaaacaaagtttatacaatattgctaaaataaagatcaaaaaattaatttaaatatgtatttgtgtataacaagcaaactcaaaaccgctaagaatttgttcttcttttcttagattggtctagtttgatttcttttttaattattttcttttttctgggactgtattcgggtgcacaaatttagtgcacttctttttgtttaatcacttgtatgacctgttgaccttttttatgtctctttcaattcaataaaaatatttattttcttaatggaaaaaattgagagtttgtttttttaatacgtgggaaaaaccttaacgtacaaaaaaaaattata

SEQ ID NO: 318992 - DNA, 1244 bp, Cannabis indica
atatttaataaaatatgtccatttaaatataatttattttctgggatattacatctaccgtgtttggtagaatacaaagaaagaaaaaagttgaggtcgatgtcggtattgaacatgtcgctgaaatcaagagattaaaagctaaaattgagaggctaaaagtacaaagaaatgcacaaacagaagagcttcaaatgttagacaatgaatatagagatgaaaagcgacattaagactattctgaggagcaagaaccgactgacaactatgaagaccaagaaaaacccttggcaaatgaagacgaagaacctgagcatgatgaagagcaacgacaaccaatggactgtaaggatgtaagttaatgtgtaaaattatgtttggataatattgacaatatcgtggctgagggtgtcataattgagtcggttggtttctttccatatcatggtgtcgtaatttcaaatgattatgcacgtgttcaaatcacacaagttattctaggggaagctgaaatcccatattcaagtggtgcaatatgctatgtttatgatgcatgtaacacattggtttcttggcctaagaaattgaatttgactgaagaggaatgtaataatttacttgtatttacattaatgttatattatgtatgaattgtattacaatttttcttgtaattatgcagggtcctctaattaagaagcttcatagttcaaataactcgaaggggaaagagaaatgtaaaggaaaagagaagacaatggaacatcttgattcagctgaatcttatgagtcattcattgcaaaggtactcaacaagactcatatttctctttatgccatgttcttggaatttatgagagtaaaaggtcaaaatgagtctgttaaggttcttgccaacccatccttattctactgacttcacatctacataaatttcgaagatgtcatacaagtggccactcaagatgaacttacgggttaagttatcttatttggactaatgtatctcattaactttgactaatatatcatacatatatatatatatattatgttagtggattttgaatatcttagatattcatccgtagtgaagtaggttctgtgtttgttgactatgtgaagatataaggaagaactttgcccatttgatgtattgctatgcacttaaaaaaagtttgggaatgttatggaaatagagaaaactctgcctattttttttaggactctatttgatttttttt

SEQ ID NO: 318993 - DNA, 956 bp, Cannabis indica
gtcttataaacaatttcttatcacatttaaatagatacttgtgtttttttttttcttttatttaagtgaaagaaagaaagttgtgagttgttttgaggccccctattatgtcaccctatttcattgtctctttactattaagatcaaatttaagtcacttaatagttaatacagtgaattgtgttctagattatgtaaagaaaaaaaagagtttgttcttgtttgattcaaattatttattttttatttgttaagttataattatctttttagataattattaattgtggaaaaaaaaaattggtgtttaaattttgatgagtcttcttaagaaaactttaaaatgtcttgattcttaagttatcttgatactgaagttttgtaactttatatatatattttgtgtgtgtgaggagaaaaataataagttgtgaaaagaaaagtgtgcgtgagtttgttgtgtggtaagagtgaggaagaaacaaatagtctattagaatttaggtggagagattgagatagaaaacttatgtaattttgaagtgataagtgaaatatatctctctttgtggatttagtaattttaccaaactgagtaaattgttttgcttcgtttttttgttatttggttgcgtttgaagtttatcattttttcaacaattctaaagtaatgcattccattcatctttataatcgctacattataattgagttgatgtactctatctttaaaaaaaaaattatcaaaagttaaggtacatcaaatcgagctaaaactaaaacaaatttagggtataagaaaatgaattttgttctatataatatgggggataaaattataccattttagtaaaatcaataaagattgttcttcactgtgacagtcagtagtcccgtgatccgtaaggggaaacaccgggtaagctgtgcaatcccacaccgcctggggaaggtca

SEQ ID NO: 318994 - DNA, 1218 bp, Cannabis indica
aacataaataacattaaaggggtattttggaaaattctaaattcccagccattcccgacatttccaatgtctaataaaccgtcccaatctactaatatactaagttgtgattttactgagccaaacaccgagttccatgttaccgggcaccggaaatgcaaacttatgaaaatctctaaatgacataaaatgcatttcagaattcaataataacagtataaataattatttaaatagctataaataattttcataattaaacatgattaactgctaatttctaaattaaactaagcggtctttataactctagacttcacttcttccttcctgcggagcgtattggatcgccatctataagaggtgccttggaattgacaaattgcacccttaaaaccacttggtaggcatgtgtataccgcccaagtgttaaaaattcctacatgggtggcatacactacacccaagtgcttcactttgggcttcttgaattttgattgtcatcttcttacaggttgtacctcacatacctttttcatgatgacatatcaattcttaaattacgtgtcatatcatttagtcaaaatattcgataacgggaccctttttatttaggaccgaccttgcacgtgttacaaccatagaaggagatgtcatgacgatctggaatcaataaagcgcttcagtatggctcatgggatgtttaccttaaaattttccttgatagataaactcttggtgaatccaattggttagtctagggagataatcccaatgttttttttttgatgcgtcgatacaaaatcgacgataataagtaaaaaaatcaaatattttattttggcgtcaattgtaaaccaatggtaatgatctgaagcgtctgttatgaacggacacaaaatatgtctaattttgtgtcggtggtacatacactggtcttgagaaccgatggtaaaaatataagtgtctatttaaaagtgatgcctaaacccattttttagtagtatttaacaatccattcatcaactctaccatcaccaccaagactattagcccaagatatgtttccaaaagaggtgaattggaaatttaaactaatttcggtaaattaaaacttttaacacaaaattaagcaattaaccacataatcaaataaaagcaagtaataaggcaagcaatgtattataaaaaatattcaaacttgtaaagtaaagagtt

SEQ ID NO: 318995 - DNA, 601 bp, Cannabis indica
aaaaaaaaaactaacttttaaacatggaaaccagttatttagtacgactaactaagacattgaacataaataagacacataaaaaaccagcttcctattagaaaaacaagtttcaaaaactataaataaacaactgagaagttaaactgatacaagacacctaaaaaaatagtttcatgcaaatatacaccaataaaactatgagaagataaattaaaaaaaatgaacatacttcaaaaagaaaacaacaatgtaccaaatatgaatccttaaaacttggatcaatttacttttttttttcttcttgatatgaaggaagtttcttcttagagtcatcagttgaaatctttagcaacatcttccattgtatttttactagaggaattagattccatttgaacaaaaacataaaaaaataaatcgaaactatttcatcatacaaccacaatgagtattatgaaaccaaacaaaacttagtttcatcacacaacaacagtcaagattatgaaaacaaaacataaataatatacaatgaaaataataaaaaccagttttatcagttaactaaaggacttttttcataaatgtacaacaaaaataa

SEQ ID NO: 318996 - DNA, 1852 bp, Cannabis indica
ttactgaaatgagatctcaatcattgatctctatcaagccaagctcgatgtaaatcattgtttcacttctaaatacttatagaagctatagattttatatctataattagcactctcactcaattgaactaccatgtccttaatctatatgtcatgagatgatctaattggtcgactttaacgaacaaaatgaagaacataaatagtacaactaagattgaacctaaccatatccggattaagatctatagacctaagatcaaccagtgatattgacttagaaagatataatggagtatatgatatcgtatccaacatcaatatcgatccaatataatgtatactccatacatccgatactggcatactttgccaatactcttgaaaggacataacatttatacaaggtgttagtataccttatcgctgattatcttgtcagtctaaatccagtgtactgacaaatcatgggacttaaacttttgaacatataatcatgattatattccactgtgttgacaacactataatcatgaataaatatatatatatatgttctggatttaatagaatttatacattaaacatataatcatgaaataaattatgaaaaccatgcaacataaaattatttctgattttttattaattagtaaatctgattatagtgaaataggtcttatttatggctccctataagatacagcgttacaatcgacctcactcttttgagttattacttgtaaacggtatgtgcacttgcgtgttgaattttcacaacagactacagttggattcaaatctattattggattagattaactatttacattgaattaatggtacttaaataagagataactagaagggtaaaataataattttgaccagatctaattatgatctaattaattagaggacgaactacttatattgattatatcaatggactactagaaataattttgtaaatataattctcgattgttaaatagtgcaattccctatttatagtgaagtaataatagaaataataaactatattattctattgatgagttcaataataatctagaatttgttagagctttaaaatataggttgatctctacacgacattgtactgagaaagatttaatatgaggaataatttcttaagagagaattattttctataagaattttttcttaagggcattatgataattttgaataaattgttattttgtataattgtttaattgtgaattgaataatcaaattgatttaactatttaattttactcacttaacactatattttagctaaatataatattatggctaaataatattatgagagagcaatatattattttaatagaaaataatatttatttaatctagatttaaataagaaattaacgataattagtcaattattatttattttaaaataaataataaattttatttaagataaaattagtaaagcacttttaggctttaaaatgtagttcatatgtgtagggtgacatacaattgccacattatttattttgaatattttattaaatagattaaccaaaataatttaatcatttaactatttaattatattttataagataagatatttaagattaaaatgattatataaaataaagataaattgaatatggttattcaattaattatttgaatttcaaataaaatatttcttatctttatttcataagattaaaaaaaaagttatatctatgtcattatagatttgacctaaatgagagataacataaaattgatataaaaaatggaacgacacaatttttcctctcaaccctaatatagtcgaccaactctctctctctct

SEQ ID NO: 318997 - DNA, 679 bp, Cannabis indica
aaatccaatttagattgaaaagacgtagtcagaaaactgaagaatgtaggattttaccagatgatgaaaatgaggatgaaggtgtacgttggaaagaaagaccaggaagaagctgagtcgatgatcgaaggccaccgaggagaggagaagagcagcgaaatgggcctgaaagtttagccggagctctgacaacgttgaaggcaatagtggcggccattgagaatgcgaaagcaaagtctccagaataaaaagaggggaagattgaggaattgggaatggagggaaaacctaaagagactacattaatggcggacggagattactactgctcctacgcctagtttaaagactcacttcttcttttaatttttctttgaaacattaaggtgtttttcgaagtaattgtgtaattactaagtagggtaattactaggggtgcgtttggaaagtcacttgagaattggaattagatgtaattggaggtaattacacagttggacgtatttgtgtgaccacttaattacataataactgtgtaattagaggtaattgagaggcctcaattaccctctccaattctcataccccatgagaattgggtgtaattacatactaaaaacaaattcaaattattttaattaattgctatgatattttaattatttttaatgtattgact

SEQ ID NO: 318998 - DNA, 1298 bp, Cannabis indica
atgtgtagctataaaaaaaaaatctcactgaaagtgctaaggttgcgtttggcaattgcataaaaatctcctttccaacacccttttttatccgaatgccaaacaaggcccttgttcctaacatttatttaaggttccaaatataaaagtgggatcaaaagttttacacacattaatttatcaaatgtaaaaagtgggataaaaagtccgttttgttgtagtgtttgattctactatcacttgaaaattcggtggacaagactcaagagtcaccaatttatatatagcatgtacactaagaagttcaaagtggaaaaatctttccctgattttggtgccctttgatactgttattttgcttagtaaataaatttatgagcactgtcatttcaaaatttcaaataatgccagagatggtaagttgttggttcttaaaatcattttgcttatgtttctatttaacatgtcaatttgttgacgttgtgcaattactcattttgtacatgcaaactaactaaacaggaaaggagacttgaggtttttggaattgtcttggaccaaaattaaaaatcatggttgtcctgaattttgaaatggtttacaagcttttgtagcgatggcgtcagaataaaaggattttgataaaagaattagatgcccttgtgtgagatgtataaattataggtttaaaaaattaggtaatgtgagagcacacgtatttgatcgaggttttgtgaaaggatatgagaacggggaaccagatgatcctgttgatgatgaagaggataaattaatccctattctgcaagacttccttcctccgacaatagaggatgtacaagagggaccaaccaaaaactaatattttgatgacttatttaaagaaattgaagctgaattgtgtcctaactgtgattggatttcgtctctcaactttttagcaaagctatcgcatctaacgacatatttgaggaattgctgaagttgttaaagtttgcatttctgaagaaaaatgaaattccatcaatgtactacgagccaaggaagatattcaacaaattagagttggcttacgagtctgtccatgtctgtcaatacaactattgcttaattttcaatgataatgcatctaaggagtcttgtccagcttgcagaagtagtcgctgggttacttctgagaacagcacaaggaaaaaagttccttgcaaagtgatgcaaacctttccgttgacacctcgactcaaaagattatataaattgacaattatagcgaagagcatgatatggcatcatactgg

SEQ ID NO: 318999 - DNA, 996 bp, Cannabis indica
cttaaaaaaatgtaaccatgatggttacaataaaaatgtaactattgaaacctcttccaatgaatttatatgtttaatagttttaattattataaataactttattggagatgagcatttatttttattgtattatgactaatatttatgttaatcacatataaaagatgattttacataaaaatattacataatttaacattattcataaaaaaataataaaaaaaagtattacactttaaattttctatgtaactaaatttaatttttgttaatataaatttttaaaaaattaacaaaaccgcgcgaagcggggatctattccctagtttattatatttaaaattgtatcttggttgtgtgagtgtgtgaggataatttgagtacaatcattccgtttttaattattctctttttaattctcttactttttaattttttattaagataaaattatttaaataacatctattgattttatctttagttttctctatttttttttttaaaaatttaacgtttaagtatatatataaaaaaattaatatatatatatatatatatctctaatatttataataatatatcacttcaaatacaaatgaaactaaagaaactttcaattaaagcatgagtaccaacactgaaagtatgaatttatttctaccaaggaaaaaaaaaagactatatgtaaatcactcaagtaattctgtctattctcttttcaattttctcttttttaatcattaggtttataaatattaatttttgttttctctaatttttaccttttttttctaataattatttaccatatctaaacatcttaaactaccctacctataatgagaaagtatttttcactaatactagcaattcgaaattttaataaactacatatcttagttatatcacagaatcacaatttaaaggataaattgcaaaaaaaaattaaaaggaagccatacctggttcgtcgacggtgccagggacgat

SEQ ID NO: 319000 - DNA, 1276 bp, Cannabis indica
aacctctccatgaaaaatacttgggcttaccatcgtttttggaaaagataagaagctactgtcccaaaacatcactgacagaatttggaagctgcttaactcttggcaagaaaagctattctcagctagtgggaaggaaattcttctgaaagcagttatgcaatctattcctacctatgttatgagttgtttccaactaccgaaaaaattgattgatcaaattgaaaaaatgatgaatagattttggtggggatcgaatgttacaggaacagatatccattggaaaaattagaaatctttatgtcgtgcaaaatgtgaaggaggtttggattttcgtgactttgttcatttcaatcaatctttattggcaaaacaagtatggaggatttttttccaatccaaactcattacttagtactctgcttatgcatcggtatttcttgaattcgggttttttggaacctgaggttggaactcatccttctatgacatggagtggtatagtttgggagaaagaattgctaaaaaatggtctaagatggaaggttggaattggggaaaacatctttcctgcaacagatggctggcttcctagtacgactactttcataccacttcaatttctggatataaaccattcgatgtgtgtctccagcttaatttctctagatcgaacctggaatacttctctactgtcgaggtttttcatcccttttgatatccaatgaatcatggacactcctctaagttatattcctcatcttgaccaacaaatctggcattacacttcggatggaatatacactgtcaaatttggctaccaattagcacttcagcttaacaaaaatgaagaagaatctacctcaaactcagaatcaagatggtggaagaaatttttgttgggctttgtgccctaaataaaactctatttcaatgtaatcttttctattcaattatcaataaaaaaatagatttaaattcattacttgtttaatgtgttatttagttcatgtgatcatttatttatttatttgatttataaattcatcaaaatccttatcacactgatattcttgtttattgtgttatcaacacagtggaaagtaaacaagattgtgtgattaaatgtattcctatgatttatcagtacacatagtttaattgatatgataatctacaacgtaatttcttgcacattggataagttctatatccttccagggcattggtcaaagtaagcttgggttggatgtatagagtatgtatcggaagggac

SEQ ID NO: 319001 - DNA, 1533 bp, Cannabis indica
cctggtttaatactattaagttgataagctaattttcacttgggcatagagaagagaagagtagagtaaaagtgtttaataaagtgttgtgtgtttgttactatttgaaggtaatgggataaagacaaggatatatcgatctttgtgagaattgatgaaggttttgaaatgacagaagcaggtgcagagaaggtaaagaaagactcaaaagacaaggagtgtgtgattaaaatagagttaacttttccttgatatatattatatggcataattttatatttatgatgagttttacttttaagtcttttgtgtccttcaaggacttaaaaagctatccccatctttgaccatagcagtgactactcacttcatgggttacatctctctctctcatgaaatcaaacaagtattatgctatgcttatccccatttaatattttgaggtacttcttgtgtgttgaaacttgaaagttgtggggctgtgaagtaaatactatatagtactatacaagtgcatttatattctttatttaatattttgaggtacttcttgtgtatggaaggttgtggagagtggagtagagtgtactattgcatactttaaatatttaggaagattaaatagtgaatattaataaaaattttggttcggaattgtgaaatttgtagagttttgttttctatttctttacttttgaaaaattctttcgaattacagtaatcattgtaaatatggctatttgattacattttgtttattttataaaatcatttgctaacatacctacaagccatatatacagttaaatggtaaagtgagtttggaaagtcatgatgaaattgaatttgtgtgtaattgaaggtaattatacaactatgtaattagaggtaattaagggattttaatttttacttacactctcaaattctcaatgtccctataagaattgagtgtaattactctgtgtgatttctataaattttctattttaaaaattaactactaaaaatattattttcttgtataattactatttattttatcaaacaagatattaagaattcatatgtaattaccatctccttgtattttaaaatatagtacaattattaaactgtgtaattaccacctccttgtattttaaaatatagtacaattactaaattgtgtaattacaaccttcatgtattttataatataatataattgctaaactgtgtaattactacttccttgtattttaaagaggaatgttaattacaacctctacttccgaaattacacaccgaaatattttttttcatagcggtattcgatatagttacagtatcaaccctgtaaatttttgaaaaatttcgaatagtttacagtaccgaaaacagagttcctgatatttcaattattttatttaactgattttcgtgtgtgagttttaatcttagttattttatgaaatcaatttttttgtctcaaaattttaactagttgataaatataattgggttctttatattatatttgagttattgtgt

SEQ ID NO: 319002 - DNA, 1058 bp, Cannabis indica
tattttttattttctctatgaataataaaactattacaataaattggcattttcattagggcataaaacccttatattttaaaatttatagatatatgattatggtatagttccttcaaataaaaaggtccccaatatcattcttcaaaagttaggtgtctcccagatattgttcccagacagctaacttgtcaactccggaaggagtctcatggaatgatagttgagtctagaagggagttcttagatgactatcatgtccactctgggtctagtcttcaagaaagctagcctcactccgggatggaattctagttgtccctcctggaatggtagttcttgatagtcgactccagtagactcaatcttatccaaaaacgccatcaatgagtgtccctagtgcgtgagtctagaagctcacatgtgttcccgtaggctctcatagttaaactgacatgtaggacttcgctcaaagaggagttagttaagttagtcagtgctatctaacttaacaacctcattttgtagccatagactttaggatcttattcctaagcctatatataccaccttgacttgttattttaataataagagattttgcacttagttcaaatgacattgagagtttgggaatgaaaagattgagaggtggagattgaggtgcagagaaaagagagagattgtgtttgggttttgtaagaagaatcttctatggatgaagaagattctagttttacatactctatttgcctctatttttcatcgatttatgtttagtgttggtaaatcttgtcattgctagtcgtttggttgtttagatttcagttgttttgattctgcactgttagttgtaatttcccacaaatcaaagcttggtaatcgatcaagaatgcagaatcaagattatttctggtccaattcttgaagaaactttgaatgacatcagtggctagatttgaattggagaagtttgatagaactagggaatttgcgctatggtgagaatgtttgaaaggaatcctagtgcaccaaaaagtctccaaggttcttagaga

SEQ ID NO: 319003 - DNA, 641 bp, Cannabis indica
ctctttcaatttatgtttacagtttatagtttatggtgttgcatttctattgagttcattgagattagaaagaataatgggtaaatgcttttgtgaacctgtagtgtacagtatgatcttattgtagaaagcttctaatccatcagaccacgaagctatacgcccctgtgataacggagaccgcaatgacactccatagcctcgatgtaccctcgccctgccacttgagctccttcggtggagctcgaccctcttccttttgtcgcctaaacaaccccaatttcaccatagcttcgtcttctccggctaccagtgagtttttcttttcgttttcttttttgtactaacttcactttggctttcacaactccatttttattgaattcgctttggaaatttgttttggtttagtatttaagcggttctccatctcctgtgcggtttcttttcgaccttgcattgatattcataaggtatctttacttccccttaggatctaaggcttttcccatttcatatatttcaggaaaagaaactatctttatgattttttgtagtagctgaattaagtttaatgatggaaaaatcatacaaagtttgggtttttaaattttctttttctttgtttggattggaattaa

SEQ ID NO: 319004 - DNA, 1277 bp, Cannabis indica
aaactcatgaaaacatctttctcataaatgagcacagggttgcagcatccccaaaaccctgagccaatgagacatgcgagacataaacgagatctaacaagatttcgtcgattttcataaagacatagggcatactaccgaagagtgtcgccaactaaaggacgagatagagagtctgatctcgcatggatatttcaaacaatatgtgaaacatcaagggaaccagccaaaccagcccaataagcccaacaacacaaataaccaaagattgaaacctcccttgttgagggcgaggatatattggttatctcgggagggtcgcatctcgctggagagagtaataatgccctgaaaagaaatgtcaatgaaataaaaaacgagcaatcggtgtttgctccagaacaactgaaaaaagccaaaacagaagaacctccaatcatattctcgaaggaagatacaaaacacgtgaggtatccacatgtcgatcctctcgtcattttgaaatgttaagattttattttatttttattattaatgtaattatttatttaatttttaaaaaataaattgtcgttttaattgttacttacttaaaaaggaagagagagaaaaaaatgttaaaagtatgaaattgtaacaataaatttcataaaaaaagaaatgtagtaatacaaaaagataaatcaagttgtcaaagctaagtaaaaaataaattccgtaatacaaaaacacgttgaagaagtgttattgtttttcatattccaattaggtcaatcttttgttatttttttgttgttttgtagttgtttttttttttttttgaagttatttgttaagttgttctataattttttttagttgtcttagttgttttaaagttattttttattttattagtatttttgtaattttgaaactgtaatacagtatttttaaaaacttgatagaataaaaataaaaaaataataaattgtaagatccctaataacatgtggtgctaaacttgtccgggctagacccaattaatttgataataagaagtaaattagtccacccgatacaaaccacaattttcggcttcaataaggcccaaacattcaaaagccaaaaatgggccatactacctttcgagcccattaaatcttcagtgaaaagggttatttacacataacaatgcatgtggtagtaaagtcatttgggctagaaccaattaattagataataagatgtaaaatgattttaaatttaaaaattaagttagtaaatgttttattttt

SEQ ID NO: 319005 - DNA, 851 bp, Cannabis indica
tttaatatgtgtttgctaattttagttcttgattttattttctttgatttaacttttgttaaagtgtgatttcaaagttggaattacaaaaattaattcttatgtatcagagctaaatttcttatagtgagattattacttatttaaaaaatcatgaagttttattaggaaaagagttttttttcgcctaaattctttcaactattatttcacttgcacttaatttttaaaatttaaattttgatagtaaaatcctctaaattagagaaacattagtaaatttaaggtgtcatcaatttttcacagttaagttgtttatgtgtacactcgtatatacgcgatacatttatattgatacacttaaaattattatttaaaaaattataatatttttaatattttttatattttattttttatttttataattttaaaataataatattaaatgtaccaatataaacatgtcatgtgcacaagaatgtacacataaatagtctatagtgataattaatcaaatgacacaaaagttcaagcacgctaaaaactttaaaattaaaattaaaatttaaaaaattaaaaatgataaagtaaggtggtgtttggtttgatgtaatgtaatagtaatggtaatgtaatggaataagaatagtaataggaattgattacaatgtttggtttgtagttggaatgaacattgtaatcagaattattgtgtttggtttggtatgagaatgtaatggaataaaatgtgtattgactaaaataaccctattgcatttattataaaattataaaatattaaaaaaaaaaaggataatatagactttgacttttttttactatatttt

SEQ ID NO: 319006 - DNA, 1860 bp, Cannabis indica
ggccatctcctcatcatagtgccccgaggatgaaccctctggttggaaggtggtttggtccacttccaacctactctcaaacaacgttcttccttgggcaaatgtgctctttaggagagcactgttccccatgtatgaaagattagcatcagggttacacacctttaactcatagatgagttatgaagataagcttacatattcgtccttgatggcctgctggccattgagggttgccctcaacttctcctcacatctagtgaggttagtctttagcgtgtgcagcatgcatggtgttttcctagttcttggtgctgagcatggcctccaaaccaaaagtcatgctccggttttgctggccaacaacctccatgttagtcaaagccttgcgcttcgtgaggaggtcagcctccaaggtctttatcagctcccgaagaacactcgaaaaccccctagagttaccatgcaagaaacttaacttcacaaaggcctaaaaataaaacaaggtaaaaatcaatgtcaggaaaaaacactggttagccagtccttccaagaagctgccaaggctggccagcccctcaaagacaaaacattggccatcaaacatcatgcaatagccactatggccagccaagctataataatgccagaaaaaaatgagcaaagtaaagtgtacaactcactgtagctaaatcttgaaggccaggaaaaaagagcctctctggctcactgtcatcaagctcttgaagctcatcatccataaaaggaaaggctctgtcaagatgcctacgagcagcttccatggctctctaccccgtggctaagcctactccccaactaggcctcggggtgcccctgcccaaaggccattccctcctcattagagggtcatccatcatgggttgcccagtcgacgtaggccctggaggaggaggaagagatgatcccgcaacatctctggcacaagtggtctgagctaccttggctcttggacgacctaaatgctcatctaaaggtccaccagtaagacctctcaacttggaagacaaatatgcaaaaagaaagtagcaaagtcagactgaaagttacaaatattcaatggaatacaataatataaaagatggtacaatcaactatcaaatactatcatcctcaaaagaggaatcatctgaatccttaacaactgccttgcccttgcctctagatgtaggcaagggagtgggtcctgcagagctcgagcgtccaggcctaatctaaagagaagcgtcaccaactgttcccccacaagccttttgttggcggagggccctctctctcctctctagaccttagactatttgggataaaggaacatcatcatccatatcagggacttgtccatcactaggacagaccccctcagcagctggggctccatccactccaagtgatgggccctgggcccccataactcccaaggcaggagggtactggtcgtacctcttaaaatttgccatattggccaacctaattatgttcctcttctttgtagggagagagaatatgatttgctctatccctcatctgcaatgtagggatggagcgcttgaaaaacggaactcactagaagtggcggtatcaaatctcatggatgtcccacgcaatgaattagttctaggcatacccactaactttggacaaaggcgtgctattggtgtctcccaaccactaatgggcgatctaattgaagtagaagtatctagtccggttctacttcaggcagattttagatcgaagtaatatccaattgcatatggagtaggtgttaggttttatgccctaaataaaacccatttcaatataataagatttactaataaa

SEQ ID NO: 319007 - DNA, 1609 bp, Cannabis indica
aaaagaatttgactgagcttattttaagatggaacggtgaagcagatgatccaggaaaagaaagagaagtacttaatgcactccaaccacatgagaatttgaagaaactgaaaatacaaggttataacggcacaaacttaccagattgggtaacacaagcatcattctctactttggaagaggtttatctagaatgtaaaaattgttgcttgtctttgttatcatttcagctacgacgttcactgagatatcttcatatagcctgttgtcgaagtgatattcagggtatttccttaaataagccatttccactcttagcaagattagagctcgacggaataactacattggactggtcttttacaaatacaagtgaccaaacatgtgagatttttccttgcttgaagaaattatatctaagaagttgtgggaagataaatatggcattacctataggtaactttccatctttagaatattttgaaattcaagattgtgatgaattggtgactatatttccaccaagtaacactcatattgatgttgcatatccctcccttaaaaatttggtcatatatacttgttcaaggttggagtcattttcagaattaggattattgccctttactttgaaacgtttatatattacagcatgtgatgtgctcatagaaaatcgcatgaaatggaatttacaagactctcatcgttgactgagttagaactttggtattatggaggagccatggattcatttcctgaagaattgttacttccaccatctttaagttatctgatgatcggtagatttgataagcttacaactctgaatggcaaaggttttcgccgcctcacttcacttcaacgattggaacttcttgacttgagcaagctcgagtgcttaccagaagaaggactgccccaaactcttactagaggatagaacaatgtcctctgttaagtgacaggtgcaaggaaagaataggggaagattggccagattcaacacatacctatcatacacatatcttagtaataatgagtctcttttactcaacaggtaacttttcttctttatttcaatttaaatgttctgtaattgctaagtgtgacattttatttttatactttttattttgttactagatcaatgagcttcttcaacttttatctcttgatgctgctgatcttgccttcatgggaaatgtctttggctcgactttcagagggttgtcccgtttacttgatgttgttacgttagttggatagttggatagtttgtcatttgtcttaaagagtctttacaaacattgttaggttaatgttcgagtgaaacctatggtgtgcttagaataataatcttgtacatgaagtgtaatagttatgcactaattgcactttttgtctttggtttgtgagtgattttcttttgctttagcttgtgttattggttttttttttttttggtggtttatctttacttctgttgtgttgtgtgagatttgtatttttttttcttttgtttttgttgttgtttgttaccacaatattcttccgagaggattttcaataaactcggaaagagatctttaatggacatgtgactgtgtgt

SEQ ID NO: 319008 - DNA, 502 bp, Cannabis indica
aatattcatatatggattatggatatatatacatatttatttttgaaaaatattcatacggatatttgattaagcttaattagtaaccaaccaaaagatcattgcggagattaattaattatttgaaaatttcaagggtatttgttattatttgtttttttaataaattataaaattttattaattaataacaattaactaaaatgatagcctgtaaaattattaggtaatctctttattagagatacaatcacgataaaaattaaaaaaaaaaaaaagaaaccaaaattatcagtcgcttgattctcagatcgtttggcaaaaatttaaaataaaatcaaataaaaaagaattataacatcacagtgaactttaagaacaacacatatatgtagtttcattacaattaacctcataagacacaacagtagaaactgttgcagtacgtaggttcaattcgtagctcaagcactcaactatgtgtaaggtacgtaactgcact

SEQ ID NO: 319009 - DNA, 1464 bp, Cannabis indica
ttcaccttgttcattcgaagcttcgtgaaatttaaccgtaaacccaaaaatttcaaacttctgggttttgacgtgtttttgtacatttttcatccttttaatatgttgagtactcctggtcggcatatttgtctgtttactgttcgatatctcggccaaacactcatctcgtgtgttgtcttttgtagatgaaccctggtgagttttggggaagtgaacaccgaatagacaaggacttgcttcaacttctgtacgaggatcaacctcttctagtgacggactttctaactcgagctttgaagattgggaggtgagtagtgatcgttctcctactccaaaactggagggcaacaccatttttactctgagcagatcatcagagaagggtacgaccgcttcatttgggtgagccctttgtccaagatcagtgaggcacacatgagggccttggacaaggctggatatctgggcggacttgagtgttacgtcccttcatcaaatcactgagccacgaacccgtagaaagggatgtctgcttgtttagttgcccatactaagcaagggcaatgttgcctttgcactcatacttcaagaaggtggcagattattttttcctttgtccgacccagttcattcccaagggcattaagtatttgtgtgccctgttcatcctatacgccattcaaaaaatggggtgcgccatctccgcacgagatcagttggttttttaaacctgaaagtctacccaaagcaaaagcaggttgggggtacttctacttctctcagccagatttcaagtggttgataggcaccgtggacaaggtcgttggcaagctcaggggttttgttgacgagtattattttgtggaaagcatggacaccacctatactcggtttcaacagatcccaatatattaccgtccaccccttacactgactcttagggacagagcccaaaggattctccaactgtcagatgctgctcggaatatcactttgttgacctctgagacaaactttgtggagtacgggcttcatccagcagacattatacctcagcctgtgaaggggagaaagaaaaagtccactgttggtcgggctgagggagctgagcaagaggaggagctcattcaactcaagcgtgaggctaagttgaaggatgatgcaggagccaagcactatgcttaggaatattctgagcaagagaaggagcttattcaacttaagcgtgaggctaagttgaagggtggagctggagccaaacaataggctcaagaatattctgagcaagagaatggggctcacgaatattcagagcaggagaggccactcaaacagaagaaaaccctcccgacaaggcaaaggcccattaaaaatacaaacaaagatcagagagcccggtgtacctgctcggccatccacccttatagaaggaaaggggaaagccatcctagaggagcagga

SEQ ID NO: 319010 - DNA, 761 bp, Cannabis indica
cccaaccaaacgcctcctatatgttttagatttaacaaaaattgtatattgaaccataaacatgaaaactacaagtaaacataaacgatttcggatcttctattgataataaataggattgtattaaaatgatttttattgaaggcataaaatccaaacagttgaagtcaagcttaaagaccgccttgctggtcgtctattcagaagttaaacgccctaaggccatgcacaaacattgttcaaaagttaaggaccctaaggccatacaagaacaaaaatatcatttgttcaaaagtaaagggcctaaaggccatacaagaacaaaagatgaaatatgcgaagtaaaagcatctaaataaataataaattcctcaaatgttttcagaataataattggagtcagtgggttcaaagttgtattagaaggactagttgtccaaacttagtaagtctttgtcaatctggttgtcacctccctaaaagtcttctaggttcatccctataaaaaggcagagggaggtgaacaaccagagaacataaaaagacttagacaaaagacgggtcaactggccaaaacctaagggtattaactagacagccttgaaatacaaagccaataatcagaaaagtataaaatcaagaatcacgaactagacaacctatgaatagaaggccattaaccagccagggaagattcaactcgagatgtattaaatggagctcctggaagaggctaagtaccaactgttgggttttatgcc

SEQ ID NO: 319011 - DNA, 1294 bp, Cannabis indica
ggcccaaaataaattttttttctatggcccactaaaagtcagggccggccctacatgaaggattttgttgagatcacacatgcggacctaatctttccaagaaaattatttcctaaggctatttctggcctactatgaagaagaatcgcactgaatgtgtccacaaatgtgagcaatgccagtgttactcgaaagttccaagggctcgaccaacaaagataaccctcatgaacagtccttggccctttgtggtctggggaatagacttagtgggatcacttccaaatagaaagggaggagtcaaattttccattgtcactgttgactacttcactaaatgggtgaaagctaaacccatgaacatggtgacttccacgaaggctctagactttgtgattaaaaatatagtgtgtagatatggacttccacacaagataatgtctgatggaaagcaattcaatagtgatcaattcactgacttttgtaccaaacatggaataatcaaaagcttttttgcaatgcccagacctcaagcaaacagacaagtggaagccctcaataacattctgaagaccaccttgaaaaagaagcttcaaacttgtaaagctcactagctgaaagaacttccaagagttctttgggcctatggaaccactgaaagaacttctacatgccacactctataccccatgacctatgggtgtgaggatgtaatcctagttgaatccacagtgcctacacacaggagggacacctacaaaccaactcaaaaccatgctctactttaagaatccttgcatttaatttaggagctttgagagtagtcacaggtccaactcaagatgtatcaaaatataattgctagaaatttcaactctaaagtcaagagcagaagatttaaaatcggcgaccttgttttgagaagggtatttatagcctcttaagagaccggagtgggggtcttaggataaaattggtaaggtccatatgaagttatagataacattggtgataagacttaccatttaaagagactagatggaacaagaatcccaagagcatggaacgttgaccacctacaccgatactattaataaacttgggggtggtgaggttcctttttatttttctttactttttattaaagtgttaatttctatgttcacctcagggtaggatgtatctgaataaaagaagaagttttcattccatatttggtctttgaatgttctgtctgttggaaatattttaccaggatctagatttactaccaagtatgttttattaacatcct

SEQ ID NO: 319012 - DNA, 1498 bp, Cannabis indica
aactagccttagtccatgagtcaatgttattatgtaactctttagcttgaaaagcctttaggaataaaatgaatgtaagttcttaagtttgcttgagcaagtatcgcaattcaacccttaatccataagattcattgattatttatagttttgagaattacacttagtttcccttttccctctattgtagagtttacaatgaattacacacttgggttgactcgttaagtccatcctaagaaagagaagatatgttgaataggcagattggatacgattagaattagtcaaaatagtgtcctacaattgtggattacttgttaattaattgcttgatatctattttaggaagttttcccttttagcttgatgtgattcattgtcgagatctggcaaactgatatttccttatttgtatgcaagaataaaatgggaaatcgaactggtctcccaggaatacgttgtcttacccttctggcctcacggtactgggcctcattccaaacacgagctaccacaggcggaaggttattcgatcacggagctgaagtacattcctggaaggtcctatataatttgggcttagcccaacttatcttccatggggacccattggtgggcctttgatgctgacctagattgcacgtgtccacagtcaaaaatgtggataacatttacccctggctttcagaatgttgtgtatcgtggagtcttgcatcactccatcagtgtggacacgtggaggatgagaagtaatatcacgactttccaagtgttgatcgatcgtagaaggtgacttttgttctttgattgtagtatagccatgtgtcagccgaatggtggtggaaagacatgagtatcaatgagttactttatagaaacaatattttgacggttgttcacttttttggcacaaaaattaataaatgtcatcttcatcattgatctgtgcctcaattctatggatcatcaattgtgatgacaagcttggattgttgaactccccaaccatttgatgaagcttgtgtttcttgaggtttgatcatggatctcccatcctctttcacgtgaattgcctctttgggtattaataccctttacgacttcaagttaccactttttcccaatttaaaatttttgacctttcaaaattcaaaattttctctgcactcttcaagaaatatgactacatacttaaaagccccgcaacaagggcataaaaaattatctctgcatatacaaaaaaaaaaggatccttatcccaaaagataaaaatattaaagtatgtaaaaagtggataaacttgttcaagctaagcatcttcaggctgggcatcaatggagaccttcgggattgcatagtcagtcacagaaggagaatcaacagccagaagagctaggtcttctaagtttttgttgggttttatgccctaaataaaactcatttcaatataatcacatttacttattaataaagatcagaaataacatttaatgtt

SEQ ID NO: 319013 - DNA, 1323 bp, Cannabis indica
cataaatacgctggtaaaagttagattttagccactgtaaatgtgcgctgataaactttgacctttttgccagtacaatttgcgaaatgcgctgataaaagttacttttaccagcgtacgtagtagcgaaataatgtgcaagcaaaagtgacatttcttgtagtgaaacaaagaaggtccatctcgggatacacagtatacataatagaatgattgtttggaaatggaagataatgaattattcaaagagttcgcagctcatacaccgacagactcgtgagtacagcatggctcatctcacaattgtcatactgtggcaagcgtcttgcttctgcttcactcaacatttatagaagaacgcaaaaaatattacttaaaatatacttagacgcttacaatcctctacaaaataaagcatcttgaggagattacttgcattgtgggaagaaaaaggcatagtcatgtcacttatagataaagctaaagaacgcttacgtttcatgaacgattataaggataagatccaaagagaataattgtcactctaaaactcttataaataaggacaaaacttagagaacaaaagatgatcaatttaagaaaaagagagaatcataccgatcttttattgtactctgtataccatttataaaattatagaataagatggactcgtagattatgaaaaattaacttcaaaaccacgttaaaaatccttttctcatttattattattatttatttaatttttgagtccatttattacaaaaaaaaacttatttatttgttaatgaaaatatgcattaacactactttttctcaaaattatataaaatcaatattatggatatttatgttttttaaaaaaaaaagaataattaataaataattcaaagacctgaacacgagaaacccaaccaaccctcaagaccccaccccgaaaaactctgactctagtgacacaccacctcgagaaacagacttagtaacaaatttaataaaaataaattagtacgttacaatacacaaatccataaacaaaccctattcacaaaagaaaattccaaaaaaaacctgaatcacaatacaaaatacaatgagattggatcgaagagaacatgtgacctacacgactgggagcctccatcatcaccactgttggcttggcgtcgtttcttttacctgaaataaaaaaaaaatagtataagagcacaaacttaacaagagagaacgatatggagagagacgcatgagatcgagagagggaggacctaccgtttcccgagtcatcttcgacgattggttcgagatttgggttgggtt

SEQ ID NO: 319014 - DNA, 597 bp, Cannabis indica
tttttacatttccaattttaaaatcagaaaattaattaaataagtgttaccaaatgccaccttagcttttgtaatttataattgagcatttaatagcaccaatggtgcctaacacatttagatatgtcgtcttgtgatttgctagcgatattcttttaaaattattacattaaattatatagaactcaatacttaattgaatcaattgtaatattgatacataaaaaagtgctaggcattactgataccttttaacatttatcttcttaattgtactttttacataattttcttctatgtaaattataatcataatctcagtagtcatagataatattacattgatgccaatagtcatatggataattatatgatttaattatcaccaataaattgtattcatgtaatattaattttagtaatatcaaaagaaaaatagaaagtcaagagtccttttgtcaatttatcttggggtgtttataaaacagttgattcaattcaatccgtaggatccaatctaatcctcaaagtgcggatatccacacttgtcggattgaaaaattcaaaatccgcacttgtacggattggatattgatt

SEQ ID NO: 319015 - DNA, 950 bp, Cannabis indica
aatattacataattgattttgtccagatttaatgaatataaaatattcatttatcagaaaatcaattatttatttatttccttaaatagaaaatcatttccttaattagaaaataatttccatatataaaatattctaatagttgcaacatgaattttgtaaaattttgtaaaccataacctcatatatatatatatatattcacattttaatttaaatttaactactatatttaggaaaacaaaattgttattaatttatctatgaaacatatttgtagaacagttaatagtttgttctaattgggcaattgtattgtaatattgtagtcttaaatgcaacatatttaaactaagattgattaaaatcttttatcttatttaaaaaaataattcaatgaatagtgctaaggaaactctctgttacacttttttttgcactttttctttatctttactacaattgtcaattattaaacaatgtcaattttttttttattatttagttataatattattatttttaaatcaattaaacataacattaaatgagtggaactcatcttaaaagtcaatttcaatattctacaattcactacattttagtggccataaaccccccctccccccttattttcacaaaattaatggtacccattttatttttaaatccctagatagggtatttttttaaatctccacaatagaagagtcctaactatacatataaatgtgagatatgagacggtgacatgatattttaaaatctctctaaataacactattagctaaaaataacatatctatctatctatatctatatatatatataaatctaaagtatgaggcagtgacagactctgttattgtcagtacagactaggggtgtacatcaaaccgctcaaaccgcccgcaccgcaaaaaaatgcagtttgaaattcttcgcggtgc

SEQ ID NO: 319016 - DNA, 732 bp, Cannabis indica
accatcctctttcaataaaaatgaagattctgattctgggattcaactggattggaaattcattttggcgggacttgtgagcgggcttgttattgaagtctctcttggtgagatgttgatcccaatgacacgactggcgctgtatgtttatatctctagaacaagattgagggagatgataatgaactgagcgtgtatctgcaataattgttggtaagagtagtttgtctctacgttatttcttacactacattaattagtatgcaatcaaaattggtgtcgtattaaatttgacagaatatttcctatgttttattttaagattatgttatgataattatgtataattgcaattgtaatatgcagtactacacaggagggtggcttcaaattggggtggagtactatgattttgatgaagtcaatcatatcaaatatagaagcctcttgtggagtgtgatttggtccatttgttttgtttacttagatatggatatattctaggttaatttccttatagtttttatttgggtttcttaattgttttctacttctttaatataagaatggcttaaaacttttcaaactaatacatgtgtttttttatcaacttctgtcttgatttgcatgtattaaaagcagttggactatgaacccagacctggacacaaacctggacacaaactcggacctaaactcaaacccatacctagaataagacccaaagcttga

SEQ ID NO: 319017 - DNA, 1123 bp, Cannabis indica
ttcatataaattctagggtaatatccctaaaccgcattattatcaaactcaaggtactaatttaccgagtgtaacttaattatgccttgagcgcataattctttattctaacatatttagcatggcataacactcaaaatcatttaattactagggtgataatcctaggccatataactactcattttagggtaataatcctaatcccggttcttaactaatcacacctataatataaaacatgagcgccactgcgcttaactctacgtgctaactactgtctcacctgatgtcctgcaaatgtggagattctaattccccgagtgctcctgatcaagtgccggtaatcctagtcacaatttttggaattttaatccctaaatccattctcacataattataaaattagcatacaaattccagataatcacatagagctcagaacgagctttccgatgatataaagaacgtcctaaacgaagtcctgagtcaaaagttatgacgaaaataaaaacctaaaaaaatataataaactgccaatgccatggtcgcgactaggcttgcaatggtcgcaactagagcccaaacagaggctcatcctctcttgttgagtgctaggtcgcgaatactaaaaataggtcgcgaccactaggtttaaaaacccaaaaaatgcccagaaaatcatatttaacacaattcaaacttcggccaaattatctcaaacctacccaatcatggcaagacaccaaaacacataatttcaagctcttaacttcagcaaccatgcatcaaaagtttcaggtttgaaaacaaccctaaaaactcactaacaattatagatgaatagctcatagattaacaagttcaaacaaccaaaaagccataaattgcttcaattctctacacatgcatcaagaacactcacaacctataaacatgctcttcaacttcaatttcagcagcaaaaattaaaaattaaaacagtaggaaactacctcaagcctcaagcacaatcaagcctcaacacctccaaatttcaagcttgtaatcaagaccaattcacaaaaatttacaaatgaaaaagatgcttacagagagagagagagagagagagagagagaga

SEQ ID NO: 319018 - DNA, 1200 bp, Cannabis indica
ataaatataaagattgaatttaagattcaaatcatccgccataaaaaaatataatagtttgaactttctattttttataaatatgtatataaattatataatatatagattatatataataaaaatatatatataaaaaaaaactctcttaattgggttggtccggttagttcgggttgattgggcgggttgatattattttcaacatacccaatataaagattgggtgggttatatttacgtcggatttttttatttgcattttttcgtcgggttatttcgatttgatttggacaggttattcgggttaggggatttacaaaaatttatgtacaacccatataagtatttgagaaacttcgaaagatgaaaagtatacctaataaagacttttcatcttgtttgactagtcttattgtaagtttcttttagaattaaaataatggttgggtaaaaaaaattattattattattaaagaaagtaccaaatttcattaaatcaaatcaactattatagaagaacttaaaaaacaagaagcattcctctatgctctcttattctaataatagaagttattattaaaaataatattcaaattagattcctaaacaagaacaacattcgtctacaaacgctctcttattctaataatagaggttgtgagtgtataaataataccatttgctgaacacgaaataatcacaagaatcactatcaatagctgccattgaaaaattaacatctactataatagaattaaaaataatattcaatctaggattcctaatcccacccacaacctctgtagagtcactttagatactggaaatgttgaaatcaaatctttgagtataatacaaccctaatcaaatttttggaggtttgcattgtctaatttttttcatttagttttttattttgattttttattttgaggtgttcttatcttgcatttattttctttcatcattggtagacaaaacatccttatgctttttgatgatatttatcttagtgtcatgtactctttataattttgagatcttgtgagtaagttgaaattctataattaggagttatgaataggatgcactaccattataaagtgttactttcagtatcgtgtgacaacatctaattgcggacttgaaaaaggtaaaaaataaaaaatcttaccaaggacaatgatcctattttca

SEQ ID NO: 319019 - DNA, 1852 bp, Cannabis indica
atgatttctcaaaattcactcgtcgacccgaagcttgctcataaagatgtagtaactccataatagaatcagcttcccgagtattagctctacagaagaaataactgtcatcagctaagagaatatgggaaatcaccggagccctacgagccactttggacccatgaatcttgccatcaacctcatatttccgcaggagacccgaaaaaccctcagcacagagaataaagagataaggagatataggatcctcataacgaataccacgtataggaagaactggacccatctcacgaccagcatgcacaaaagtataagatactggttccacacagtgcataatcaagttcacacatctcccatcaaagcccatccttaacagaaccgcacgaagataaccccactccattctatcgtaagccttactcatgtcaagctttaaagccatcaagcctttcctcccctaggttttcctttttaataatgcatgatttcgaaagaaaccatgatattgtctgagataagccggccttgaagaaaagcactctgagtttcagagattaccgaaggaagcacaaccttcaacctatttgctaggacttttgttatgaccttgagtagcacattacaaagcgaaataggtcttaaataacccatgttgctaggctactttttcttggggataagaaccacatttgtattattgagcccaacagggagaaccccggtcagaaagaaattttgtacttgtacaacgacaaccatgccgaccacgtcccaacatttttggtagaaacaggtgtcatgccatccggacccagagccttctcagggtaaatttgaaaaagagctttcctaatttcatctgcttcaacaggtttaagcaaatcctcaatttgagcagctgagatacaaggagaaatacaatcagaaatatgagaccaatcaaagccgctgaaagagaacaagccttgaaaataacccatcattaactcagtcagacccgtgtcccaatcatgccaaatcccattcgaatctttgagtttggcaatcaaattgttgcgacgagcttgtagccatataattgcttggaacgctgcctccaaaaaatctctctttgggtaaacacctcaaacatattcttttttgattctttaaatttttgaatggaaagagcatctcgaccatacttcattttattaatctcagacttacaccttttattctctctttaaaattaccagtataatccttaccccactcactcagcacttccccacaatacaaaattttctcttgtatccccttgccaatacaaatatcccagctatcttaaacaatttgggattaaagaggttcccttaaccaagcattttcaaatctaaatttattttcattaagatagccacctcatttttaggcactaaaaatataggataatggttagaactagaaagctcaagattaaataactgacaatttggaaataagtcaagccaagcatccgaaacaaacgcccgatcaagccaaacttctatccattcggaagtccctctaccccgttcccacgtaaaaggatacccaaccaactccaagtcctgcaaatggcagtcatcaacagcctgttggaatcctgacagaagccaatcgagataaggattaccaccccgtttgtcatcatgactaagaacattgttgaggtcgcctataatacaccagggtaacgcatattcagaggacaaatctctaagtaaatcccaagttttacgtctgagatgccgattagtgttacgatttttatgattactacgcaagtctacgcaatcaagtagtatctcacgcaagtgaggtc

SEQ ID NO: 319020 - DNA, 775 bp, Cannabis indica
attaaatgattttacataataattaaacaactttcaatctttgtttctccaaagggtttgtttgtccaaatatatgtcttgtacattcctttccttttagtggaaatacttgttattataaattaaaagaaagatcatttataataacagagtaaataagagaaatagattttaatcaaaaacaagtctcattcacctttaatgcaaacttagttaaatcatgaccagccatgttagtcgtgcgtttgacatgaaaaacagttacattattaggaaaaaatgacaaaagactagagaagtcaacaatcagatcattaaaagaggagattgaattgaagggagctctcaaagcagacaaaaccagcagcgcatccgttttcacttgagaaatcgaaagctcgtcttgcagagcccagtttaaaccatggaataaagctttaatctccatttcatgtgatttaaaattaccaataattagcatagtaagtgcagcagcaacatggccatttgtgtcttgaacaacagcgccaacaccaataatattccttgaaacatctaccgcagcatccacaatgagttttaaatcccctaccccaggtggtttccatggcaacgattgggctataggaggctacaagggggtttaattgactttgcattaggggtgttcacggtgcgggtggtgcggtttttaatcattttttcaaaccaacccgcacatgcagtttttccaattttccaaaccgcacccgcaccgcgatactaaaaaaccgca

SEQ ID NO: 319021 - DNA, 598 bp, Cannabis indica
aaaaaaaaaaaaaacttaactaacaactatatactaattagttgagctgtccattctcgaattggtaagaaagaaaagaggcaatgcatgatcaattatttgtgattaggtgacttgaaccacacaataattaatccaccttggtttagtcacttgaatcacaaagagaaagagttgaaaccagagatatatatgcaatctgtcaaaaaaaaaaaaaagattagaatttgcttatgttgagcaactttaggcagtgcctaaacttgtgtgctaacactctttgatcttcttggcttgaaccttgtcttgtgcttgttatattatattgttataatataagatagattaaaatattaaaatgagacatattatatattaatatgagattaatgtatataatatgattgagagttacatacatataataatattcacataaattgtaacattagaggtggagttactcatattttgtaacttccacatgatcactaattaagtgtgtaaagagtggttacacaacttaattgttttgaaattcaaaaacataattcaaatatagttgttggggattgaattttgtcatttataaagtgta

SEQ ID NO: 319022 - DNA, 1218 bp, Cannabis indica
gaaagttcttatttaggatgttaataaacatacttgtgagtagatctaagatcttggtaaaataaattccaacaattgttgccttgaaaagaaatggtacctacacacttgtaccattaccagctggaagaacccatgttgggtgcaaatgggtgtacagagttaaagaaaactctgatggctctgttaacaagttcaaagccaggttggctgccaaaggatttcaccaacaacgtggttttgacttcacagagacttttagccctgttgcgaagccagttaccatcaaagttgttctcacattggctcttgctcacaattggacagtaaggcaaatcaatgtggacaatgccttcctcaatggttatttgcaagaggaagtttacatgattaaaccacttggatttgaagagaaatgacttcaaatttaattgaatgaagaaataaaatagactgttatatagaatattgttctgcaccacatctagtttgcaagcttcacaaagctttatatgggctaaagcaggcccctagggcctggtttgagaaacttcaacagttcttattgtcacttggctttacttcatgcaaggctgatcattcattgttcattcaacacacaaattcatctataacactaattctttaattctcttaaacaccttggccaactaaattacttccttggaattgaagtttctcacacaccagagggaatgcatttatgtcagaccaaatatgccaagaatctactatgcaaagccaagatgtagggtgttaaatcctccttcactcctattatcccaatttttcaactttgacgtggcatcacatgaatggtgacacgtggaatccacttggaatatctacccgggaagcatagtccgagcaaaacatatcgctggcacgcttagagcaaagtattcaacaatccgtgcagagcaatcaacacttagcgaattcagctttcacatcataaattatcagcacaatccctataactcaaggatcaatttacgtggatatggcatacacacgatcccgctatcattgtattcagtctcaatcccacgatccttgtatttagcattgatctcaagatctttctatttatacgcattgtaacgagaggggaaactcttcctctcgaaacgtcctagccctataaatagtgatgtatgttcactgggaaaaagatcggtcgaaaagtagttaagc

SEQ ID NO: 319023 - DNA, 1695 bp, Cannabis indica
aagggctagagatcttgaacggaaagagtcgttatattccgctgcaaccaatgtaggttttctaaacccttatgtgtttattttcattgttttagagaattcgtgtttaggatgttaattcaacatacttattagtaaatctagatcctggtaaaatattcccaacacatacaacttgtgatcctgtaatcactatagtattaatttgaggtgttgttcatattcttcttctgattttgaatacaccagaatatcatcaatgaaaactataacgtgcttatccaaaaacttcttcaacacttggttcattaaatctataaaagttgtcgaagtattagtgagtccaaaagacatcactagaaactcataatgtccatacatagtacgaaacacagtcttcgggatgtcctcttcttgaatcctcaattaatgataaccagacggaaggtcaatctttgaaaagactgtcttaccctttaactggtcgaacaaacaaagaaattcaaatattaaagtcaaagagaaagagagagaagggtcgttggtgagggggttacaaccagaaaatgaagttttggttatttatattttttcaaaataacatatacatcaaatttataataattggtcaaatgaccatttttcccctagggctaaaattccacatatttaacaagtaagggcattttcgacattccacatcacacaatatattcacatgatcacacatatttcaaattattgccctaactacaaagttcataaattttcgagcttgaacccagtttgagacaaaatacccgattgtgactatatcacgctaacttgtcaaaaatcacttacaataatataaaatgaacatactatataataatataacccattagcacaatatataacaaaattactattttacctttctcaggccaatattatgaaaatacccctactcataaatgagatcttaaatgtgataaatctcaaataatttcacataattgattatataataatataatccctcatttatggataattaatttaattagggttactaatccatttactaatttgaggatattacactgatggtggttcgatggtgggccgatgtcttcctgttgttaaaatgagtaaaggttgaagatgaaggttcgatggtggctcgatgccttcttgacgagcttaagcttaacatctataaatataaaatatagtccgatggtggtccgatagtagtctgatagtggcctgtgttagtttctatatcactcataaaatatgcaacaacaaaattcaattctatagataaacatattacatataattataagtgtataactatagatctaaagaatacctttgttgattcaaagagaagaattcaaatggcggaagcgtaccttaattcatagatagtgatgatcttaatccatcttgtagagataatctttgtggtgattttgggtaatgatcttccaagaaaacaagacttaggttttctaattttctctcttgatgggggaagatgagaatagaaattggctcttgtttcttggggaccactaccaatttataacctcatagctaggttattaattttaagtatttctaatttagcccctcaataaattagaaatatcgcttagggtatctacacatttagcccatgacactttaatacccaatgaccca

SEQ ID NO: 319024 - DNA, 1148 bp, Cannabis indica
aaaaattattaaaattttaatatcataacatatatatactagtcatcaagtcattataaataaatatatacaagtcatcaagtcataaaattttaatatcataacatatatactagtgataagtagatttggacaaaagaaccaaatggtcgattttctacgaaatctgtctatcttactcaggccttggcacgagcgcctcctactaatgttgctctcgctctttggaatttcggaatcttagagcgtcacaaagtaccgctcttattagaagggtgcatattgaggatgtgtcatgccctatttatggttagtgagagaaaacaatggaacatctttttctctactgtaactttgattttcacctttggaggttctccccttggggagtgatgatagtgttggattatggggtccaagtataggattgggtcaaattcataataattctatatgtaacattaagcattgtattgactctgtttctatatgttacgcagattttggttcttgtatgtttccttcgccggtgatggttgcgcctccagtttggttcccctgccggacgattgggtcaagatcaactatgaggttaaagtcaacagtgactcaatgtgtgtagtggctttggctatagaccacaaggagtcagttttgtgggtggctagcaacatcctcaacttctctgaccctcttattggagaagttgtggcctgtttgttaggcttcgaatcaacgatcctttggaagcatttgtttgtgataatagagagtgattttgagacggtgatcaacacgatgaaggagactactttcatttgggatattggtaactaagtgcttcaatgtaaaattctctcaaaccttttaactagttgtaattttgtgtttatttctagactgcagtttcgcaacccataatgtgactaagtggacatttgcttgtaatgtaactagtatggtcgatccgtcctccataccagataacttattacgtaatgaccatgaggtctaactttgttaagctttaatataattacgtaatttattaaaaaaaaataaataaattatctttaaaaaataatgtaatgtccatactgttaggttttatgccctaaataaaactctttacaatctgattagttatc

SEQ ID NO: 319025 - DNA, 1373 bp, Cannabis indica
aaatagttagattttgataagataagtcgagtgatgttttggcaacattgtgaaaaaaacaactgttaacaaagtggtgggatgaactggaggtagtgagatcgagagtctagagagagtgggaatctcttataaaaatataaccaaaaccagaaacaattaattttacttagttttataatttttattaattatgataactaagtattagtaattgtatagctatgttttattaaggaaacttattattaattggataagtaaaataatattttacaaaacattacaaaatagttttaggacattgtaatggagtgtaatttattaaatatgtattagagtacacaaacaaatttaataattatcgtttatttttttttagatgacgattgataaaacttggatatcattgagaaatcgatgtgatcttgcttactggaaaggtgtccgagtttttattgcatttgcgtctaaacataaagattgtgatgggagaattctatgtccttgtgttgaatgtttaaatacgagacgacattctttagatattgtgaaagcacatattttttacaagggttttctaaagagttatcaaaagtggattttccatggggaaccggaagtaccaattgccgatgagtcaaccgatgagaatgacataattgagatggttgatgtcgttgataatttccaaaagaacaaagacaaccaaaaaaagataaagtaccctgcaacagggacaaaatcaatggcagagaaaccttttgaaaatgtaagttaacattgtcaatttgattaaattatgttaaattactaactttgtaatgtgtttatctttattaggacaattttggccgcattgaaacatggaagccagttcatacaaagaaacggacaaagtcttctgtcaacgagattactcaacaagatgtaagtttatctaattttattcatattcaaacaattgtaaattcgtttgtttctaacaaattctgaaaacagaagcggttaaagacaactgatgaagctcgatctggtactgctgcttctgcaccagtcaatgaaatttcggtacttcctgaggtgctcggggagaggcacaaccacgatgaaggagtagaccctgctcaggcacaggtgcctactcaacaaacgccttcggagaaaagactgttgcgaatgatttataaactgcaaagacaagttcgacacataagtcaaaagctggcacctgaggaccgtctaccatccgatgatgagatggatgacatagctccaatgcattcaactgggccttctaaacctcacatgtctagaaatggactttgttcatcttctcagcctatggcttctcattatcagcagtcgatgcc

SEQ ID NO: 319026 - DNA, 589 bp, Cannabis indica
tttttgattttatttacataaaatacgatcttttatgttgaaattttgttcatttgttgttaattttttgttatatgtatgttattttttgttgtttttttattgttattttgatgttattttcatgttacttttatattattttcttgttgattttatgttggtttcgtgttattttttggaaaactgtaaaaatataaaaaaacattctttgaacgtaaaagtgtaaatattttacaaaaaatggtgtcttatgtaattattccttaaataaaactattatgtaacttgaagattaatttaggcaacaatacatattttcatataatttaacgattttaataaattaaaatagaatttttttgatttattcaaaactatttgggtactgaaggattaatatttttatactatttgttttctgccagaaaaataaagattggatatttaagtgttacattctttaaatattgattatttttgccacaatttgcccatcctttaacaaacacaaactcttgtattaatctacagtattgacttaatcaaaataagaatcaaacaaaggttaacaaaaaaaaaaaaaaaa

SEQ ID NO: 319027 - DNA, 1154 bp, Cannabis indica
atcaaaataactctaaatcttagagttatcactcggtatatgcgagtcttaacctgatcctcgatcctactttgtgcgaactatgtgaatgcgagtagactctgtcaaggtcacaccatcctgttgagtctggttcaggcgaggcttacactcaagagatttctttttgacatctcagccctcctcgaggagagtgagtccacgtgtcatttttatgggagcctggtctcgagtttttaagtgaaaaattctcagtataacattaacaaaacaaactccctaactcattaaaaaaacacaaacccgaacccttaaacccataaacaataaaaaaatccacaaataaagccatctccagattgagtccagtgttgagaggcagaaccatcgccgacggggctttacaattctgcgaggacgacaagagtatgacatcgttgacgactcggggtttcgtcctctttctctttgatgagaattactggggcagaggtttttgagggcaaggacctccctcgtggtgctcgtttgggccatcaatagatggagacggcaaactagatatagcataaggccgtgtgaaaagaagggggaagagaaagtgaggtggtagagagaggggttgaggaactaggtttcaaaatgttctttttcttttaattctttttttattatcgttatttagttttttgcagtattattattgggtgcttatacgatgcacccccttaattttttttaatattatttaagaatgatattaaatttaactaattaatacatttttatctaataaaactaaatagttaaatagtattaattatacaatttataattgttataattatttaaaacaataattttacaaaatactatttttccttaaaaatttatttcttatagaaattaattctcactcaaatttactcatcaaataaaccttcccctatacaatatcatatagatgtgactttaggaccatagacctatatttcgaagttctaataaacacttaattattattgatctcaccaatagaataatctagtttattaattctattattactccactataaatatgaaattgcactctttgacaatataaaattatatttatagaattcttacttgtaatccattgatataatcaat

SEQ ID NO: 319028 - DNA, 987 bp, Cannabis indica
ctatattgtatttagttatttttagtttaatgactatgtcgttcaatgaaattagcatacacggcttgtacgcggaagaatttttcaattatgttaaattctactcaccaggactactttgtactttgtacctctattattgaatattcaattacaaaatattcttcctcatttatatagaatattttaatcaattattttggtctcccattatctgttctctatttaatttagttcatttccccttttatttttgttctcttatttcttcacttttggcattttctaaagggttaattgagaatttttttaaaatgtatatataaatattttattttaataataattttattatgaatatatatatatataaatatatagatactactgctattattagagagtagctcttaaaaatatttaaacacaactatgttatgaagtattataattaatatttttgtttcttaaatttacaacactattaaattataacctttaaaacatatatcatgttaaaaaaaaaaattaatgatctcttctacttacaaagatattatacttttataaattctcattcatgttttttttcttcaacattatttacttctaaattatgcctccttttaaaataaaattaaaaataaaataattttttttttaaaaaaaataaaataaaattactctaatctaatttatatcattggtcaattaatatatttactgttgatttaaattgatgtcgcccaattagttacagcaataaacgggctatgttgtatctacaaggaagtaaattaccactaaaaattaatataaatagaaaatgatataaatgtgaatgaactaaaaataataaaaatgatgagataagaaagttgatcagataaagagtttagtaagatagaaatatagttatgcaaattttattctaataccgatattaattcgaacgcagttgtgattctacaccattaattacaaccg

SEQ ID NO: 319029 - DNA, 1119 bp, Cannabis indica
aaaaagaaataaaatggaaaaaatcagtatagggtgtaaatttcccttgatttagagagcaatcaacataggtgtaagttgaaaattaccacttttattaattaattaatcaaatttacttctaattttatatttaattgaaacatacctctttttatatgtattgtacccaaaataccttgacataagagagtcacatggagagtatcttgaagtgatagggataaaattggtacaatgtttaaaaaaaaagtaaaaatgatagactttaaaaaaaatgttaaaaataaaagagatataaaaaagtataggtgtaattccatcatcaacataacataagcttcttcatcagaaacatatcatataagcaaactatataattgggcctcatttgtaggcccatacatagatagataattaagagaaaatttacaaaaatataaaatcaatttttaaaaatattaaaaaaatggctaccaaaatatgatcttttatttttcagttttatgtatatattttatatgataaccggttactataaacgaattagttattttgaaaattaatgatgtagtaaccaattatcaatatcattttcttatttttatttttagtatagtaacaggttactattttatcaattttaaaataactacttcgacactagtaactagttatttaaaaaattaatatggtagtaaagtaacactatcaactcctaaacatgaagaaaaaattccataaaaacaaactataaaaaatgcacaaaattataaattccaatatttatcaaagttaaagaaaaaatccatacatagacataattttgtcatagtttagggaagaaatttttgtaatttttcattaataaaattatataaatcaaaatatataaagactaacaactttaactaattatttgttaagtttgttagaactggctgattgactctgttactttttcaattagtctttcttgattgagctatgatttataaataactaatgtctcattctcttaatgggtatctgtattaatttttagttttattatcaatagtactcgcatttatatatataattttagtttgggaaatttacatatatactgtttttgga

SEQ ID NO: 319030 - DNA, 1164 bp, Cannabis indica
ttttctccttaatttgtgtgggttttgtataggaatcaatatcatactattgattcatattcccactaagtaaacatgtcattaaagttatcaaccattggagtattttttttaagagaacataatagatcttatgtggatgagagagaaaataaaaaaaaaaaaataatattttagcatgatgtgtgtattttggcaactgtaggtattatcttctaaagactgttggccttcttgccttagatgagtacacttgtggttataagttttcaaagtactcttcgtgggaaaaggtccagttccaaccgacaaagagagccaagattatgtggctcgcgtacattatctcaagagaatagtccctcaggaagctaaagaaagagcctcccgaggtaatcaatgtggatggtcacctactgtgcttagggcagaacgtacttcgttagtaactttcaagatagtcgatataacttttatacttggaaccttttcctcatagatcgcataacccataggtttgatagttggtacccaaggttttttgtccaacttagttgtactagctcgtactatgggattgtcgaatagtatgggaccaacttggatagggcaagccacccagattcagattgggatttagatccaattaacccttacgacatattcatgatcacaggatctagagaatttagtgaatactatagtctttcttcttctccatctgatgattatgggaaccttctttaagtggaaatttgtttcccattttctttttatctatttttgattaagtgttgatgtatttcctttgtcttgcagatatcttgacttggaaaatatgttcagtagccctcctctcgttgacaaaagggccaaacaacgagctgcccaagcaagtgatgcctcaggttctatcaaagaacccaaaagaactaaaatgtaatgttctcgcttcaagcctccattgggtccttacacccacagaatgaatggctcttatacacgagtacgccactctggctgcttcctggattgatgactgaccctacagatcaacacgagtgtttttagcgtgctttgtcctcactcacacgcttcctgggaaaacttcccaggaggtcacccatcctaaaattgtcccaggtcaaacacgcttaactgtgg

SEQ ID NO: 319031 - DNA, 1520 bp, Cannabis indica
tacgatgctacaaattgacacgatacgacatgaaaaatatgtccttaaacacgatacggtacgagaagcacgaaaggcacgacacgtaagcacaaatagactagcccgaaaagtacgtcacacgataagcccgaaaaacacggcacaacacattaaaaaatcttataatttaataataataataataataataataataataataataatatgattttatcaattataaataaattaaaataataataaaacttattaatattataatttataagtaaaactgttaaaatatgaaaaattaagattatatattaatttatttattatatgtgatataaaaatttaagtatttaagtaaatatttaaattccaataatgttaataatttttatatgattatatgtaaaatattattaataaaattaaaattttaaaatatataattaaaaaaaaaataaaaaagtaaagcacgaacttaagcccaaatatgaaaatggactcacctgtttagaaaatacgagtcgacacgagcaaagcatggcacgaatttgagcacggcgcgaaaatattggatttacgtgccatgctaaattaccctttaaaaatattaacacgatatggcacgatttatatttttctgcacgacacaatacaagttattttttaaaaaatacgaataaatacgagtcgggctaacacgacacgtacaaatttacactatttttcgtgtttatttcaaataaaaatagggttgaaaattttttgtacttgatgaaaaaatattacaatgatttactatttaagtctttagttatgttgttacaacttaaaaaagttgatttatttgaagggatgtaaataaagctaaacttttattttttttgtttaaacgagtggtcagtgaaacgacaacgtatagtaaatggaattgacagtggccattcataagtgaaaaattagagatagtaaagttacaaagttagttttggtccgtaatttgatttttagagattcagtcttgtctttactcaacagcaccataggacaaaaacatttacttgcatttactgtttgcacatcattttgtcgttttcctttattaatttcctcattcaacgccaaagatgaaacaaacgacaacgataggaccacgtgtcgactgcccacttgctccatttaccttgatatgcacataccacaacaaccattatccaaacattttttattttttattttttatttttatcagatttgtagtaaagcatagtctatgactaatgactctatggatctttatgaaaagagtggacattgtgtcacgggacttctcataaatgctaaacttattctaattattattcgaccgaccaagccaaaaaataaattaataaaaattttaagacataggcaacccactactcagggccggccctaggcataggcgggctaggcccgtgcttagggcccacacttttcgggggcccaaaataaaaaaattaaaaaaaaaatattaggctttt

SEQ ID NO: 319032 - DNA, 759 bp, Cannabis indica
ccaagctcaaagtttcccttttgagaaaccaaggttctgccatcactgatgggctccaacaatcttaagctatcaccagcagaagacactctaaatagcaaaaatatacagaaaagatgatgatatgaacaaaaatggaaacactccttcatccctcttttcataaaaatcaatacactttacaagattagttgtggtatgggatgttagcgtgaaggtgaaacgaaaatgtacaactctcaactaattgaatttaatttgtagccacaaaattgttgtggtcaccatcaagtcaaagtcatcttacttttttcttatatcttatagcttttctggcaaaactcttttgtcttgtttatcaattacaaccaaatttttcatcgactaattgaaattgaacttgatgaagctcaatatctagccacttatgttgactttgactacatcagttcctttcacaatggaataaaaagcttagaagctcagttcccattcactggatacataataatcaatggcctatattacaagattaagtagttgatatatctacgctaattaaatatcttatgattgttgtagtgcaatctattaatgcatttcaaattatagatttcattatacctgaccataagttgatcacaattattgaacatgacagcctatggttattcacaagtgtccaatgttagacatttatatgtataaactgaaacatatatatttatgtataaaatgcggaattaaatcaaacatata

SEQ ID NO: 319033 - DNA, 690 bp, Cannabis indica
tttgaaaatttatttaaacagttgctcaatcatagtacattttgtattctctttttaataaatatgaactcttatttttttcaccacaaaaatagaagttaggaagtgcatttagttttacttttttaaaaataaaaaaaaaaaaaatgcaacaaaaacacaaattaatttaatttttttaaaaaaaaattatatatttagtttgtgatttaaaaattttgaaaacaaaaattttacaaaacgcatcttttttttttttacgtaattatagctttttttttttcttacctcttaagtgagaataactacgatagggaaattgtaattctaagtttatctaaaattgtaattaagttggagttttttgaatagattattttacaaatacacaaaaataacaaaaatattataaaaatatggttgtacggaattttaaatagttttatgatttttattattttatttatagaaaatataatcttttgatttatttttatattgtacttttgttaatttgttattgaggtttttgttatttatacgttgttttagatgttttttactgtttcttttatgtagttttcgtgttcttttcataaaaaaatataaaaatatatacataaaaaaattaaacataaaaatgtaaaaatttaacgaaaaatagtactttatataattatctattttttt

SEQ ID NO: 319034 - DNA, 1827 bp, Cannabis indica
tcatcaatatatatttataaataacattaggacaatagtatgtatatagctagttataaaattaattaagaacatttatacttacatcagttggacaattaacatggcttgggcaatagttttggtcaattatgattggattttgaacatttctcatgacgatatttgagaaatgaacaccctcaacaaagcctttgctaggtttggcccatgatttgattctaatcccattttgagtacctgtaaaaacagcttgcttcacagttacattttggactccctcttcatctatgtccttggctaggcttccgatgctaatgccatgaccaggaccacacgccatgcgttcgatccagagattctgagttccggggccgatggaaacacaatcgtccccagttcctactgcggagttgtagatggcaacatttttggagagttgaacgtggatgccatcggtgttgggactgtcaccgtgagcaatgattctcactcctctcatctcaacattttcacagtggtttattacaatgtgaaacatttggctgttcaacgacaataatccagtgatttttatgtctttagagtacgtaatgctcaaactctgcatggagataggaaaataattgtcacttaattgattgattaagaatgattaaacaaattaattaaatccctaactaatttctaattaaacaactatatataatgatctatgtgcatccaaaatatatatgcacctaaacattatatatatgtacaatgtgtatccaagcacctaaacattacatatgtgcagttacatatatgcgtttttaatttatttcaacctatcacatttatttaaaaagaattgttaaaaaatattattggtgcctaacactttctttggtgtcaaacacctattgatgtaattaaataacatgtcttatataaattaagaaaagaacttttaagataaatatcgctaattttatcataaatgctgcttatagaaggtgttgggccactagtgtccaatgctcttatctaaattaaacttgctaattaattctctacatataatttatatattctctacatataatttatattaaggttttttttttttatttattattttatttttacatacctcaaaataatttattttgcatttttataaaattctacacagaaattctataacaactaacaaaataatttagatcgcaataaaaattcacatagcaactcacataaaaactatcagagctagcaacccaaacaataattatttttttttaaaaaagttaaaaataatatacggaataatttctctttataaaataaacttttatagtaagtaccgtggctccagctccagggggacatgagttgtcaggattggccttacaagcccacaaggcagagcctctagcatcaagtgcaccaccaacaatagaaacaccgctaactctttggaagttaagccaattctcagtatcacccaacacttgatagtcctctggggcgacaagggtgccatcaatacgaaaggttatgtatgggcttttgcatggacccttgaagtccattgggcgaaccaaatacctacccttgggaacgtatatgagggccgcttctgtagaggcacacgcagcttcccatgcacgtaggaatgcttcggtagagtcagttaggccattggattttgccccaaaccccatcaaaacattgaaagatgaagttgataatgttggaagagctaacaatatcaacatgattagtgggtataaaatgaacaaactcatcttcatcatcaaaatgttattggaataagccata

SEQ ID NO: 319035 - DNA, 620 bp, Cannabis indica
gactactgactgtcacaataaccagatttgaggtagacaagttcaatggctccaatgatttcagtttatggaggatcaaaatgaaggcgtttctggttcatcaaggtatctcagaggctctaaatgttgaagcaatgaacctcattgaagtcaggaagaagaagattgagattgaagcaaaggcacataatgccattcttcttagcctcgaagatgaagtgttaagggaggtttcaaatgagaaaaaatatcttggactcgaacaagttatcctcaatctacatgaaaaaatctcttgcaaatgaattgtatctaaagaagagattgaacacacttcggatggaagaaatcagagaattgaggaaacatttagatgacttaaacaagatcttaacaattttggagtaaagaatgatgatgaagaccaatcaattgtattgcttagctcccaactgccaaatatgtatgaacactttgcaaacatgattttgtatgggaaggataccttgaccatgacagaagtgaaggtatatacagtggtggaatgtaacgtctccgcttcaagcctccattgggcccttacacccacagaataatggctcttatacacgagtacgtca

SEQ ID NO: 319036 - DNA, 499 bp, Cannabis indica
aaatataatttatatatatatttcaagaatgtgaaaagaaagaaaaaactttttaaaaaaagttggtataaattaaaagtacatatttatatactgaatgaaaataataaaataaaatagagtgtattttcaatttttaaagtataaataaaattttcctattttaaatcacagcacaataaatctacttttattgtgttatattttttttttatcatattcatttattttaattacgaactagcttctgaatttagtagattttgcatttactaatgactaatgagaattggtatttaagtttagtgttagtagatatttcgaccaaattcaaaaaagataacttttgtctttatgtaataaaaaaataaaataatttccctctaaaaaaagtatttttattcatgaactgaaaagataaagggtatttttttttgttttttatttttttttatttttacactttaaaataattctttttgtatttttacgaaatttt

SEQ ID NO: 319037 - DNA, 547 bp, Cannabis indica
ctcttgtgacagtccacactcccatagtcttccattgacaaatttctccagttgagttttcagttgcagaagccataaataagcccctctttcttcgttgtcgtagtttagttacgcaggcacaaaaaggaggaaagaagaaaactttatgtcgttttcggccaaatattagttggaggccaatatgtgttggtccaccggctactacattggtctgttcaaactttgctgcgatacccagaaccatgcgctagtaaagaagctccattctcacataatcagaaacttgacacacccagaaactattcttatcaataaactcattgatgcgtatggaaagttgggtaacataaagtatgcgcgccagtcgttcgatgaaatgtctgaaccaaacattttctcgtggaataccatcctttctgcatattccaaaacgggtcatcttcctgagatgcgaaagatgtttaatcgcatgccagctcgcgatggagtctcctggaatgcacttatttcagggtatgcatcatttggttcattggctgagtct

SEQ ID NO: 319038 - DNA, 1090 bp, Cannabis indica
ttaaaaatcactattagtgcctagcatttttcttggtgtctattggtataattaagtatggaatttcttattacttaaaaaaataatttttagaagatatcgctcaccaatcgtggaacggcacctatagaaggtgctggtcatcactagtgcccaataacaatgcttaaaaaataataataataacgtggactattgtttaagaaaaaatattaagaggtatcttaaagtgtcaaacactacaagacgttgcataatactattgatgcattttaatatcgggtcttacaaattttgatttaataaatgatgaaaaactgctaattaactaattatatgcatataacaccacaatagtatggtactggacaccttaaaataacaaatagcaataactaattttatattttttatatatattattacttaaaaaatatttatatatataattagctaataataaatgaaaatcaatcaatcactactaaaagaaaagagaaactcactttttattttcgaaatgaacactatttacttttaatatatatatatatatatatatattatatataatatatgatctatagatatactactaaataacatttgaacggtgtttgaaattttttttatatttattatgatatttaattaggagtagacacatagtaatattttataaaaataaaactgcatagtaaaattaatgagaacaagatgcctcactattttaggctggggcgccagggccaccttagcctataacttacctttgcccctgcctaacacatttgaaaagatttgaaatgaaaataaaaaagaaaataaaaaactgaagaaaaagaaagaaagagggatactagtaataccgtcagtcctacgtgattgacgtgttgtagcttctcacgctaacgtcatgcacgcacgcgaataaagaagagatttaaaaaagagaaaattacacttattatgggattttaaaagttcttatgataaatatggcacatttaagtttggccaatttatatggtatttttttgtttttaggtttttttatggtatttgatatgccatatatatgtaattaggt

SEQ ID NO: 319039 - DNA, 1579 bp, Cannabis indica
tttattttaagtcgtttatatataacaaccatgtttaacttgtgactcgaacccatgatctccaagacacacacacctacctatggctacttgagctagcctcaagtggtttgatattactttgtggatcaatgcgaactttaattaatgttactttgtgtagggccagtatatgcccaccaatcctcttctttaatgtaaacattgtgtaccaatttcatccataaattgtcttttttaccttcaacaactcccgtatgcactacaaaaataactacttttagtgacaattttttagtcacaacataaatttattgtgactaaatgtgatttttagtataatccgccagcaacatttgagcttgtccctctgttgtggtgttttcaacacgcaagtatacgtattgttttaacaagtaatactctaatgagtgagattgttcccatgggaaccgtagctaagtaccaatcaattaaattcttgtttctatatggtaatagaatagataaattttgaaactaaataaactaagaaaaaataaataaaacaaaacaaataaaaggtttaacaatggatgtgaaattagagatattatttcaattgtatctatctattatggtctaacatcattcaatttctattaccaaattctatgcaatagcagatttactcaagtaatttatagtcttctcagatacataaacctcaattatatgcaaattttctactctcgtgataaattaaaccacataggtactctcgtcttatatcgaaatttgttcctatttcactatagcataattgacactcacttcttatattttgtatcaaaatcataaacaattaattgatggccagacaattaaaaaagataagtatgaatgaaatagaatacataaaaaattagaggaaaattaaatcacattaaaaccataaacagatgtcaaacagtatatattaacaccctaataaattgtttagctactcttgttcatcgtagtaacttcacacatatcaattaagaataaaagaagaaaatagagaagaaaagaatgttaaaaacttcgataaaaaagccttctcgattgattttgctctatgatttttgtacccctacattgcttgttgaaaaatattaaagtcccactctttttatagctaaaaaagataaaaaaaaaaaatatcaactttttgaaaattaaaggggcgggccgcggtattgaaatcctatgccgcagcataacacccctaaatttgggcagtgagctttctactgcgtcgatggataatgtttcagccataactcttttaatattactcggaattggacgattcaagatgttccgaaaagctgaaagagagatctagaacttttatctttttttaaatttctccaaaatctgatcaaaacatagtctaatttaggcttgaagtttcagctttattttcttacacaattttctctattttatagatcatcttctgaaatttgaccaatttatacattccaagtattgaaccctaaaattaaagaaaacaagcataattctattctaaaaagtgataatgaagaagaaa

SEQ ID NO: 319040 - DNA, 901 bp, Cannabis indica
gcacaaagtaacgtgacacttatttggatgacacgtagagaaaattttatgatttggacatacggtacgctccaggatgtgtcgtccaagttgatttgtcattcgtaaacaattcatttgaaaaataagctggaatatccgaacatggtatattacacagtctgaccatcatcaactttacaaccagctcgcatacacccgccagggtaaatgtggcttgaatacttttagagatactttccataaatgttcaagcatttgaatctcgatcgcctccctgatttcttaggatagatttgaaccaacaacaaataagaagaaacctttctagtttctcttttagtttgatctgttctaggaaagtaaacaaatttcccattttatttttgatttgatttggaaaatctaattgatgtaattactccctatatatagtggagtcatttcactattcagggatctaaaatcttttgttcaagagagctcttatgctgtaaaaattgtgagctttcgagagagttcaagaactccttgcttcttttctcacaagtaatacaacaaaaggagagtaagctattacaactatcaccgggtcgaacctttataaatcgctatgttattatagcataatttcatataatcattattaattattatctatcattctaatcgctttaattgactcagtatctttggctaaaagcgatgttaatattttggtgttttcattgaaagtaaaagaacacgatcgttgttttgattctccttaaaacacacgaagaaggatctgactacaaggaggggcaatcccattgaaacaacttattcaatgcctacagtgttggattttgtgccctaaacaaaacccatttcaataaaattagatttactatttaataaa

SEQ ID NO: 319041 - DNA, 1053 bp, Cannabis indica
aattttggcagcataacgactatcaatcggacgttcccaaaaaaattaagcatacagttaataacatataacaatctaaaataatacaaaattaatttttacccatctaatcacagtacaattaattgcagaacctagttcaccaggaatagatatctaagatattcaaactccataaaataaagaattttgatgttttagtgattataccttttttttgaataaaattagctacttttgcgctctttaatcaacactaagaacctaatacctataaataattaaattagtaatgttaaaacttccgtttaaaaacttatcaaattaaacaataatgtagattaaatttcaatctttacaactattatcaacttatatgtacataaatatatataaagtaaaaatacacatatatattaccgataatacgaagctctcggacgaccacttaataaggagaagttcgacgaaatttggcaatggctaaaaaatcaatttaataaccaaaaaaaaaaaattaaaaacattacatttatatatttacataactaataactttattgaaaaaaataaaaataaataatcgaaacaaaatattttctataacaatttaataaaaaatttaaatgaaaatcagagcaataccaaaataattaataaaaaccaaatttttttaatacctaaaactaatactgaaacaatcaatctaatctaaatatttttttattacctaaaactaaacaattaacctttccaaaaaaaacttttctaatcaaaaacatttttctaaatattttttctgttatcttaacctaaaactaatacctaaaaagctatagtaatccaaaatctaaatatataaataaatacatatatatattgaacgtgagacgatgggcagcggaggtggtggttgtggcagtttgatggtggttcagagcccaagatgcaatggtggcctaggggtggtcgctcagtggagtttttagggattaatgggtcaaatgtgctggtggctaagtggtggtcgttgctcagagagagagagagaga

SEQ ID NO: 319042 - DNA, 2315 bp, Cannabis indica
tgtggacttgggagaagactttgaattggccaaacttagagaggctgtatgccaactcgaccaaatttaagagccacacgtcgttggttgcgatgctttggcccaacagagacacaattcctgaggtggatgccaggaggccatcctctaggctcatcaggcagtgttggactgtcgtaatagggaagctagtaagctgataatacaatttaatgagagtactgcgaacatgatctaattagagatcccttctaagggagactcatcgataggtcgagcaaggtctacacccaagtagacaatagacaaatagtccaaccaagttctttgggaaagaggacaaacttctccctccccaaagatggataaatcctgccaaacagatttagtggcaagaacagccagactcacgcacctagtggtatggggggctggccaagtgtctttggctcattaacacccctatttggcaagcctctagccggtctatagagcaaaattcctctttgaaacatttaggagcaagttgttctaaggcctatctttaactgtctatgttcgggaacaagtggaacacccaagacaacatcaactcaagaagtgagaatcaaagtgattttgtttcaccattgaataatcacttcagacaattggatccaccaaacctaaaaaattggtgtaatcaaccccctatcaacataggccgcactggctaattagaggggaacgagcggctaggcactgcccaacatagagatggtcagccatggaaaattgcccaggttagggctggcaggcatagccagttacttgacccagggctggctggccaaagctagatgcccaacctggggttggtcggccatgggcatacctcacccagggtgtggccggccagggtctggccaactcagggcttcagcccagccaagaagggccactcggccaagcccctacaacgtcagatccttctatgcaagaacatttggaccaaataagagacataacaaagggcttagccaatccaaaaccattagaccttgaactagataggttaagggggtctccattctcggcatacattaatgcgttacccttgcctaagtttaggatatcggtatagaagatgtataacgggagagaagatcctcttacaaacatcaagtactttgagatgtatagaaagatctccaataattcattggtgatgtgtgatgctagatctttcttgtgactctatcaaaaatagcccaacaatggtacttcaagctggctccagaaagattcaattctcagaatgaattttctcgagatttctacctttgaaggattatatccaaaggttcatggctgaggccaccaaggtcaaaggcctaacagaagaaggtcattatacggccatattgggggcatccttctgttgagtgacttctagaaagatatccgaaagatctcaaccaacaacatgaaggagttcctcaaacgagcaaacgataaaattaaaggaagtcgtcatacaagcccacacaggaaagcaagccagcgataggtagtctcagggtgctatgcagtcccaagacctgccaaacatccaggccaatacaagcagccagccagccctccaatggaaaaaatactagaggcaagtgcaacaacaacaattctggccaaagtagtggcaaaaaaaggaagtacaacacttcccctatgccacgaaaccaaaaggagaaggagaagaagtacaggtgcttcaccctcctaactgaaaaacctaagaccatttacatggctacttaggctactgtcccatacaagaagcttcctcctatcaaaaggagatgagcaagagggacatgttaaagttctgtcgatttcacaataattttgtctatgacaccaataagtgtcaaaacttgaagagggaaattgaattcctcatgaggaaaaataatccccacttgcgtcgttacgtgtagaatgaccaagctcatgcacaagctgcccagagtagagaccctatgccacaagcagtagtggtcatttgggggtcataattggcagaccctatattgcaagcaagacaagcaagactagggagcgctatgctcagactgttcgccacaagcctaaaagtgacatcctagccgtcaaagaaagaggctccaagcaactcaatcttggagagcatgccatctcctttagagagggagatgctgcccaggtcagcttcccataaaatgacccatggtctttacagtacaaattgggaacatgattgttgctaggtgcatggtcaatagtgaagcctcctctaa

SEQ ID NO: 319043 - DNA, 866 bp, Cannabis indica
ccccagtgttcatattttatttttctatagcttttatattttctgtgttgaatcataatcgtgaggcttaaatttggttaatgaaaatctgtgttaatagtaacttttatttgttttcgtgcacatgctttaggactaattgcaaggagcaccccctcattattgtgagtgctctttcttataaaactatcttcaggctttcactcttttcttggaccgttagatccctgtatttttaagaggttttttctatgttcactttgacaatttcaattggcatgtatactgagtaaattaaacagacatgtggagagtgacgaatgccatatgtaaagtaaaaacttaacatttcattgataaggaaaatatatgatcgctcaataaatatgctatgttcagagatcaacctaggtgccttctttaatttagtgtaatataattaaggtaaacttgccattgctaggaacactttcttgtatggtggaatttcacttagaggagcatcttggatgtttgatttttacaaatcatagatttgaggcttcatttgaatgtgttggcttatgaatgttatgagtattgtccaatagaccttatagggatctgatgaacttcccaaagaacactcgctagtatcttgtcttaagaatctgtttccttcctccacacggatgtatttctctgctcttttgtggaagtcgtctaagctatccaactctcttttcaacatatttccccacaacccacctccagggtgtactgttcatctttggacacattccctactttggtaacttcaatattgaagtgttgcatgtagctttgcaaactttcttgctccccttgcttcacattggtgatacttg

SEQ ID NO: 319044 - DNA, 1410 bp, Cannabis indica
acggaattctacatagaaactctcatagaaataacggagcgacttaaatcgcaacaaaaatccatatagcaaccctcatagaaattaaccattagataaactaattgaacaacctaaaccgtaaatttaaaaaataatacaagataatttccctaaattataaacattttagttttacatttattaatgtttataaaattattattttttataaagttaataaaaatattaataaaaactcaaattgtagtgcatttgagcacaaatgaacaatattaaagttggctctagagtgtggaatgaagaattgataagggaaagttttgatgaagaagtggcaatgtccattctgcgaattaggcctttggagacaagtgaagacatcattttttggaaaggatcaaagtcagggatatatactgtcaaaagcgggtattggttaagtcaactcagtagattcaagaatcctaatcgcgtttgggaaaagctttggcggtctaagattcatcaaagattaaagctttttctttggaaaacttggtccaatgttctgccttcgaaacaacgtttaggattggctgataacacatgttccctctatcatgtggcttcagaatctgctcttcatctctttggttcttgcagtgtggttcgtgcggcttggttttagagccgatggggcattcgtttggaagattttcaacgggaaacaattatggactttggagattggtggtctcaagtgaacgatgaggaccttcaattgtttgcagcttgcctctgtgaaacggtatggcattggaggaataaggtaatttttaaaggttgcaccttctctttaatgggattgattaaggacattcgaaaaagagttaaggagatggagttgagagatgctcctctggaagtggctgatcgagttgatttccatgtcccggttgtggagaacctggatgaaatgcaatgcttttactgtgatgcttctattcttgatgaggctgctggtgtggtggctgtggaagtggctgaaccgattgtgggtgattcctgggtggctactgagtttcatacggtctcggggattcttgaaggggaattattggcaattcttctgacgttggaagtagctcgacagcggggtgtaaggaagatcaaaatcctatcggattccaaggtggcaattatggctttgaacaatggctgtttgccttatgcttggggcacttatcctgtttttgaatcttgtcgatgtgtttgtaagtgttttgatcttgttgtttttgctcattgccctcggtctttgaacagtgtggctgatgcagttgcgggctgggcgagatgtgccaagtcctgcacttcgggtctgctcaaagttgttgccccttcggtagctttgagtttgttgtagtt

SEQ ID NO: 319045 - DNA, 1736 bp, Cannabis indica
aaaaggatgacattaaggctggcctaattatacctattgttggctcagttcctccagaagttgcagaagccaaagccgtcttggctgccatttcctgggtgcaagccactaagcttcctgttaatgttttgcaaactgattgtaaaagtatagtagataaagtttataatactaattgccataattctgttgttaatgatcttgtcatgtgtattaggaactcgttgttgttcagtcctaatctggtcataacccatgttccccgtgagctcaataaaactgctcatgtgtgtgcaagggtggggttaggattagacaatgagtatatttggaatggttctttaccttcctttgtaacctgactccttgtttggtttgtttaataaaagttcaggtttctcaaaaaaaaaaataaaaataaataagtccccctaatatattactccaaatttacacagcacaaatgaatttatttatttattttttgacatacaaatgaatttaattttgattttgaatattttagattcctaagatttttttcttctattattagtagattcctaagatttgacgaaaggtataaaagtcatttatgtgagtttgcctaataaaaataggttaggttactatattactagcactacccacttctcaactactataaaaagagcaactcaacaccttttctaataattattttttgcaagactcctttaattttttcttttttgtttcattatcaaagtttgagctgatttcttgtacagacgaaataaaatggcagaagaagtagctatacaggataagagtatccttaaatccccagcacttgtacaggtaatttatcaatttattatttaatacaaaatttattaatgtattaatttcttcatcaaattaattaatatttgatttttgataatttcatttgcatgcagtatatctataaaacatattgttatccaagagaacacgagcagttgaaggggcttagggaagccactgtcaagaaatataaaatagagtattttttttcttccttaatcttttttattttataattagtttattgcctaaaattaatttaattaaatttgcgtacatatattgaggaaattatattatatactcacattactttactttgttttaatttttatctttattttcatattttttttaagatatactcactttttttagatgatattcctattatactcattaaattaacataaattatgtgttagaattaaaatagagagggagggtatattggacaactcactcataaaagttggtacattttattgaaatttaatatgagtgtatttttgactaatggatataaaaaagagagattcttcaacttatcccatatatatatataatatatatatatatttatatatatgtatacacttgatctcatttgtgctaaaggctaattctctcatttttatcatttattatttgggataattgtggcaaaattcttcaaaaatttagggttaatgtaaattagtctccaacctcgaaaattagcaataataattctcagggttacatttttcgtaagtccggtggtccctctttctaaatgaaccattaaacccaaataaaatgccacatgtcaatttttattagtctaaataataattttaattaaaaaaatctaaaaactaaaatataaaactaaaaaatatattttaaaaattataaatttattttat

SEQ ID NO: 319046 - DNA, 1437 bp, Cannabis indica
aaaaaaaaaaaaaattgggctttgactataaaaaaataatttaaatttaaaaatatgtatatttttaaaaagtattttttatttgggtccctaaaatgagtgggccctagacgcgagtctagtttgcttatgcttagagtcggccctacttcgaccaagcccttgtctacctcttacgattgtgttgcagggagcggagcgtggagggttagtaataattatttgtgaaaagaaagctaacaaataaaaaataaaagagatacggaaaaattaaaatttcattcaattgtaaaattaaaaattaaaaaaaataattaataagaaagtcttatatagacaactaacataaaatactaaaataaaataaaagactaaaacaactctaaataactatttaacaccctccctcaaactcacgatgctgctacaagaagtattgagagtttgcctaaaaaaagcgaaaacaagaaatcgtatgcgacttagtaaaaaagtcagcaagctacaacgaagaaggaataaaaggcaaagtaatggtgcccaacgtcagatggtgacaagtaaaatggcaatcaatctcaatatgcttggtgcgctcatgaaaactgggttgtgagcaatctgaatggcattttgattgtcacaatacataggagtaggacaagagtgagtaacatccatatctgcaagtaaccatctcaaccaaataatctttttagtagtagatgccatggcacgatactcagcttccatagaagattgagaaacaacagactgcttcttgctcttccaagaaataagggaatctcccaaaaagatacagatgtcagtgataaatttttcgtctgtgggatcacgaccatgatctacatcacagtaagctcgcaactctagagatgaggtggaaggtagtagtaggctctgaaagatggtaccctaaagataccgtagaatacgaagaacaatagcccaatgaacagtagtaggagatgcaacaaactaactaacaatatgaacaacatatgcaatgtctagacgagtaagagtgagattaactagactgccaacaatgatgcgatacaaagtaggatctttcataggagagccatcagaaggagaaaactaaacattcaactcagagggagtgtcaacaactctagtatcagtaaggagagcacctcaataatgtcaacagtgtactttataggggtattcacggtgcggatggtgcggtttgtagttattttttcaaaccaaaccgcatatgcagtttttgtaaattctcaaactacaactgtactgcgagatcttaaaactacaaaaaccacactgcgataatacagtgtgatgcggtgtggttttagcagtttacaccatcatcattatcaaacattataatgaaaatttaaaaatcaaactaataaagctttaacaata

SEQ ID NO: 319047 - DNA, 830 bp, Cannabis indica
tatttcatctcattgattaaagattcactgactaaccctttttcaccaaagacttgtctaacctcatcttgagcttttttcatcactcttggatttctcatcatttcagccatagcccagtttatagttgttgctgatgtttcactcccaccagcaaatatgtcctgaaatttttgataccaataattaatattcacaaaattgataatatttttatataaacaagttgatgatatgaatatatattatatataaagcttacacaaatcactgctttaatattgtcatttgttaatgtgaacttatgatcttcacacttatgaaacctcaaaagaacatcaaccaaatcttcctctcttccacttttctttgttgatgacttgatatccttaccttgatctatatgtaagttgactattctttccaatattcttgataaccttaatttacaatctttatatttacttaaagtataccaatcaagaaaactcaaagatggaaacacatctccaaatgcaaatcctccagacaatttcaaaatttcctccacaattgatatgaactcttcatgatcactgcttttgttgccaaaggcagccctagatgtgatgctataagacaaaaatgtgatcatttgagtgagattgataggtgagccaacttttgatgaagctatatcttttaccatattaatggactcttcttctctaatgggttgaaaagatctaaccctagatgggcttagaagctcttgtgaacaaatcttctaagctctctccaatactcactatatggagcaaatataatgtcagtagagtgatcaaaaaagt

SEQ ID NO: 319048 - DNA, 768 bp, Cannabis indica
ataaagatcgttggagcacctcttctcctcacaccagcaccaatcgtcggacttgagcccatcacacgaggcgtacctcaagtctctttctctcttgtaatgtttttctctctttcctgattcattatttttttgcaggttgttgtgttcgacagtcggtggagcctcgtcattggaggtcccaagtcacgtctctctcatgttgtcctcgcttatatctctgatcaatgtcctcaagtatcttcggtgttcatccagttatacatgtaaatgatttaaatactaacatttggaaactattaaaaatcttattgtagtcacatttgagaattaatgacacttgatttatatatatatatatattgttgtttatttggttttgttcttttaagtttggactctctttgtggtggattatttcttgggttcaaatctgaaaaaagtagatgagttctaaaaatttattttatcttatttatttatcttagcatcggctttaaagggtcgctattggtaggttacctttaggaacagacaagaaaaaggttagtgaccatttaaaatagtcagttatagtcccttgtattgtcgttagtttttaacagtcgggaaacttaatacccgactatctatgaccaatgcttattccattctattttgtgtcaatggtataggcatcagtgtaacgtccctgcttcaagcctccattgggcccttacacccacggactgatggctcttatacacgagtacgccactctggctgctt

SEQ ID NO: 319049 - DNA, 1966 bp, Cannabis indica
aaggaattcaattgaaactcatcaaatatgaatcgaaacaaagaacaaaaacctggaagacaccggatttaggtggtggtgccgaatgccgagaaaggaagagagatgagggtacgtggtggagattaacgccggcgatttgaacgaagaagagagattgaagatttgggcattaatgtattcagccctaaattattatattatatacaaaatttaatttaaattgtaataggattaggatcaaattaaaaacatatattattatctttaaaattttaataagagaaaaaattaagaagtatctatttttaattataagataatgattttggtcctttcaataaatacataaagatcgtggattatataaatatataaaaaaaagtatatttatttttaaatggaaattttataacatatttaatactaactaacataaattagccttcaaaaactaacataaattaagtaataacatgatctatattctatacctacaaaacaagatcttttgtattatagtttgatacatcaactaatttaatttacattaaatatgttaagtgttaattatttttgtttattttattagaggtttaattttctaataaataaaaaattaattaacgtgtcaaattttgattggtgtaacacagtataggacatcacttttttaatgggagatcttgattcctaggctatacctactgccaattgagtactattgagtatgggtgttcataaaataatcgatttaattcaatttgcataatataacctgcaaagtgcagatatccaatctaatctaatccagttacgaaatattagatattcaattacaatttaattagattgtattggaggttaataaaaattgaattttaattgaattggattaattattagatgttaattttaaaatgcaattaaaaatttattcaatcaaattgcatctaatacatattaaaaaaaattatttatattttatatataataaaagaatgttttgattataatttcacttgcttttttctttcattgttattgttgtatttgtaataattgtttgtttgtgtatttatttttataatgttttgttttattttattagtttgtagcgttgttatttaaattatttcaaacttttggttacattaaacttgttttaagaatttgattttgatttctatgttttgtcgggatatggctaggattggggtggtgtgggaagaagtggaaggagaaaaaagtttatgattttaaatatattttatagttacttttaaaaaaattattaattatttttaattaaaattattatttagacctaataatatttcgacacacgtctaattttaaacaattagcaaatcaattaaaataaaaccaacagacttactaaagtaactctaatggtacgtttactacacactattcataatcgaaataaaataatggagaaatgtaacggaataaataaaaaaatataagaatcaatatttgtaatatgttgtttactaaaattgtttggaaatagaatgatagtaattaatcttgtttactttattaagaaatgtaatggaaatgtttaaattgactaaattacccttttgagttaaaatatagtatataacagttattttataagacatattttaaaaaataaaattgtcattataaatttaacattaaaaaataaaataaaaataaataaaatctattatccttactcacattccttaaaaaattggtaaaaattagtaaaaattggtgggagaatcttttatctcttatttaatcaagttctctattttctaaatttaataaataaaataaacaaatagaggggaatgactctcttaccattaatttctatttactattacccttattttttttaaatcacacattaaaatcagtttttttgaaactcttgccgcaataatcactagaatagagaattggg

SEQ ID NO: 319050 - DNA, 595 bp, Cannabis indica
acgataatcttttataataactcaaaaaaaagcataggtaattttcgaatagcttaaactgctaccgagcaatctaactccagttccacttttttccatggttgagttttaatccagcttagtgcttccttcataccaattgcttcagccaaattcagaacccctataccagcaaaactgcccaacttagccaacactaattccccttgagagactcaagtgactatgccataaccaaatgcaactcatggcagcatcgatagttaccttgattgtactctcctgcagcttaacccaaaatttagctctttcaccggcttcaaaaattgaaatagaagcatctgaacctctattttaggctaacttccattgcacaagacaactcatagatgagataagagcaccatccaccgtagcatacttttgattccaaactaactcatttcgagccttccataatccccaacacaacataacaacttgtccttattgcacttttgcaaaatttgatcatgttagaaccttattttaccaggatctagatttactaacatgtatgttgattataattctataatctgacatcctaaatatg

SEQ ID NO: 319051 - DNA, 1669 bp, Cannabis indica
atatataatttgaacttaaatttttaccagaaataacaggttaatgttagcgtcctattgttttgttttgttgtttttttcttttcatttcatttcagataagcctaaaaaatccttaaaatctctaccgctccctctcgcccagtcgcactctcgttctcacctgacgacctccacctccggcgggtaatcggagcccccttcctcatctccctgtaagtctctcacccctatctctctctctctctattagtcctgtactactatgtaataatgtatctctgtgtctctctgtctggtggcattggcttggtgcgattacattagtattcattcatgtcgtcgttcagctcgtcgtttcgagtactgccacccctttggagccaaagcaacggtcgtttcttgcttcttatccactccaagcgaaaccgaaacaatgccattttcattccccgactactagcctccaacgacgactctgcttccactccgaaacaaacccaggtgaactctcattctcccttattcaacttctttttttcatataaatttaccttgttatgttataaaatcgatgtgggtttttgatatgacagttgggttatgatccttctgaggagttatttggcctcgaggccaatctaaagccaaggtcttcttttttacccttaaattacttgttagtatagtcatttgtattattatgttagcttatgaattgaagactggtcaaaacttttcatgtggaattttgtttcatatttctaggctttccattaaacaattttggattgtatgttttgtattgatttgtaggaatggtgatttaggaagtgacaaacaaaggtcctgggttggtccaaatggtcagtatattagagaactgccttgcccaacttgccgtggtaggggatatactccatgtctagagtgtggtatcgaaaggtccagaccagactgttcaaaatgtaagggaaaggtataacaacagccattttttcttctttatttgtttctttctttttggtgctcctatctaacttgtataataatttatgatcttaatgttttgaaacagggtataatgacttgtcatcagtgcttgggagaatgcgtcacatgggaagaatcaattgacgagcgaccatgggagaaagcacgctccatgtaaattattatcttaacattctttcctatttaggctttttttcttttgatattttgatgcaaattggactatgttaaaaccctttattttcacgtcccagttctcctctaaaagtggaggatgatgaagttgataacttagacatcaagttggacatgacaagaaaatcaaaacgtgtgtatcaatcaccccctcctgaagttggactgaagatcagtcgatctctaaaagttagttctctgtatcactcttatgttagacatgagttacttatcctcactaacttaactttgaaggaaacacactacccccttttagtataagacataacatatatttctatatttataaataaatttaagtgactaattttagaatgcttttgttatcatgcatagtttagagttgcaaagtaaacttatttctgcttctctctcctggagaaggaaggctctgagggaataaatttataattatttcgtgaaatcatttgatggtttt

SEQ ID NO: 319052 - DNA, 2769 bp, Cannabis indica
aaaatcccaacacatcaattgtaggaacattatcatcaatattctcaccacaatcttcttgttcatatgcttcttcatttacatgctcttcatggttttcctgttcatctcccccatgatcatcatgcactatgggtgaaggaactgagctagtgctcacaagaacatttaatcttcaagaaacaccacatccctacttctaataaccttattgttcatttgatcccataatatgtacccaaactcttcatgaccataccctaagaaaatacatgggttttctttatcattaagcttggacctctcatctttaggaatatgaataaatgctctagacccaaagactctcaaatgatcatatgagacatctttctccctccatactctctcaagcacatcaccattcaaaggaactgaaggattaatcaaatcaactgcaattctcatagcctccccccaaaaagacttaggtagcttagcatgggaaagcatacacctaatcctttctttaattattctgttcattcttttttccacaccattatgttgaggagtttttggaattggcttctcaagcttgatttcatggagtctacagtagtattcacatggacccatatactcaccaccattattttctcgaacacacttcaactttcttccagtttctctttcaatttttacatgatgtttgaaagcatcgagcacatagtctttagatttcaaagaaaaaatccaaaattttctagaatgttcattaatgaaagtaacaaaataaagtgcaccttcaagggttctagtttccatagtacatacatctgtgtgaatcaaagcaataaaattagatttttcgatggtggacgtgtatgaaaagaaactctatctgtttttccaactaagcaatgatcacaagttttaagaggcgtacattgcaacagtagtaagaatttctttctatcaagagtttggagtcttttctcgctgatatgactaagcctctggtgccaaagattaatgcttgcatctttttgaactgaattaatatctcctttgtgtagcttagctcccatgacataaagaggattcactttctttcctctgtccactacaagagaaccattggtgagcttccatttacttttaccaaaccagtttatgaaccattcaccatcaagtcttccagtggatatcaagttaaggaaaatgtctagaacatccctaacactttttaggaacaatttgctgccaacatatgtttccaagcaaatatctccaatacccataatctttaaggcaccactgtttcccattctgacattgccaaagtcgccagtagtgtaagaagtgaaaaaatcactacgagcactaacattgaatgaagcaccagaatcaatcacccaactgcaatcttgagtttcaagactaacacacccatcatcacatacaatgataacatcacctttagtggaaatgtattagcctttttctcatttttcttctcttgaatttgctctcttttcaatattttgcaatcccttattaagtcacctggctttttacaatgataacacttgatatcttttcgagacttggatcttgttctagaaccatgttgatttctagtctgacttcgtccctacgtgtcatgcttttcaataacaagagccctagaagaagaaaatgattcaccttgtgctttctttctggtctctccattaagaaaactatctttgaccaaatccatagtcaaagtcccttctggcgtggaattaaaaattgttatcaccaaagtttcccaactatcaagtaaagaactgaggagtaatgatgcttgcatctcatcatccatattcatcttcatggcaactaactggtttacaagactttgaaattgacttgtatgctcaaccatactaccatcatccttgtactttaaatttacaagtcttctaagtagattaattttattgccacctgttcttttggcaaagagattttctagcttttttcaaacaacattagctctggtttaattagagatatgctctaacatttatatccatccatcgtcttatataggcaatgacttttttatgttgaaattttcatccctcatcatctaacttagacaacttctcactacttttaataggtttatacaaatcttccattaattgcttcgaagtaaaataatttgataagttcaatttcatcatttcatctgattcattcatttttttttcaatacacaagaatacaacaccaatcatccttggctctgataccacttgttgagaaaacttattacaattaatcacaatattttcccttttgatatgtcaaaaataggatacttatgaaacacaataataaacaatatcaaatatcaaccaaagcaccacaagaaattaaaaaacacacaaatcaagcataaaagagagacactaagatttttacttagaaacctaatgtgggaaaaaactacaggaccatagtccgctcaaatcatccactattacaagtttaataatgggattacaaagtttttctctagtaagactaaaggctcacagcaacataaagattaaacaatcttaaatcactaatacaaccattatcatcatctcaaaagatggatacacaaatagaaaaaatttggccgggtctcaccaagtgagtattgtagaatagcaccttatagaggacaatcactaaatcagaactgttcgattggtagagcatcttgcaaggatttgtgggttttatgcc

SEQ ID NO: 319053 - DNA, 1090 bp, Cannabis indica
cagaaaatcaattatttatttatttccttaaatagaaaatcatttccttaattagaaaataatttccttaaataaaaatattctaatataagcctgattatcttcttctgattactggaaatttatttatttgttgtaaagtagcctaagagttgcaagataataggaatcagatctatagttacagatatcatggcatcaagtattatacaaagactacaacaaaagtacttgtcatattcttttaagatattgtcatatagtagtgactctacagagaaatattaagttaattatattagatacaaggaataaagaagcataaggaaaaatacactttaggtacacagttcttggtacatacaccttgaggtactctaggtctctatttatgttacttagttttctgggagaattctaataattttgattgatttcatattgaaataatgtacaactatctagtcctaagattatatatctctaaagcttttatgtaaatctagttttgaaaagtcaacagatctgcttaagttgaggggatataaggtcaagtcttgctcaaatcaataaacttgcaattctaaattttatgacaatttcaaatttcaatatttgttaaacaattatcaaatatatatttgttttatttatatttattatttaattaatttatttctcttttatgttttgtaagtaatagacaaaaatttatatccaaaagttgtgattgaggagatgagagaagagtgggccacaaatatgcttctacacttgcaaaatcatcacattttgggtcatttgttaatgttgcttttttaaaaaataataataattattagttatgataaatatttagctaacaatattagttaattctttttttctaatacaatatttattaattttgttatgtatatttatgtttaacaaatattgtaaacattgaaatatcaaatgattgtttagaatttgtattcctttttatgtttaataattgattaaaataataataaataagttttggaaaaaaataatattataaaatataaataattatttataatttaatatataaatgatttttttt

SEQ ID NO: 319054 - DNA, 1516 bp, Cannabis indica
tgatcgaaactcagtattgtttggcaataagcagtcgagattagatgttattctagatttagcccatagtaacatgtcagagtttaaggagtatggttggcggggtcttcatttgggactcagccttgcgaacccagttgtaaaccgacctactcgatggataccacctcctcctaatttcttttctctagcgactgatgcttcgatggttctagggaggggctttcttggattggagggagtgatatgagatgttgcaggtgtggtttgattggcgtggtcatatcgaggggtaggtgatttttttgttaatgtagcagagctgctagctattcgtcttggcttgactctcgcacatcattatcgtttcaatatttccattattaatagtgattctacagtgacaattggttggattaataagcttcatttcaattttagttttcaattaattttattagatatttttctttattagctgttgttggtggtggttcttgcaatgccattctgcgatcgatgaatggtgttgctcacacactagcaacctctgttactagtttaggagagtgtgtttggatagatacttatccacgatttttgagtgcttttataacagtggatttatcttaatgaattatatctttctttcaaaaaaaattaagtacaataaaattgtaatatttgcaaatagcacgccccactcattaacaaactaaaaaattcaggaaaatacctacaaacacaaacaaaattactaaacgagaaattatcacactattctacacttggtattttgcaaaatgtatcgattgtactttctatttgttaaataattattcagactttgtgtttcttaaaatgatacaaaatagtatcatgagctcaatttttatcaaaataaaatttaataataacttaatttggtggtgttataatcagactacttacatttttcatatttgctcgtgttagaaattagaatcaaattagttatattaataaagaattgacaaaagttgagctcgtggtattattttgtatcattataaaaaatacatgattcaattgattatttaacaaaatagagaatctaattgataactattataaaacacagatcataatattcacccataataaaaattaacaaagtacattttttttttatatttagaaaaaatgtctccataaaatatttttttattgaaaagaatttgatcttatatgtgtaataaggcccaaatgaaaataaaaatcaacaccttctaaaaaatatgtaataaataaaattccagtacacaaactaatgataaaaatgtgttaaaaaaactaatgacataaaattatgtgacgaagttataatttttatgaagaaataaatatatatatatatatattttagagattgtatattaactttggtatgtatttctttatgggtgactattcaatggttacaattttattgtaactattatggttacatttttctttgacctgtaatagcaagtta

SEQ ID NO: 319055 - DNA, 1707 bp, Cannabis indica
gagcttcgggacaggttagttgtttgatgctacttttatttatatggattttattacattgactcctaagcctaggaaagtaagtctagtggaaaatattctagtagggtgtcattatatttggatggtcttatctactttcagtggatgacttgggatagttatgatcaattttaatgtatagttttgacgctattccctgggtttagaagtaatatttatatgtgtatgttttatattggttacaatacgaaattgttagttggatgctctttgagactataagggatcagttcctaactcactggttgtcaaagagattacaagggtaatgtataacttttttgttttgacttatgtggggttcatgctagttggttgtattaggtacacgactaagaggctatatgttggtgcttgatagtgttaggagagctatgtggttttgttcattgggtcaattgtttgttgaactattattatgcttttgcaaaaaaaatgttccttttagactttatttcttattttattcggatccaaaattgggtttcttagtagatgtttcagtttagtaagatgtgtgattaagctaattttaattatatttttcagttaataaatttcaacaaattcagcatgtattatttgccaaatacgcctgagaatttgtgaactcaatatgaggaaacattgtatatggaaattattgaacccattatccaatatttgggtttgcctatgataagtggtcgtaacaaatagagaatatttagctatattaaggaaagagtttggtcacgtcttaattcttggaattcaaagttgctttcatatggtggtagagaaatactgctaaaagcggtcatccaagctatgcccacgtatgcaatgtcttgcttccaattactagtgaatttatgtaatcaattggaagctcttatggatagatattggtggacctcttttgttgctaaacagaaaacacattggttagcttggaggaaaatgtgtttgccaaagactcaaggtggcctaggatttagaacatttgagcatcataaccagccgctactggctacttaggcatggagaatacttacatgtctggactctctgcctgcgagaatatttagagcaaagtacttctcccatacaacctttttgactgcttcaggtatgatgctctgacgagtctggctattatggggttggaagtatatatttattgttatattttatcttctattgcaccataggtgcctttaagcactcacattagatgtatatttcttgtattattatatggtattatatttctttgtctaagtcttatggatacgatgcatagaaggatatttatagacttgattatggttggctttgacttaaataagagtggggtttttatgattgttttagtaggactacaatcagttttttcttaaagtaaaggatctaaatcaattgttttttattgttttgcttgaattcttttgatttttagtggcgaggttggttccattatttaggctatttttggtgtgttgatctgacgtttaataatatgttattatgggcggtattgtgagtataattattttaatttacaagttttctttgattttggatatagttggacaggcacctagttatgtttggcggaacgaaatttggggaaggtctcttttaacaaaagggttgcgtaag

SEQ ID NO: 319056 - DNA, 1351 bp, Cannabis indica
aaatatatatatactcttgtatcatgcacatgttatttcatattaatgggacaccttatttaattcctacaaagaaaaaactcagtatatcttatcactttaggattttttctatccaaatcatattactaattcactattgctgaatcacatgttgaaggggaaattaattagtcaaccttgttgacttaattaatttccatagccatagattcatctgcaaatgcatgttatgttatgtaattaataaaaactcaacaacaacaacatttcggatagtgacatatccattttggcaatatggttttcgaggtgtccctagttcctatttatgctgtcaaatagaaataattactttcaatataaatatttatatataatatataaatgtattatgtatgtgcctaattcaactccatgaattgtcaacagtgggtattaatggataatagagaacaaaccacatttataatggttcactcaatatgatgacctgcgttcagtggacaaaagatcataatttagctttttaaaaaaagattatatttttggatttttttaaagaaaatatgagaggataaaattaagaaataaaaactaaaattaagcttttttattataaaatttatcttaaaactcgtctttaattttaagtaaatgtgaaaattactattcaaattttcagttaattttattacgttatatacaatgtaatgtgatcttacgtactcaaagaaaaataaatttatttaatgtatgttcatatgtaaataaatattgtatttctataatagcatgcatgaatacgtagatcgcatctatacttaagaaaacctttaaatataaaattgtttatatttatgttataactaatcaaaaaatatagattttttatttttatttttatactttaaaatagctttttttttttgcatttttactgaattccatatgaaaactcatatatatagtaattaagggagcaacaaaaatctacataacaacttacataaaaattattgaagaaaccaacaaagtaatcaaaaccgtaaattcaaaaataatatatagagtaattttttaaaaatatatatttattattattactattagggataattgcggcaaaagttcccaaaaacttagggttgatacagattaatccccaacctcgaaaattggcggtaatagtccctaaggtcaccatttttgtaagtctgttggtcctcaatttaacagatctgctaaatacggacaagaatgctacgtgtttaaatattattggaccaactcataattttaattaaaaaataatttaaaatgatttaaataatgaataaattattaaaaa

SEQ ID NO: 319057 - DNA, 1686 bp, Cannabis indica
tcgtctaaccgcagagcatgctttgccaagccatgggccgctaaaatctcagagcgagccacatgggacaaaactgttcccggaaatttagacaataaagttataacaatttcaaacaacgctcctaattcgttgagtccaactaacaggactaaagtttcagcctccaacactgaaatttcacctgaaaaaacatcagaagaccaaaaaaattaataattagaaaattatcaagcttatcaaaatcaatcaaacaccaaaactaaatgactagatctccaataaaattactagaactagccaaagggaataccctttggctagtatcaactaaactctttcattttacttcataatcatcataggatcaccgatcactatcccatactaagatcctaagaaaaaagattttgatatgtagtctagtaacaacaaatattgcctgcaatgctcccataatctaggagatgaaatttcctttggaagtaaacaaaatagtgaaaatatataattaagcaacgaataatgtttctaatgtacccactatgactaatcttttgaggggttttctcaacgcaacgtggactatattatcttttgataatataacacaacacctaatccaaactaagctcgtggtgcttaatagcgcaaaattcctttgaaattttttatttctcatgaaaatatggaacaattaatcatattaccctaaataattaggggcaagctataaaaataagtgcaaaagccttaaaaggcatcaaagccaacaaaattgtggcacaacaaatcttcacaatgtattaacatttctatttatatgtttgtgaaatttgaaaaaagagtatgcataaattgattcaattcaattataaacgattaatccaatgacactcaaccatcaaacattaaatattaaattgtgatcaaatcaaatgtttgatgaggtgtccaaaaatttaatacaatcaatcaatattcaattgaactaattactatttttatgcatttttttaatggagatttatgtatttaatttatgtatataaaatttaagattaaaattttacttatttattattttttttaattttttgtagattaggatttaatttcatcaaataaaatatttgacttaaaatagatccgatccagaaaatatcgactctaaaatattagataaatctaaaataatctaataaatatatactagatcagattcgttagcaaaatctaatatatagttagatcaaattttaaaaatatattagttataagctattttttgttaacaatctaataagcatgtttttgaaataaatacagatttaacaagttcttaatcttaaccacaaagaatatcctatcaaaatcaactaataataatttcatttcaaacaactatctaagcaaattgagcatagtactcaattcaaaatctataacaaattctctattaaaaacttcattgtaaaaggagaatatctaattttaagaggaaataaaaatccttacaagaaatctcctacattaagaatctaagattgtcttttttctttatataaataaatattacatgtttttttggtatgggacgaaaccaaattaaagtttcaatcatattattatcttgtcattttctttataaataaacttttttattttttaaaagaaaaaaagaaa

SEQ ID NO: 319058 - DNA, 735 bp, Cannabis indica
tattacaaattacaacacaaaaattatttaatatactatttattttatttttttaatcatttttgttatacaaataattttttaacatatataaatgtaattggattgaatcgatttttaattaaattttgagatttaataaccgatataattctattagaattcaatttgtagcatctaatacaatccagttgtaattaaatatctaattttttgtaattaaattggattgcatattatctacccttaattaacaatatttttttaaaattattgtcttgaaatttgatacttaattacatcctaacattaaaaaaatgatagatatatagtatctttaagcatttctctcctaaaaaaatatttgttaatataaaaattacagtgtcatagtgattcacttattggttatggacaattaaattacgtttatttctttgttattttatatcgatggaatcaatagtgaaagactttttctttgtttatattttgggacaagtagggagtaattaatgttatgtttggtaggatgaaaagagaaaagggttgatgaagagatgagaggggatgggaagtaggagggattgagagatgagcggggatctttatgttttttgatattaggtgtgaagttagaaagatatagagagatagagagaaaatattaggtgccttttggtaacacttttttaatcagttttctatttttaaaattgaaaaagtgaaaatatt

SEQ ID NO: 319059 - DNA, 2341 bp, Cannabis indica
ttgttgtctccaagaagtactctacctcctatcttttcttcaaaattacaaaacaaatctttgttagggcacatgtgaaatgtgcaccatgagttaagcatccattcctgtccagaatccacattagatacaacaagaacatctgcagactcatatcccgtgtatacatctcctctaaccttgccattgttgccttcggtcctaagtttagccttcgaagccaaacattcatctctgaaaggtccctctttcttgcaataataacatttcttccttgtggctccccttgaattggagtttgatcttggcttgccactgttcttgtgctttttagttttgttatccctgctttgtggtcttcctctggtaaacaagccttcaccattgtcataatctctgtcatcagttctcttctgaatttctttagaacttagttcaaattttacctcagacatggtgagtctctttaccatagagtattgtgtctacaaaatccttataagtctttggcaatgaattgagcaagattattgccaaatcctcttcttcaagcttgaacccgatgttacattctaaactggttttccaatttctattttccttctctaattcttggttttcctgtttttctttcttccaacgaccaagggaatgccgcgacattgtctgctaaggagcaatattgatgaccagtttcacattttcttcatttttcaatttatttttataaagtaatcactcttgactatagaccactacttttggaactgaaaatgtaaattttgtaccaatttttttttttttgatgaagaattttgaccaattttaaataataaaaatcccaactaagcattatttaaatcttgaagtttactttttctcataattacctatttttgtcttaaaaagacttgaagaacaacaaaataaccaaaaacaaacatttcctaatatttctcctaaaaaaagcaagcataaatttgcataataaaatgataaaaatactaaaactcacactaaaattgactccaaaaataaaagtaaacccaacaaacttgttggacaatgttcacaaagtgtcactatttttagaaaagacaccaagaacatatatcacatccacacatctccatcttagccagctttttatgaccaaaccaaaagcagttgaaaaaaaaactgttgaaaattgagttgaaaataaagcaatataaaaagaaacattatttcttccaagtttgaaatacttcttaattattttgttttcaacttttaatgttcgattgcacaataacctattaacatatttttggtataactttataaaaaataaaaaagtgttgaacttctttacaatatataaggacatgaatactagtacatatttactaagacaagaatatgagaaagtgttatcattatttattatacaaagaaaagtaataagagaaagtgaattgatttgtcaaattttgagtggtgcaacaaaaaaatctaaagtatataatatagaatataatcgaacaccaatattcgtttattttcatactaaatttcacattatattatataatatgtttatgtttttttatatataagcatattatataatatgtagaaatggtggatgcatcataattataattttgtgaagcataacaatataataatagattacaaatcacaattgtgttgacttaaccaatattttcttttaaaaaagttatccatgatacgctatttaaatatatatttttaagttatttggggtgaaattttttatgtttaaattttttatacttaatcttatttctttttatttttagtggtaaaaattttttatgtttattttttatttggaataattttacaaatatacaaaaataacaaaaaattacaaaaaaatacgattttacggaattttaaatatttttacgaattttttgattttatttacagaaaatacggtctttttatgtaatattcatgttaatttgttattgattttttgtttatatgtatgttattttttgttgttgttttgatgttatttaaatattattttttcgttgttgtttttacaggaaaccgtaaaaatgtaaaaaaaaattcattaaacgtaaaaatgtaattttttacaaaaattaggggtgttcgtggtgcgggtggtgcggtttttaattattttttcaaaccaacccgcacatgcggtttttctaattttccaaaccgcacccgcaccgcgatactaaaaaaccgcaaaaaataatgcggtgcggtgcagtttctgcggtttatgcagtttgaactattacaatattttttttttgaaattcatcat

SEQ ID NO: 319060 - DNA, 535 bp, Cannabis indica
tatgaaaataaaagtaaaaattaaaacaaataaagtaaagtgggtatacaatgcaattttttctaaattagatgagtattagattataagatcccatgagatttaattttcagctaagcatatttgatcaacacaggactcgtcatttcaaattgttgccatatgactgactgtatagcatttcattgcaagtcttgcaaattttacatgcctacattactagtcgttctattttgttagtataaacctttttagcccaaaaaataaatagaaaaaaacaattttttttttctttttgaaaaagaggaaaaaaaaacaaaatactttaatcaattatatgttataattgaaatgattggaaatagacaaaagagaaaattgcattataaattacttcttttttggttcacttaacttattattattattattttaagaatttacatattgattttaagcttaatttatataaacaaaaaaataattatatatagttttatataatttgtaatgattaaaatacgtagatgaaacg

SEQ ID NO: 319061 - DNA, 2259 bp, Cannabis indica
aacaaggaagtattgctgtccccatctctaatccagctaattttcgctttttgcagcaggaaagagttgtaatgttgctgagccgttacaaatgccgtcctagcagcaagctcctgttcatgtagtgttgtgttcagggggtcctcttgcagctttgattggacttcatccaatgttttcttggtttgtatcgatgtggcatgtaaatcagagaaacccaactgattaatctctcttagaaccggtttcagtgcctttagtttagacactacctgatacattagcgtaccatgaatcactttcctccatgtcatttcaacccgcttgtcatactcaggatgagatttccacattctgaagtacttaaacggctttttgccacaattccatttgggatatagtgataagatacatggtgtatgatcaaaagttccttcgttgagaaataacgcttctgcactaggatagttatcacaccattgttggttggctagaactctgtcaatctttgaatatattctatcatgaccctgctgcttatttgtccatgtataaaaactaccagtagactttacatccttaagctggcaatgttgtaggctgcctatgaattccatttcagcttggtatttcactcgatgccccactctttcttccttggttgtaattgcattaaaatcacccatgactatccaagattcttttgttttaagaccattcagatctctccataattccaatctcccctgcctatcgttaaacccatatactactgtcaaaaaactgctgtatgttccatctattgttgacattctcaagtgcattagctgacttgtgcacttgataatatcaacaataaaacggatcaggttccatgctataacaattctcccacctttgtgccatgctatattcgaggagaaacaccatccattgaaaacatttaggtacaaggctcccagtttgtgagcctttaccctagtcttgagaagcccaacaaaaccagccccctgtactcgaataaactgtctaatagcttgttgtttttgttgtttgttggctccccgaatgttccatacaatgaatttatccattaccaagagagggatctcccccctcttgtgttatccactccttctgcttcttgctcctgaattcccagctggtctttctcggctagaatctgaaaaacattggtgagctttgtcccattgtcttctcccttcttttctacaatttttttacccttagaaaccatttgaaaaccctcatcatccacgggtggtatctccttccttctatcttctttaaccacccactcttgcttagcactctttttcttgttacattcatctgttaaatgccccatcccagaacaatgcttgcaaataaccggtttccattcatacttgacacctacatgaacattgctgccaaattcatcttcgaaatccagtaggctaggaaattcttgattcattaacacttccaccataactcgagggaaattcagtcgttctctttccttagtgactgcatcaaccattataggcttgccaattcgaccaacaattttgaaaagtgatcattccccagtatttgagttcaaggtcttcgagttgtatccagataggcacagtcttgacatcctcctttctgaagtttgtatttggatcccatggcttcatgatgactggtcttctattaaagaagatgtagccagcattaagcacctggtccctgaatgttatcgagtgaaatctgatgataaaaactccataagtaagcatcttgactttgtctatctcatctttccacaatctattaacaaatccttcaagaactggcaatggaggatttgaccctaacacatagcatacaatggatggggtccaaaaattaacttcctcctcaatatcatctaatgttatcttaactttgctagactctccattccccttaaaatccgactgctgcaaagatttttctaaattgcgaattattgaatcagatcgaagaacagggggttcgagtgtttaccttgaagcaattcactgttacattgctggtttgcctgtataaagtgcaacatatccattcgagcgtcttccatgcgcctaatttccttcggagatgattgaggagacagtggagccggatacacatcacggagatgcgaatcaccattccttctccttaccgatccattgaggacatcatcctcttagtaatccctatttcttcttcaatcgccttcga

SEQ ID NO: 319062 - DNA, 1093 bp, Cannabis indica
gtaaaatatttccaacaaaatcttcatggcaaggcttgtcctcctttggattgaggaagatttgtcctagttctagaggagcttagttggacaatttatctatagaccctccccaatctgtcaattagtcacccttagaggggatctgtgaagaaattcatacctcttctcgaagttctctcattgagccaccttataaggttgctagcttctcaattacgtcggtctagttccgcctggtgagatcagaggatgtactcttagtcctccatccatcttagaaatttgcatctctgttgtgcaaatgcaacataactaacaacgcttgattcttcagttttgttgacttggcaaaccctctctaagtctagctaactcaagatgttctcccaagtctacatgaggctcaccaattcttgccctcctctctacaacacaatactggggccaaatttagttgtggtgctcgggggccactctgcattggccattccttcagtgcaaggtaccaatggagggtcttccctatgttgcagaggtcgtccattgaggccaactagaatgttgatgtcaacttgaccagttgtggtggccaggtttgtggtgcctacagagatggcacgtgtggctacattcgtcgggttaatggagattccagtcttggctaaaacttgaacattaagatcagccgacataggatcttgaggaagacctaatgaggctgaagttgtagccagagttcttcttgtgttaaccatggcgtttgatcatattacttgatttcgactcgctctcaatgaaagcaccaaactattgacctcgaaatttggccaaccgatagcggaatcatatttaatgatgattcttgccacgtgttacacaataataataataataaaataaataaggaaaaaaattttacagaggtttggcccccttacttggcgtgtaatgacctacttccctttttgttgtattgatactaaaaataatactactcggatcataagtattgtggaatctgtagtagctctcttaagattacaatgtatgaactaagtatgtaagtatcaagtgagagagagagagagag

SEQ ID NO: 319063 - DNA, 1447 bp, Cannabis indica
cgaagagagagagagagagagagagatggggtgcatctgattatgactttaggttttgatttatattagtttatatatgtaaagtttttatgtttcaattgccctttttttttctttatttaatgtttttaactgacgctaggttgtgtctattataaattgatgcaaatgttgaatatgtcattttcaaaccaacacaaaatgccattggtaccaattgatgaaaaattttattgtaggtttttttttttttttgcgtcggtttttggcgttgattgacgtaaaaacacatttttgtagtagtggaattttaatgcctaccaaatcgtgcctcgaactttgatatgtaccaaatcgtacctcttgaatttttatctacgttaggattccattattaaaattagacaaaagtctttcagtccaacaatcttaatagtttaaggaaatttttcacaatctgaaaagtttagagaacattctttggtacatattaatatttaataggcaaaaatcttaattactcttattataattttgttaatttattttggaaataaagtttcataagtggtaattatttaattacaaattcgtactcatatatagtatagtataggtagcaaaaagcaaagagctttcaaaatataattttgggtccctttgttaaccggatgggaatggaataataactttattacaatagttattaatgtaattcatgcatggctctatatataactaaccaatcgaattaatatgctcgtgaacgttttgccaattcccaaccatcgtggatattggtataaaaagctcaccgccattaaatgtcacactcacactcctttaattatatacaagccactagcataagttataaatgcatatctactttaagattaatttgcatcaataacattatattattggacacaccatgaaagctataaatagaaatagagctgcacacatgcatgaaataaccaaacacaagacaaaccgggtttattattatactggaacaacaacaacctaataataaagtcttcctaacaagaaaattaaaactatatttagtgtgattaaatctattaaaaatagaaaagaaatttgtgtgtattaatttgtggagtttatattacttagtagtttataaattttaacttcataataaaattttagtaattaaataaaagttacatttagtttcactgctacaaaaagaattctttttgtatcggtcaacataacaatcaaacgctagagattgacgtaattaattataattatagttcaagaattttaagtttgttttgcaccaacactaccttgctctaatttaaaaccgacacttagctctttagtgttaaactggggttaggttgctgattttgatatatatatatatatatactagttggaacaacacgtgctacgcacgtgtaatctt

SEQ ID NO: 319064 - DNA, 1153 bp, Cannabis indica
tttttaaacaataaaatagaaaatatgtttcttattttcatgaatggttcagaatattacaaagattttcatcttttgacccttggggacggggttactttgatggtttatacaagtatttttggtttactaatgactactattacagatacgtcatggtacggaattatttgcactacaagatcaaattagtgtttatgttttttaaagaagcactattatggtgcaagtacctattacagttatcaaaaaaatatcattttatttttttaaaaaaatagaaaatgtgtatgatatttctagaaaaataaaaggtattataaaataaaaaagtattatgattaaactaaaattatagttaacaataaattttgagaattattatattttcttcttataaatagcactaattaaattaaatatttttcaataaaaatgatgttgtttattgtataacatccataaaaaaataataatatttaaacaactaaaaatatatataaccaaaataaaaactaagaatattataactaagtatatgtatattgtacataatattaacctatacaggggtaaaaatttcaaattgttatgcctttttccttaacaaaatgttaactataatatttctaaaatataattaaattgagctctcttttttttttttaaaaaaaaaatatattttttaaatagtggcaaaataaaattgaaaattgtaatattattcttttaggaaaaaaaaataaaaattttttgtaatgaaatttttgtgccacggtaaggatcttaaacgagagcctaacttgcctccacccttaggtcgacccttggtatcatatatatttatgtttagcgaacaagttagtaattataagaaaaataatactgtttaacaaaaaaattatttaaaatggtaatatttcgtaatatcatacacaaatctctgagaaattatcaagaaagtgtaacactttaaatatatggttagagtgtaattatttggttaaacaaacaagtcaaacacattagttattttgaattatgctcaacctaattaataacaaacttaattgaaactcttaaggttgtgttggaataatttagggaaatttacaaaaatactgcttttggaccaaaactttacatttatact

SEQ ID NO: 319065 - DNA, 868 bp, Cannabis indica
ttgcagcgctagttacaatagagatttttttcaattattagtcatgcaaatttttctaattgaattcatgtgtatataatagtttatttatgtttatttatcaagaaggtttggacagaaatttgaaggaacaactctttaggacttattccgaagctccaaactaccttcaatcctaccaacaagcacaatgtctacattcctcaggcgctcaagatgttgcttcacctcaagacgttgcttggattcctctagaagcagaacaacttaaactcaacgttggtggaacagtttaaataaaagacgagaaaacatgcttatgtgctttggtccgtaactcatcaggacaaacattgatgtgtttgcgaagagtaaccgcaacatgatgcaaccaaaaattgcagaagcataggcgttactataagcactacactattgtcaagacaagcaaattataatccaccatttggagatggactatctgaaccttgttcgggatattaaatcttaagaaagtacccttatcgattatggagcacttgtggatgctctaaaagaagtgttaacttccttcccaacggtttccctttcgcatgtcaagaggcaaagaaatacaacagctcacaatcttgtctaaatatctattgagttagtgaacacttagatttggtttggaagtgaccacttcccttgctcgctgtaattttgtaggtcactctctcctaaaaaaagcttaataagctaaacaataaaaggtaaaaccaaaaaacaaatctcaaaagaaaacagggagcaatttaactgaaaagcttaggtggcgtttggtaacactttttaatcagttttctgtttttaaaagtagaaaagt

SEQ ID NO: 319066 - DNA, 884 bp, Cannabis indica
agttaagccaatgcgtacaaatacaaaagtctgaagaacacaaaatttcataatgctcaaacatcattattaagtgatggccttttgaacatttatcattcaatggtttggaaaagccttagtgctaaggtctcaatgaccacttctaaagcaaaaaattgttttaacaagcattactcttcagtaatgtcttctggacagagtttatcctttaagagtttctattttttagctaagatccgaacaaatcatgtaatagctttttattatttaataaatataagttacattataaatgaataaagtaattaattatcattcaaattgtgtcattttataaatgattgcttgcaaaattttagtgatttatttctaaagtcaaggagcttcctacatgtgtacaaacagacccacctaagtacagggtccaaacagattagtatggcatactctggtcaatttgagtctaaagcttgctcggtcacttgggggtacctacacccatacaatattggtaagatgccatgaaaaatactaagattttttttaattattttaaaatttagaaaagctaagtacatatatgcaaaaataacaaataatttatcagatttatgcatacataaatttatgcatagagaaaaaggagcagagaaagtaacccttttcaatatgtcaaaatgtcattttgttcacaggacctaaataacaaacttgtcaccaaaagcacatgtgagaggagaccaaatagataaacaagaacttaatttaaatttgcaattccaaatatctcaatcgcgtgaattttaaactaaccaatatttttaacagagcagtgattcaatttcacttttcaagtgtaatgaccgctctagtaatgtgga

SEQ ID NO: 319067 - DNA, 1373 bp, Cannabis indica
aggacagaatctttgcaacagtggacttgcagacccgtgatctgactgaaccactatatttctcttgtgttcattatttttctagtcttatattaagtatttgtgttcctggtattctgggtcggatactcgcacttgttcattagttcttattattattataattaattcattgtgttgttgttgtaaaaattccttcaacaacattttggcgccgtctatgggaacgacaatactttttgttgatttagaaggaaaatcatcatggctggaaactaagcaaacgagggtcttaacaacgaattcatcaacattgggatgatgaacgtcccactgtcaggagataacgtgcctcccgtggatgttatcaacgggggagtaggacggggcaaagtgacgcctcttaatttattcactgaagttactgcccctcacgttagggaaacgtctacaccggcatccataacgggacattttctacctatcacgcgggcagtggtatccaaaggcatcatccagttaactactgatcagtacaccgcaattcaagatcagctacgtgctctgtaggccgaggtcgacggacgaaacagggctcgacgtcctccctgagtgcccattacacgcacggataaccctcaggtaaaaaattttagacatcgcaataaccgtacttgcaagaaacggaggacaaatccggaagggctagatttgaataaaccaatgtcgagggaccagtccgcgaggaacctcaaccaggaggcacaaacggaggaggaccctgagcgacataaccctcgcagcaaaccctagccgcgagacgaagataacgacattgagtccagctcttcatcctcgaacagtcgcagtcccagcagatacaccagatcaggttcggtggaaacaccgcgagtagggcgataccatgtccataagggtgatcttcgttacatcttaacgctgttttcaaggcgctctccaagacacctcggaacgttgaagatcctcatgatcctcaggtgggaaattagggcataaacagtcataccaacctgcctaccgcaactgcgaccactggagtcaatatcccagcaaacatcgttgcggtaataacgacacctgcaacaacacagggaaatgttgccttaacgggaggtatcgatcagggtatgcttctggaagctttaaagatgatcaaacagcaaagaaatcccattacaagctgcatgggacttcttctttcactgcgaaagtacggcaagctaggttgcctaagggattccggttgtcagaatctctaaaatataaagctaccactaatcccatagattacttagaaaaatttaataatattatggaagtggatcaggtac

SEQ ID NO: 319068 - DNA, 535 bp, Cannabis indica
aaatccaaacaactacatttcagtttttttcgcagattgtgaatttaaagttaaaaaaaagaacaaacctgggtattggacgaaggtggggaactttttcagttgtggggtagacggagcgtttccggtcgtgggtctcgcgggtctcctcggtcgccgtgggttcgagtggtggtctgggtcgtctgggtggttgtgggttcgacgggtcgtctggcttcaagtggttcgagggtcgtttcggtggccgtgggttcgacgaatcgtctgggttcgtgggagggtttgagtggttcgagggttcgtttgggtggtcgtgggttcgacgggtggtctgggtttgtgggttcgtggctctgcttgctgcgtgcgtgggtgggttcgtgggtttgggagagggaaagaagagagagaatgtagttagagggaatgtgggaagtttgaaaagacaagggtatttttggaagaaaattgaaagattggtatattttttctatgtgtgataattaggtataattaaacaccatgtctaatt

SEQ ID NO: 319069 - DNA, 784 bp, Cannabis indica
ctttatatagaatagatatatcaccgtgtggtttagggctatatagaattgtatataattaaatgattaaaaaattaaattatttcatattgtggtttaaatcattttaatagaagtttataatttaaatatagtaaaaaaatttcataacaactgactaatatatctatagaaaactgattatatatgattttaaaattgttgtcatcacagtcttcaagtcgtcattacattcaaaactgttatcatcatcatatctcacttataatcttcattatattcaaagtcattgttgtcatcatcatatctcgcttatctctattgttgttatcactgtatctcatttatagtcattattacactcaaagtcgttgtcatcaccgtatatccacttatatgcatccaatcaaacataaataattataattcatgtaatttttctttcaaataatgtgtgtttaaaaattagatttttattttcttcgcgtgcagttgtattttatttagtgataattaaatcataaaactatattaaattttaaattttagtattgttttctcttaaataaatattttactaaaaaaattctcttaataacacacaaaaattattatagtcttaatttttttaattattttaaactaaataaagataatttttaatttattatttattataaatatattatttatatgattaattttcaaaatatatattgaataaattaaattaaaattaaaaaatataacaattgattgtttattaaaagggaattttacaaaa

SEQ ID NO: 319070 - DNA, 917 bp, Cannabis indica
agttaattcataagtttctgtcaaaagtttaccccaacttttaatatctgcccctttctgcattaaacattaaaaactgtgatcctcttaagttgaagaaaaatgatacatgtacattgctttaaatgttcaaatcactggttggtgtgctatatgacagcatgtaattcaaagttcaaatcatttatttttattttatagaagttcagacataatttgtgtttacttctattgtaattccttctacaaacattaaacctaaaagaaagtttattaagctcattatcttttaaccttctagaataagctgagaaaatgaaatatataaaaagcatggttatcaaatattgaaattgaacattttttgccaagaaataaactatatatttgattgaacatgtaccttttctatttgggcagccttaaaagcttcagggtttagtttgcctgcaggtacccctgcattgtttatctgtaaaactttcattattcattaaaatgtgaagttgaaagtatcacaataataaagttgcaaatcgaatattgttgtaacatttttggccttttgcatgttaccatattggaatcatatcaaataagcagaatataaatataagttaagtttcaaagatatgataccaagatatcaagttttccaaattttgttttgtacaaaatcagcaagagcagaaatggaagaaggatcagtcacatcaagctgatggaaaatgactagttgagagaggccagcctctgctaatttttcaacagcttcaagaccccttttctcatctctagcagtcaacatcaccactatcccatttgaagccaactccttcactgtcccaaatccaattcctttgtttgaaccctgtaaactactgcatatctgatcaaaggggaagaaaacggaaaaa

SEQ ID NO: 319071 - DNA, 841 bp, Cannabis indica
tagaattgtcttataatatactttaatttttcacaagttttcgtcggaagcttaaagacactcatcatataagttgaaatagcttgaagaatagaattgatcagtacttctctcccactggctgaaatgaaattctgcttccatccccacacatgcttcctaaccttttcacaaatcccctcaaacgctcgctgtttgtttctaccaatcaccataggtaatcacatgtatttgtcatgcgtagccactgatgtcttccctgaaactctcagagccccatcttgatccacctattgcgcattcagactaaaagtgataacaaacttctcaaaattaatcttctgccacgagacagcctcataagttagaaggatacactttatagtttcactatcacctccattagccttaccaaacacaaggctatcgtctgcaaagaacaagtgagtaacacgtgatcctgatctataacacctaaacccaatcagttcagttctggcttcttcaagggagaataacgaagacaaagattctgcacagaataggaataagtaaggagataaaggacatccctgtcgtaaccctcttgtcaaaatcacgcgacctttagggcgcccattgattaaaaaagtgtactctgggtcgtcacatagtccacgataaccctaacctaaccctcaacaaagccaaactgtcgcatcatactgactaagaatccccattccacctggtcactatgctttactcgtgtcaaacttaagtgccataaaactctttctcctgttatttcttttaaatagtgaatgaagaagctcaaaactaaccataatgttgtcatgta

SEQ ID NO: 319072 - DNA, 1738 bp, Cannabis indica
aataatatttcaaatataaatatttaattttttcaaactaaaaatttgtaatctttaaaaataaaatacattcaaaatcttaaaaagaccaaaatcttaaataaaactagcaatacgtggctcggcacgtacattcacctagttttattaaaatgtaccaacttttgtaagtgggttgctcaatatactcttattttccacttatatttaacacataatttacattaacttaaagagtataataaatgtatcatctataaaagtgagtatatcttacagaatataaaaataaaagtaaaaagtaaaaaaaacaggtaaaatgaatatacaatataatttcctcaccgaaatgacccaatttcacgtatctaaatgggcctgacagtaaaagcccagacaaacaaaaggcccacgcacactcttaaatcgaatcgtgatattcccacgcaccactaaattcttcctctcagacattgttttttccaaagtgaaactatactttttcttttgaaaataaagtactaatcataataatcgtctagataatgaaatcctaaatctcataatgggccaagcccaagcccagtaagaattatatggttatcttgaatagaaacaaagagtttttacaaaaatactggattttaggtaaaactttacaattttactaacatagaattttttacaaaatactatctttttataaaataaccgtaaaacaacgaaacagaacaattaaaacaacagtggaacaacaaaaaccaaccgtgaaataaccgtgaaaacttaacacaatacacaatatttgtttaaaaaaaattccaccttatagtaaaaagtaaaaaatttgaaaattcagtatgtggtgtaaaatctcctaaaaacaaagcaataaccaaacacaggcaagcaatgaggtcaattctgtattaattaattggtagtcttcgaaagaccgacaatgtttgaatgtcttttcaatatttagtttttgaattgtatttttgaaagagaattgctaaaagacactaaaaataattttaggaaatatcgttaaccaatctttaaatgttgtctataaaaagtgttggacaccactggtattaaataataatgctctttcaaagtaggagtaaaatataattttttgtcattttaaaaatttgaccgtgttcaactaatattttctaaaatttttttcttttcttttttttaaaaaaatactttagcattctactatataccacgacatgaactcaaggccaaccatagtattttggaacttgagtttttttggggccttgagtaaaatttaagattaagctctttatatataaaaaggatgtgtttattagaccacaattttatcacactgcataaccgtatcttatttttctagttttaaagtcttgcagtgtaattacgggttgaaaaattacaaaatcagcacatgcagtttggtttgaaaaaatagtctaaactcacaccattcacacactcatatccaaaacaagacaggatcaaaccgaatccaaacccaaatctagatagagattgaatcatatccagatcaaaagagaacacagacccgactttagaccgcaaaaccggccaagtcctaggtcaacatccgggtcacggtcctagtccgagtctaagtttgggtgggtgggtccatagctttttttttttttgaataaagataaacttcattaactcatgagcaatcgctcaaaag

SEQ ID NO: 319073 - DNA, 622 bp, Cannabis indica
ctaataatgtttatttaaatagggagaactgcgtaaggagcttgataggaaacgactcgaaagacaatctcagagtgatacatctggtactgaatctgatagtagttatcaattcgaggtacttaaaaagttcttggagaaagacctgactatcaaagaggtgtgggttataggatcaaagacaaaggaaagaactcatacaatcaaagtcagttagctgcgcatcctctgtcccctaatgaaatgtacaacactatggcagatatttttgcaactatacatgacacattaggtagcagtttgatacctgaacaacctgccaatttatataacccatattttgacaattttatccatatgtacagtcaatcacaatctcttggtagttcgtcttcttagagttatgtcgctccaccacaacctcaacaccagcattctccgtaggaccaacactagtctggtcaacagcagggaaatcaacttgttgttggaattattttaccaggatcttagatctactcacaagtatgttgattaacaacctaaaaataaacttctaaaacgaatataattaaacacatataaagtatgagaaaccttatattggttgcagcggaataat

SEQ ID NO: 319074 - DNA, 2641 bp, Cannabis indica
agatgctaagttagatatggtttgctgctgggtgcgaattcgtggggttccactgaagttgtgtacgcaggcaaacattgaaagggttgcgaaattcggtggggaagttgaggaagtttgttagagtaactcgcatcaagtgttgttaaatggatatgtctatatgcgaatcggcttcccgattaaccgaggaatctttgttggtcagtttgtgaaattagcaggggtggattactgggttcattttaaatttgaaaagttgttcgtgctttgcttccattgtggatattggggtcatgagaaaaaagattgtgaaaaggagaaaattatgaaagagggtaaagataggagatgggtaccaagatatggtgaatggttgaaggaggatagcccaataccaaatttttttgttgggcagtccgtagtgtaggtgtggcgggggattacatcaaataggggaacaggggatgggtgaagaattagctctgaaagatgttgtataaggagtggcgggggaacaggtggaaggtggccggagtgatggaatttagcgcgaggtggacgataggggtgaggcagttcgggatcgtgggcatatgactcaactgcctacagttactaaagatggaaatgagaatgtcaggcccaaggaccatttgggggaacaaggaaatgggccaattgtaatatttggagaaaatgttacttgtgttgataatgggcttacgactgagagagtaagtaagcctaagtctcatatgcaatatattaggcctggttcattgaacatgtgtactgagtcacacgataatattgtagaggactcaagctgcttttttgtcaatgtggaatatcagaaaagaaaaatttcgttttaggggtttagtctttacttcgaatggaatagaggagaatgatggcggatatgaaggagatgatgcgaatgagggtgaacaaaaaaaaaaagaaaaatggagggaaagacagaaatgtggaagagaagggggaaacgagtgcgtagtaagggtaaacaaattcaactttctggtcagaattgtcaaggggatgaaattgctgagaaaggactgggtattgcaggttcgatgggaagattgactaatagtggtcaaaaacaaaaagcttccattaaaaattgggcaaggaatttggctaatagaggaactaagaaggtacagggaacctcattgaatagtgctacaatggtaagaaattattcgggtttggatgcatttgagaaggaatggggaggtgccgattttgtcttcaggttaggtgtgtatgagaatttggtggtgagttctggggaagaaatctttttgaggtgagtatttcttctaatgttgatttaccatctctttctgtctctgctaaagcggcgagccttaacgatcaaggccactgattgcaatgaaaatgataagttggaatatccaaggaattggaaacccttggacattgtgtgctttacaattccatgtgcgtgaaattggaccgagtattgttttttatctgagagtaaactgactcgtgatcaggccgagcgtgtgagcagtttggtaatctttgaactgtggatagagttggattaagtggtaggctgttattgatgtggcgagatgatgtgcaagtgcaagttttggcaagttctcctggacatattctgtgtacagtggttggccaaggatttttgccttggatgttaacctatttttatggcgagatgatgtgcaagtgcaagttttggcaagttctcctggacatattctatgtacagtggttggccaaggatttttatcttggacgttaacctatttttatgggaatctagaggctagtcaatgcaaattctcttaagaattactgagaaatttgtgtgctgaaatcaggggcattggttatgtatgggagatttcaatgaaatcactagcctttctaaaaaggttggtgggagaagtcgttcaccgagggcgatggatgagttcaaggaagttatcgatgattgtagatttattggttttagctcttccaaacatgacttgacgtggtgtaatgagcatgcaaatttgagagttatgaaatgacttgatagaggtctgtgtacaacggagtggttacactaatttgaaggaactaatattacttttttggattggtgggaatcagatcaccgtgctttggtggttgatatcctagtttgtgataatggagctaagtgtaatcaaatcaagcgagtaagtcgatttcactttgaagaggcttggtctgaagaggaagaatgcaaagagattatgcatacacaatggtcagatattggagagagaggaaaactaaaaggcttttgatgtaaggtgaatcgttgtggaaaagccttaaattagtggaataaaaaaaaagaaagaagcgactatctcaggagattgataaggctaggaaaacttttagggttcgtttggaacgctgtattaggtcgtattgtattgtattgtattatattgaattatagtttatacaatatttttatgtaaaactacatgcggtattaacttttatggacgcctaaatatataatattttaatataaattaaagtttaacacagtattatataaaaatatgatata

SEQ ID NO: 319075 - DNA, 1219 bp, Cannabis indica
ttttattagtggtgattcttgttatgtcattttatgttaacaaatgatgtagcctatgtattaataaagtctgttactaattttgtaggagtttatgtttaggtagatactttttctaaatttttaaatataagttttgatttggttaatacagtatagttggttaggaaagtcaatatacgtgaacttaagtattctctaataatctttaagtgcaacattttaatatttagactcttttttataattttgatgataataaaaggtctaacccatttattggaagagtcttattactatataatattaatgggatccagtatatattacatggtggcaaaacaattagctataatagcctttgatgtcaaattaagcacttgctctcagtgatgttacttgccagctccaaataaattttgatgagattatatcactatataagcatatatataataattaataaattaaatctttatatatatatagttaataaataaataaatttccactaatcaaagtgttagttcgtgtgtttgcattaataataagtttaattgattcccatcttgtcatgcatatcttatcgcttggaatttagtatcatagtttttttaaagctaaaatacatagcaaataatataaaatatatatattatatatataaaaatatatccctatattttaccacataaaatctttctgtgtatgtaaagctcctagcaagatcttacattattgggtcactaagaaacatgaagcacattaaataatggtagaaaatcaatagggataaacgtattattatagcttaagaatcaagttaattaaagaagaaaatataattaattaataaactaataataatattattataaataatacaaataattaattaccaccatgcgtgcggtaatattttttatgtatatttttatatcattatacgcgtacatgaatctctcaaatctttgaaaagtagtctcatgttggatattaaaagatatgatactatatattgtactatacaagaaactataattaagttacgtgtatatacatgtaccatatatattaaattgggatatactatatagggagacgattttgtcttgtgatgtgtatttacagaatgtattatgtttctgtggtacattaaatgggtctcagggtacattaaatgagtgtcagggtacgttactatttcttaatcctaatt

SEQ ID NO: 319076 - DNA, 1390 bp, Cannabis indica
attactgatccatctgttagcaaggcactgtatgagaaggctagcagttcggacaagaagcttaacctctataaggatgcttatcattcccttcttgagggtgagacagatgaaatgatagatacagttttcaatgacatcatcttgtggcttaatgagcacaccaccaaaaacactgagtaattgacttctcaatctctccctctctccaaatccatgtgttgaatgcaactgaagaaaaaaataagtttaaaagtttacaattatataaacaatctaatatgtctgtgactttggaagtaatattttcacattttatttgtttatgtatagacattttttaaccataaaaaaaaaaaagctgaagttgattgttgaacttcagctttgctctggatgtactagttagttaacaagctacctagttggagtttagcttccctttctttacattactctgcttgttgcacaaacaatcattaatccttcattatagattggtttgcatttagttatactcttttgtctattttcttttctctttttttttgaacaattgatatctatttatcttaaatgaactgaaaatatgaagatcatccccatatgcagaccatattattgtgtaagttggatcttaagttcaatgttccattttggactatcacaatcaactatattatttaaaatgaatttccatgcgtttaatttcttcttgtttgttttaataatgccacaacacaactcatattatatgtatacatagaaaaattatttggtagggcatgaatttttccccactttcatatggagaaattataacttaattatacatatatgtgtatattatagcgtatatttttgttagtagatttgtttcaaaataatttgtttcataattcttcaaaacttaatttcgtattttccacaaatggataggttacaattccaaatttagtgtacaatgtatatatgtaaaacttctcataatttttttggagaaattctaaataatttagagtatcaaaaatgagaaataagtagttaaaatatatatgataaaaaataattgtgagactttgtcaaaacaaaattgtcaaatcattgttagacaattttcattttgttggcgcaaaatttattagattatttttaataattcaatatgtgtacttttaaattaagacaatttatttgagttaatattttaaatttggctaaataagtaaattaataaaatgagccaaataaacatcttatttggtatgggctttgtaatgtgtaatacccaatagtaaacctaattagagtttatgggactctaattagtttgttatataaagaacattaaggtttggtccccaagactaatctcaaccactcttctcct

SEQ ID NO: 319077 - DNA, 665 bp, Cannabis indica
  modified_base (70)..(70): a, c, t, g, unknown or other
atattgcttgacatggcaccatcaaagattattttcattcttctgatctccttcgtcatcagtatcaganacaaaccacatcatcatcatcatccttgaagactgattttaaagatctataaatataaatattatgtaagaggttagtaagggaatggggtacgtagtattttttttttcttcactaatttctctgttttctgaaaaaaaaatagaaagagaagaagaagaagaagatatacgtatttatattatatagatgaattcaaaagttgtatatgtttgtttcttttgttttgtgatacaattgtaatacattaatatacaaatatatactaatcaaaggattacatatattttaattaactattaatgtgagttagtagtcctttcttgtgattccattgtgtccaaattataaccccaattgtcccaaatttcttttgtttattaattctcgaaattggtgtcctgggattatgcacaacaaacagtatatatggatataaaaataaataaataaataaatatataagagctttcataaaatatagttgaaataactcattgatttgttttcaaagcaaccaagaccattagtatagtatttttctcagaaaaaaaaaaagaccattagtatgtattctctctctctccctctctct

SEQ ID NO: 319078 - DNA, 645 bp, Cannabis indica
gataaccaaatcgaagaaaatcattttagtactgaaagtgtaattaagattttattataatataaatatttttctattcttttaaattttcttaatattataaagattttcttaaagttgtaagttatttgccttcaaatttctttgtgtatcaagtacaataatattataaagtatgatcagatcaactttgagatgggaaaaaaagaaaaagaaagaagtttaatttaaaaggttaatgttttctatatgggtagacaaagagaaaaggaagcataattgtgttacaatcaaaattcttcaaatattatacaacccaatcacatgcatgtcacttgaattgccttaactatcatataatttgtagttctgtaatagtccattagatttggaacaagtattctgaaattaatagaggacacaactaacaacaaatttttaagatctacaaatatgagaaattgaaacatgaggactccactaaaccacatctccaaataagaggatctgtgtaataatccaaaatctcaatccagtcaaaggaatggaaccatttgaaatacccattactccatttgaaaaatacaaaaaagaatgaaaagaaaattggggataaagcttcgtgaaattgagagagagagagag

SEQ ID NO: 319079 - DNA, 543 bp, Cannabis indica
aaaaaaaaaaagaataaaataacacccgacatccgattctccaacatctgatctgattggatgttggatgttttggatttttggacaccctatctaacatcttatccgatctaattggatattcaaaaataatatccaactcgatccgatcacaattaaatatccaatgtttagcggtcagttgtaattgaatcagtcggttgtcattgaattggataatttatgcacacctctatttaggtatcttgtgctccaaatgctaaatttaataaaattgttatttcatattaaaagaaaaaagaacattgttgtgatgaattagaataaaaaagccttcataaggaggctacacatgaaaagaatatctcaccggtaaaaaacaagagtaaactactatatagacgccctctaacaacatttttagaataattatacagtaataatatagaaactttaatattaaattttagaataatttggtggggtataggttttaacaaactaggttggcgtttggttggaggtaatgaaatggaaagaaaa

SEQ ID NO: 319080 - DNA, 812 bp, Cannabis indica
ttgtgttgaaatggttgttgtctagtttttttttggtttctgtattttttcatctagttcgatgaggcccgatactagtccgatggagatcttagatctaaggatagggatgatggcccgatgtgatcttagatctaaggatagggatgatggcctgatcggctcgatgtcagcctgatgctagtctgatggtctagttgggctaagggcaaagcccgatgggtctgattggcccaatgtcgggcccgattctagtttgatggtcgaattggacctaagggcaaggctcgatgggtccaatataggctcgatgttagtttgatggtcattctggacctaaggtcagggatgatgggtccgatagtgggcttgacgtggtctaatgaggtccgatgcttgatagatttatggcttttgaggaatcacttttttgttagatttttttgttctaaatttttaattatgcttttttttaatgtctgtgacagatttaactgtttttgcatttgatatgtataatggtgtttgagagcttcagggcatagattaggtttataaccaagttgaaaatttgacattcgagatcgatacgaatgtaacctactcacgtttggttgatcttttgtacgaagaactcgatgttgacaaagtgcagtatgccttaaaattgaaagtgaattacaagtatatgaaaggcttaatatatcaccctgaagttattgaaaatgataagcgtgtaaggttatttttgtctatgcttgcgaagaagctagatgaatttactcccttatttgtgactttggtgaagaaaa

SEQ ID NO: 319081 - DNA, 845 bp, Cannabis indica
ctgatgtagtacactggttattgctatttcccctcccctcttaccagggctacactgacagtcatgcttcgacacatttttctccccatctaccaaccttttactgatgtagcgggtctcagcatctaccaaccttttactgatgtagtacacgggtctctggttttgcttagcagtggtggctttcccatgtgttctttgagcttttggaaagcttcttcacattttttctaccctagtacaaatttcttgtttcctctaagtgtattaaaaaaaacggtacacactttgttggttgactcgagataaaccaattgagtgttgctaccctacccatcagacattgcacttccttacggttcttaggggattccatgtctattagggcctgtaaattttttggattggcctctattctcctttcattaaccatggaacctaagagctttcacacttggcaggattgagcttcatttgatacatcctcaaggtggtgaatgtttcatctaggtctttaatcaagtcctccacctttttagacttcaccagcatgtcgtctacatacacttccatatatcgcccgatctggttggcaaagattttgttcacaaacctctgatatgtggcactagtattcttgagatcaaagggcatgactcgatagcaatagagtgccctattcgttatgaaggatgtgtgttcctcgtccgctgggttcatggggatttgattatagcctgagtatgcatccataaagcatggtagtttgctcctggccattgcatacaccgtctaattaatccaggggagtgggaagctatcttttgggcacactttattcaagt

SEQ ID NO: 319082 - DNA, 499 bp, Cannabis indica
ttttttttacttttctttttgaaagcgacagtgttatagttgtgatagcatagaactggaccattattgatgatgagtctatggtactcaactctgtgccaatgttttttccatcaataagaatttgcagttgagtccccaggtagccaaattgcacagccttaaaaatatatgtaaatatgtttgaaatttagtttgagttttcaacttagtttaattagtaataatagttgataactctaagatttagagttattatcatatctttaagcttgaatttaatgtgaattgtggatcaattaatgtttatattgtgtaattgtgtctagtttgttgtgtctttgtaataaatggaagtgtgtgtgttagtaagtgttaaatagactcatgttattgtttttatgtgttttaagcaagaaaaaatacaagaataggtatttgaaaattttgggtacgaagggaaaaggagcaggaaatgatattgctgactggcattgct

SEQ ID NO: 319083 - DNA, 1094 bp, Cannabis indica
tatgtatatattttattacgatgtaattattcttatgtagatgtatactttgttaatatgagacttagaaaatatataactaattacaattagaagttattcttatttataactggccaaaattaaatagatttgtattgttaaataaaaattctactgtatataaaatatgatatttaattacaccaataacaatactaataatatttttcaacaattttttattatataatgtaaaaaatgttaattgatattatttgaaattataatatatattatttatatataaatgttctcgggactcttaaaatttaatgttgctttgttttcttcagtaaacactgttgatattgagtaccccatacatatgatgatgtatacacttgtcacttaattagagaggttttaatgtcttttttctttttttcttcttgggtagagggaatttgagcttgggtcttttctttctgagaaaatgtacaccaatacactttattattacaatagttgtttacaaaattaaattttacaaaataatgtattaaaatttcaaaattatacaaatattgtattttgtacaacaaaaaataactaaagtagttaaaaaaataaatataaaatatcttgataacaacaacaaaataattgtaaaacaacaagtatacaactataaaataaaaataaataaataacaagatattaaactcattgcaatatgtaaattaatatcaactcatcaactttgttttttattattatgaaattcgttttttacttagtttggcaatttgattatgtgtaaactattacgttattttttttcataaaatttatttgttacaatttcatacttttcaaatattttttctctcttccttttggattatagtaacagttgaaataataatttatttttagaattaaataaataattacattaataataagaataataaaatcttataatttcaaaatagaatacatatatatatatatatataagataatgaagtaatagataattaaaacaactaaaaccaactagacaacaatataatttaatatgtcaatatctactagtacatattgtgtct

SEQ ID NO: 319084 - DNA, 1182 bp, Cannabis indica
atattatacatacataattcataagctatttgatctatacatataccaactgtaatattatatatatggatagatatacatataaatattgggtttacgtttgttttcccattcgttcaacacttagagaagtctacaatattagttgttgggtcattcactctgattccttgtaatttttcatattgttgagcagttggagaaaatttgtggtttgattcctgagcaggaaagtgaaaatggggaccaaaatgttggatgtacccaccatccaactcagccagtggaactcagttttgagcatttgcgatgcaataataatagtggctacaataatattaatacaaataatactacttctactattgcattgcagatcgggtacttacctatatcatattctctctcgtctttataaatatatttatatacaatctatttatctaatttatttccttttaatttttttttcatcgatatatatagctacggtggtactgttaattcaggaataagaggccaagaaaatatgggtgcagcccattcaatgcaaaatttgatggcttgtaattcagtggaccgcggatgttttgatctctaaaagccctatacctactagtatcaattttacactttgtcttgtttttttgttccttgtctccttactataatgttttgttcttaaaaggggggcaacaaataaactgtttcttgtttgtgtactatatagctatcttctgctattggaactatatatattaaaaaaaattactatgaatagtcaaattatatttatatatattgctctctagttagttagacatgtattattcatgataatactttacagtacatgtctaaatatcatttaaaatcgttaacttttataaataataaaccatttggaactctactttttactcttgatcagttcctggaagtggactttttacacatgcgattaggttcagtgagaaattcactaccaaacatgtttactacaaccaattcgcaccttcagatacgaaggagatatttatatagtatgataataaatcaaatacatctattataaaccatcaaacgaatctcaattcctccttataatgtttcttggcattacacaagtaactcagttcttaactaaccattttgtctactacagtagttgttgcatgttaa

SEQ ID NO: 319085 - DNA, 562 bp, Cannabis indica
tgttgacatatttctttttgcctcgcagatatagatttttgaaatcctcctctcaagctctcaaggttccaaggaaggtaaaaagcaaattgctgcctcggaaacttcttcgagaacgaaacctaaaccgttgaagagagcaaaaatgaccacaacaaacaaaaaatgtgccattactcaaagagttattaagcctgatcatccccaaataatctccccagtcccagctacttcgagcaccgatgaacaggttctaggatctattcattaggttaaattctcggattcacaacccaagatggtattcttggaaccctcctaccccatgccgagtcatgttggcattatgggctcataggcctattcacagcttttgttgtgataatttcaacacgcaagtgtacgtgtcgtgacaagtagtaaactcaccaagagtgaggttgatccacgaggattgtagttaagtacgttaaaattaaactttcacttcaacttggttgaataaaaattaagaaagtattaaaactagaaaaaaaaacagtgaaagaataagcaattaaac

SEQ ID NO: 319086 - DNA, 652 bp, Cannabis indica
ataaaaattaaaatataagagagtttcaccgcaaatcattctaaaaaaaaatcacattattttattacttaccagatctttttccaaataatatatatgaaattaacataggggggatatatgggtaggaatatctttatttcatacttaaaagaaattataagtaattaattaagaaaaaatattaattaaaaatttcttattacatgtgaaaaaataaaaattattatataatacaaattcttacagtaacttgccagcttctataaattattaatgatgccctggttaaaaatataattaatcaaagtcatcaattattttttttttttgtcaatgatcaaagtcatcaatattaattaatcatcaattgcttaattacgtcacacaggttattaaaattataatttaactttttttttggttgaataaataatttaatattttttttggtagcaatttaactaaatttgaggtagttatactaaaatttgtaacattttctatttgttatattatattgttataatataagatagattaaaataataaaaatgaagacatattatatattaatatgagattaatgtatataataatgattgagagttactatacatataataatattcacataaattgtaacattaga

SEQ ID NO: 319087 - DNA, 1165 bp, Cannabis indica
gtttttttttttttaattatttggctataaatttatataaccatgttaaaccaaaagagaagagaatcatgttcttctctaattaatgagctttttctatttaaaaaagatgataaattaaatacacttgtatgtatatattgaaatattcttttctttttgttttaatttaaatatatatatatattaagccgaaagaatacactttttttaatctaatctcatctcatcactaatactttttcattaataataaataattaattaaaaagcaaaaaaaaaaaaagtatttggcaatcaaaaccaaatgatgatcattaaatacaaacaaggatgaatttttcttaccttattggaatatgtgagatgagatcattaaagtaattaaagtaattcttctcatgcatgaacaatttttgccaattcttattgtttatttcttttatataatttatatagataaatatatatatgtttatttataatatttatgatatggaaacttggaaatataaggaaccacttagttacaagtactagaagatagaattggcagtgtcacatccaaataaatgacacactaaaagtctctcatatcaaacaaaaactctcaactcataatcatcatgtactatacataagcttatgttagcaaatagagtaagtatttaaaatcttaaatttgtagtattataaaattcaatatttaattttaaggtcatactaattaatgtttataaaattataattaatttttaattttattagtatagattttgttattattttaaacataacatatgtaaaactcatattctaaatcaatgaatctagatagaaacatgtaatatcaattactttcaaatattctttcaataaattcaaaacggaatttatactaacaaaattaaaagaaattacaattttacaaatattaagtacttatatcgctaaacataaatattaagtttatgctgtttacaaacttaaaactttaaatatttatgtcgctattactctattattaattatacatatattgtgggtatgtatacaatatactctcttaaaggattgtttagataaagtttttattaatttacatatttatagcaaagttttttaatttaatttttttcataatcgtgtatgttatagttattta

SEQ ID NO: 319088 - DNA, 1575 bp, Cannabis indica
tctctctctactctctactcttatctatctatatctctctctctctccatttcccacaggcaacccaacgaccaccaccaccaccatgaccacgtagaacaagagtttttcatgatgaccgcgagcatgaactagtagctcaaaacgacagcaggccaccaccgagagaatctagattcaaaccgttgctatcgccaccactaagctcaatgaaaaagtaattttttttaaataaaaaatttaaattttcattgatttggatgcgaatttgtgtatattcttcagactagttgattctttgtagattttggatatgtttcggtggtatctatacgtttttacagtgttatcgatgaaatatcgatagaatatcgaccgaaaattgaaatggggtagttgattgtttgcatgaactggttacaattttatcgatgaaatatcgatagtatgttgaccaaaaataaaaatggatagttgattgttcaagcataactatttttagttttttttacagtatatcaataggttatcgacatcttatctatggtttatcgacatttttgattaggatatattttttggaatttattgaatatatcgatatgttgtcgatgaaatgtcaatatgttgtcgatcgtagttctttatttgagcataactagatttttcaatttttttaactgtatatcgataggatgtggacaagatatgtatggtttgtcaacaatttttgttaagatatactctgttagaatatattatgtatgttgatagaatatcgaccatttgtcgacatgttgtcgacaattttatgcattatctgatttattatgttaacaataatatcgacaagttgtcgacattttgtcaacaattttattgttttcatttttttaattgtgataatatcgacagaatgtcaacaggatgtcgacttttttcgacaattttttgtggggcatctttgatggtgtgcttaacgtacgcttttgttatatatttttttagatggctccacgactcatagttccagcattcgagtattttactggccacgtcacatatagaggcaccagtgcttttgcaaaagtcaagatgtagtttaaggagtacaatttgaataacacggcgaaagcaagcagtttcagcaacttttggaataccatacctctcacattttcctcaatgttatttcaccaagtaatgttacacaagatgaaggttgatgttgagaaggcggaggagatgcgtttttacattggtcgaaagtggctcaaatttagagtgattgagtttgcactcattacaagcttgaactttaccttagggccaacataggaggagaaggctatgcaggttggtcgctcagggctagaccgattgatcaacaaatatttcaaccagtctgattgttgaggtagtgctactaggtcgtgagagtaatgttttgattacgactgacatacttaggtacgtcaaagatctcgagttcttcttctatgttccttgggggaagcactcattcgtcagacttatgcacttgcttcaaaatgatatgttgaaatagaaggccaa

SEQ ID NO: 319089 - DNA, 1088 bp, Cannabis indica
tcacttgatccccgtttgagtgttggatctttgtgtgctcatgtgctaacttggccttccttttagtgagctatactaccacgtggcactgaatctgtccacgtaagcatgccacatcacgaggacaaaaattaggataataaaaagcaagtaaagagaatgacacgataatttatagagatttggcccccttgtttagcgggtaatgacctactctacttttagttgtattgattcaagagataataccacacagattacaggcttttaccttgtaatttctagtatggctctctatgaatattacaatagtgaaaataatgtttgaaagatctcaaacaagtaagatgagaaacagacttagtgtctaaggaatggaggtggcgtatgagagagagagggcaaaagtgctttagggctttcgggacttagaacttcggtcttttaccatctagcctaatgctctttatatagctagagcttacaaaaagatctaattcaactaggttaatgttccttaaatataggatatatttcccttttcaacatatatttaacctataaaaataactgattagaatccctaaaagttaggaagattttggggtttaaaaccccattttctagggttgttggtgttgtttcataggtatcctcgtgtagtgacccgtgtagggtaaagtctgtaaaagtatccatcgacttatgcctctctttagcatcctttacgtgtgcatgtcggtctaccctttacttggggctgccagcacatggcattccttggccggttaggggtggtctgaccaaatcctcttagtttgccattttcatgtaacttcatcctgactgagtatttggatccctcatcaataaacatgttatactccacgtggattttttcttacctatgtggacatgccacatcatgtgggcaaaaattggataacttccccaagtccctatgcagatgtttgtacggataatgacttttcaactcttgctctaactattaaaatcttaaccgagtagttattgtttgatcaaatattttccctttcatatatacacttcatgacaaaaaatgactt

SEQ ID NO: 319090 - DNA, 1427 bp, Cannabis indica
aaaaacaattttttaaaacaaaaaacagaaaacaataccaaacatgctctaacgatgagagatttccataaaaactgacgaaaaaagatttaaatattataaaggagaggtttatgggtgtgcataaatcgatccaatccaatgagaacccaccgtcaaatactaaatatcccattgtgatcggattagatgtaatttttaaatatcttggatcggatcggatggtggatggggtgtctaaaaatctaatacataaaatctataggtatatataaaattaacattaaattttacttgtatcagatcccatccaaaaaaaaatattaagtctaaaatattagataaactcaaattaaaccaataaatataaataaaatacctctaatagatagaaccacaataaatataaataaaatacatccaatgaatgttggatcgattggatgactgaaattaattagatcggatcgaatggtaaaatctaacctccagtatataactggatcagatctagataggcttaaaaatattgaatgtagtgcaatgaacacccctagagaggtctccttcgatgtttccttgcccaaaaatttggaatttttatttttaatttgatgtttgtttagtgtgtttgatttaattatttttttttattgtgttgttatttggttgttctcctatattattggtttttgtttaaatatttttagagatttctagtatttttagaaaatttcgaatgaaaacaagtaaattaaattttttgaatagtataatgagaacaatgaataggtgttaaaattttaaaataaagctatattgttttagtattgttgttatgttttttttgtccataattgcataatgaaaattatacacataacacaaatacaatgaggagtgtgactttttcataatgaattataaagataaatatattgatcataagggaaaaaaaaatatttgtatcatcaacaatatcttgactcatctcatttaaaaatgataaaattattcattcactagtataatctatcttttcataatttcaccattgaaaaggaagatgaaaataaaaagttgaaaagttaaaaaaaaaaaaaaaaattaacaaaataagttattttcatgttgttgtaaagttttgtttgagttgtttttgtaatatttcatgttcaacttgaaaatattgtgttaaaccaagttatttttatgttattgtaaaatttgttatgagttgtttacactatatatcaattcaacatgcaaaaccaatagagagtcaccatgaacgtcaacgagagaagatccgaaagatttccataaacacggacttatccaaacattttgagaacaaatttgatttgatttgattttttttttttttttttttgttgtcttctctaattattttattcatttttatt

SEQ ID NO: 319091 - DNA, 1013 bp, Cannabis indica
tttttttttaattattttttaagatgaaaaatattcaactaggaaaaagataaagtccaacaagtcatctaaaacaggaagcctactatcaatattttattacaatcttttaatcaacttttaaaaatacacatcaaaatttttatttttttcacactaatgtacgttatagttacaacatcctcccttaaacttttaataattttcaaatagtatacaatattaaaaatagatataaaggtttttgaacacgcatgataaattgaaatattagtaattctattttttgttctataaattattcaaaaaatttcaaaaagttatagaaatgatattgtcactataacaaatactactgtataaaaaatccaacatgtaattttcgagtgtaaaaattgactaagagattataatataatattgtatttagcactaccgagaaaataaaactacacaaatctaataagaaaatgaccaaacaacatgccgattacacataagagcaacaagctcaactaaaaaatggcacaatgctaaagtctccaagaacatagcgaaaaatacaattaattacaaaaaaaaaaaagaacaaaaccaaccaaacacaacagcagtaaccgacttgcacaaaaaaaaaaaaaggttcttatctacccaaacaaaatgacccaacattgcacgccactatgttgtgataaatctaatacgtaagtatacgtatcgttttaacaagtaatactcataagtgagatcgttcccacgagaactataattaagtaccagtcaattaaattcttgtttctatttggcaatcgaataaataaaccttgaactaaataaactataaaaattaaataaaacaaacaaataaaagatttaataatagatgtgaaatcagggatatgatttcaattgctttgattacccaattgttaattaaccattctttttcctcctatgtaatgatagattataaattaacctaaacttttttcagatcataaaagtcctaa

SEQ ID NO: 319092 - DNA, 1061 bp, Cannabis indica
taaatttatttttttatcttttcaaattatgcatgaaaatagtatttttgtaaaataaggcaaaatatcggggcgttacaggacccaaacccaaatctagactcgggacccgaacacagaatcggttgctgaaccagacctggactcgggacccaaacccagagccagaccagggactcggacctggacccggacccagaccttgacctaaaccctaacccgaacctagacccagaatcgaacccagacccgaactcgaatcctgactcgatcctggatttgaatctgcgacccggagtcagacttggactctggacccgacccgtagtcgatttttgagtcgagtgtattgaaaatacattataactttacacaatctattagtacaagttaatactaaacatagtattattttaaataatactaatacattacaattcaacacaatacaatacaatacaagacgacgtaccaaacgaggcttaataatattatttaatataataccatgtttggtgttgacttgtataaatagattgtgtaaagttataatttattttcaataaactagaccctaaaactaactacgggttgggtcaggtacgggttcaggtctgggaccgggtttagggccgtgtccgaggtacgggtcccaagtttagtctcgaatcctggtcccaagttcgagtctggatctcgggtcctaggtcttgggtttaggttcgagtttgggtcccaggtcccaagttcgagttcgggtttgagtctcgggtcggggttagggtcggggttgggattagtgtcgggggtcgggggtcggggttggggttaggatcagtgtcggggtcggggtctcgggtccaggtcgagttcgggttcgtgtttgggtccaaagttctgggtctaggttcctagattcgggttagagattgggtcgacttgtgtctaatttttctaaccctatcccgtaaaattcatgtctgattcatgttcgtgtgcgatgagaattatggggttccatctcaaaaccaattggtgatgagtggagtagcccatattct

SEQ ID NO: 319093 - DNA, 1657 bp, Cannabis indica
tacttaaaagcaattaacaaactaaatcttttttgtgagaattggaaggtttgatttgaaatattttaaaagcgttaaaaaataacaaaattggttaaatcagaattttgttatataggcacttttaatatataaagatgtaacctcaacccttaagtttttatctctcacacgctctttctaatttttttttttttattttttcttttgttttgtagtgtacattcataaaccagattgaaaatcttccaccaccattaatgtgctgactgtggttataatagtgcagaacaaatgagtttatcaaattaaattcaatgcagatggttctgtagaaagactaaaagctcgtctagttgccaaagattttcaacaaactatagggattgattattttgaaacttatagtcctgttattaaaccatgcactattagaataatgtttacattggcagtcacacaagaatgggaaattcagaaaatatacatcaacaatgccttcttgaatggagaacttcaagaagatgtctacatggctcaaccacaaggctttgttgaccctcaacctcaaattccaaaccatgtctataagctacataaagcaatttatggattgaaacagaccccgagggcctggtttgacactctcaaatcaaccttgatcagctggggttacaccaacactaaatttgacacaagccttttcttcaccaactccaatggtcaattgcttctcattttattctatgtggatgatattttaatcaatagagcaaactctacacaagtacaacatgtaatctctgccctgcacaacccctttgctcttaaagttcttggactagttcactacttcttggggtttgaagtgcacagaacttatcaagccatttgcctaactcaacaaaaatgtatcagggatctcttggctagaacacccatttagaaagtgtatacttaaattttcaatgatatttagtagtgattatattaaaatatttagtagtttagcacataatcgcaatgaatttaatttttccttttattttgatttgagttgtgatattttttctttaggttactcaatttatttagtatttatcaacataaaataaaatttctataaacccaaaagttaccggtggagatgcaaagtaaaaatatagctcacttaacataaaatatggggaagtttacacttacaccttatatttaagtaaaaattacataaattatgcggaaaatttaaggatatacttttttatgagataattaaataatgttaatggtatatgaactttttgttttgaaaataagttgaggaataccttttttttttgtatccattaatcaaaaatactcttatattatattttattaaaatgtacacacttttgtgagtgagttgttcagtataccctcaacctccacttaagtctagcacataatttacattaacttaaagaggtgtactggggacatcatctataaaatgggtatatcttaaagaatatgaaaataaatataaaaattaaaacagataaagtaaagtgggtatacaatgtaatttcttttttgttttgtttatattgttatgggtttttttatgccatagttttgtaaaaaaaaaaaattagaataccatactttaagtttg

SEQ ID NO: 319094 - DNA, 2153 bp, Cannabis indica
aaagatattcttatagatgcaactggcaatagtaatgttacaagtaactcgcctagtttaaaccagttgcaaaaatcctgataagcaccttgaaaggtaaaaatttgccgatattgcgattaagttacaatgcaatgtctccgtatttgagacaatgttttgcttattgctcattatttgaagaggatactacattgccccatattgtttgattggatttggatggcacttggaatgttccctcacctaaaaacaaagagaggagctcgaagatatcggtgagtcatcttttatagagttgtgcaacagatctttctttcaagccgatcatgatcaagattattttggactcatcttagcctttagagtgcatgatttaatttacaactttgcatgctcaataacccaaaatgagtgctcaattataaattcccacgacgatagagagatatctgatctggtaagatatttaagagttgttaatatcaatgagaataacttgaaaaaactgagtaagctaaagaaactgaagtgtatccatgttaagtgtactggggaagagaaggatgaagttgtgcagttattcctttctacatgcatctcaacattcaaaaatttacgagtgtttgatttatcagaattatcttttgaggtgttgcctagttcgattgggagcatgaagcagttgggatatcttgatttatacaataatgaaaagataaagagattgcctgattcaatttgtaagctgcaaagtttacaaactttgatttttggtggatgtgtggagcttgaggaattacctaagggtatatggaacttggtaagccttagaattctttcattaaccacaaaacagacccttttaggagattgtggaattggtcgattaaagtctattcgtatattaaatactcttgcaataattggttgtcgagaattattgtctctaccaaaagggatggaatgcttgacatcattacatactctcataatattgggttgtgatcaactcaacttagcaagtgaaagtattaaagaagatgtccaatggagacttcagacatttgtgattgatgagctaccaatgacaacagatctgcctcaatggctccaacatgctgccaagaccctgtgacgaatacagattgaagattgttccaaactagtgagactgccgactcgagaagcttgtgattaaggattgtccaaaattgttgtcccttcttgatgggatggaaggcctcacctcccttacacatttgaagattgaagattgcgatgcattagaggaaagatgcaaacgagaagtaggcccggattggcataaggttgctcatgttcccaacctttctatttgttaaattagatcccccctgtcatacttattaatacagtttacaaagaagagaagaaatacaaataaaatggactcgattctatgtggcttcgcctctagtggatcaagatctagtagttagttacaaccgaaattgtaactaactcctagactttgatcaaccctaaactacaactataaaaagagaactagagccttaccaatctctcagttgagagataccagaaatccagaagccagatttccagatctggaagtttcagctccaaagtttgttgttccagtgttcatgcaaagaaaataaaagagagtcagtgagtgagaaaagaaaataagagagaaataaacacagaaaagaaaaaagagagaacattagaaataccagtcgagattgtgacttggatttctcacctttttgtatgattcttctccaaatagtgcagatctgagaatcgtcttcaaggcgagatcgaaagaggatgtacccctgatttagggcgaacctctataactcctggtgtttgatttcttactaaccctactgtgttttggtttgatctttgtgtgtatgtgttttgtgatgtttctgggatagtttatgggtaagatcgatcattagatcgaggagaatctctggttctagggtttgagaaccagagagaaggcagagagaaagagagagagtctgagaactctcgaaggttcgaaagagagaaatgagctagggttagctctgatttctcttggttttatttgaaggagaacgacaaatcgttttgatcaaacgatctgt

SEQ ID NO: 319095 - DNA, 1442 bp, Cannabis indica
agggcataaaacccaacagcctgctcgcggggacgaaagagatgataatgaagatgatgcaaactctattgagaatacacctttggacgaaccattttcctgcaaggactcggctatgcaggtaagtaagtctgatttgacgactttctaaaaactgaagttgatcaatactttttgtacaaaacctgtgtcaatacaatgtcctcaccaactcggtaattattccgactagtgtcgttgtggtttcaatccccatcattcgttgtggtgtcatggttctttccatctctttgtcaaagtaattttgaaatattacgatgtttctcctttccaactcatgccaacagttgtaaagaccaacaaggagcttgcgactcattcttctgcgaaccctctccagaagaggaagtttgaagttgttgatcccccgactatcaatttatccaagaagaagaagaaggttgcccaagaaaaaaggaaaaacctatgatagagtcgacgactaaggctcgcaattttaaggctccaaaggataaatatgtcagcgatgacttcattgtccagatcgaggggacacctatcgaagacatttgggcttgctactctgagtatatgattcaaggggtgacagtatactcgcgagcttttgctgcgaatcaacaggctcttaaggactatgagcttttaaagaaacaaaactctgctcttcaggatggtttgaagaaggctaagctctacatggccaacaaggataagaaaattgaggattttggcaaggagaaagacagggtagacaagaagatcaaaaagctggaggagcaaatcactaatcttactcgtaacttgaacaatgagaaagaagaaaagaagaaagcttacgactagatcgttagcgactatacctacactaccttgaccaagctgccaaacttcgattttgatgtctttgttccagaggcagtcaagatggccatcactttttcgcattatgtctccaactgaaacccaaggcttgtccaatactctttttcctgaagacgttgctcctagagctgaagtcgtggatgccttcgagaaagttgcagagaatctcaatgcccctgcaccttagaaaaaactctacttttgtttatttcctttttaatagcagtacaagggtacttacactttgtacttagcttttaagataattgggattcacactttttatttttcgcagtttctgaacaatatatccttcaaggatatttatcaacgtatttttatatgcaatttatactttttatgggatttcaaatgcacattggtgcatctattatttagcactttatgtaatcataattgtagcttggtgtaaatttttgtttacacaatcttttataatgcaatttatgaacatctcaattgtaacaccctaattactataggcgtattacgtgatt

SEQ ID NO: 319096 - DNA, 939 bp, Cannabis indica
attggtcttttctacttctctaatttttattttttttcaataatggtcaactgcatttggaaatacaacatactatataaaaatatataaattaagggttgcaagatgtttttattttaagaaacaatataatgttcacttacctttatggcctccttatgtagagccttctcaaggaccaacgtgtcatatctttaatgaatgaaaatgtgtttatctttagtgccctttatgtaacacattaaaagctgtcaattggaaaataacaaatcagaaaataaataaataaaaagtggtaaaaaagaaaaagaaaactgttggggcttgtctcactttttttttttttttgctgttttgaagaatattaatcccccctttactgtgtttgaaaatgactttgtttgttgtgagtgtggcagtggggggatcctcgttagaattaggtgaaatgaaatgacctaattttgtcttctctcacacttgattaactcttttatccttttgcaaagatcatatgtcactattagatgacacattaaagggcctctttatacatactttttttttgctcaataggctctttatacatacttgttaatccttcattcatctgtgtccatccaagcctaaagtaaaattaattttggcacataattatacatctgccgtgatagtgctttgtggttttgaaaaccaaaaaggttatgttaagaagaattattgtgaaaactagaatgagttatagcattagattttgaacccatatcctttaaaaacacaattatgattaaatggaaaagaaaataaggaaactaataaaaataatgatgattttgtttagcagttatagtttgttagagtatcttgacactcaaaaatagtgctaaaaataattctaccatcaataacaaccagttaaaaaaaattatttactgttat

SEQ ID NO: 319097 - DNA, 2791 bp, Cannabis indica
taaataaaaaatttaaagagtaaaaatgtaaattttttccgtatttacattatttttgttaatttttttttttcaaattttttagtttattatataaatttttataaataatatttcagtgtgttatattattatttaaatattgttttttaatttcttaattaaaaaagtgaacatattttacaaaaaaaatttgtttataaatattttttatttttaaaaaaacataagaattaaaatttcaaatattttgaagaaaaaaattatttagtctattttttttttatcaatatttactttactgtttttattatttttttctcaacactttctctcgcctcatttcacatgatcacttttgtctctcctcactttaaagaaaaaagtaacaaatgtatttttatttttaaaattaaaattaaaaagaaaaaatagccatatcaaacacatttttatatttaaaaaaaataaaagaatatttttaacctacctttaaatatttttaacatgttgtacacttactttttttttaccgtaaattataatattttcaaaatgttgaatatttatattagttttatttttaattaaagatacttaatattttcaaatttgtgtatttttacacttaatattctaaaatgtttgacattcataataatgataaaatataagttatacatatatttttttagaaaagactggatatatatatatatatataaagatgtcacgttttaaaaatattaatatgttcacttaatcaaaaaaaaaaaaaaaagagtataagaatgcttgattttaaaacatttggtatattcatcagaagtaaaatgagtatacaaaaatacaatatttaaaaatattagatatttgaggtgctacattaggatttatagactcgtttgatatatcgtataaggatcgtattgtattaaataataaataacactatgttcagataaattaatatattgtattaattgttacgactaaaagttttaatgcaatgtaggttgtattatttaatacataacaaatggtctatattattagcttgtattataatatttacaaaggatttgaggtcaaccccaatctctgacccagactcagacctggtcccagacctaaacttgggatccggacccagacctcggacccagacccgaacccagacccggacctggacccaagatctgggacctaggaccggacctagacccggacctgtagtcggtgtttgggcatgaatttattgaaaatatattataactttacataatctattaatacaagtcaataccaaattagtattgtattaaataatactaatacaatacaatataatcgaacaaaatacaatacaatacgacgtaccaaacgagccctatgtatgttggccccaataatattttcaatgggaattgctagttctatcaagtgctgtaaattcgtgcgtgtcgtgttagttcgatctattttataacgtgctttttaaaatatagactgtgatgccatgcgccgtatcgtgtcttactaatattttgaagggtaggcccgatattttcatatcatgctaatttactcgtggtggcccgtttttatattcaaactctaatttgtgctttactttttcatatttatttttataattaatgaactaattattaaaatatatatttctcgctttaattatatttatataatttttcaacaatattttatataaataatcatattaaaaaattattaaaattattataatttaaatatttacttataaatatttaaatttttatgtgagacttataaatatattaatatatacttttaattttatattttctaataattttaactataaaattataataatgttttatttaagttttattattattttaatttatttataattgacaaattcaaatctatttattattattacattatagcattttttttttatatattgtgccgtgccttttagacttgtctcatatcgtgtttttcgggttaatctattcatgcgtacgtgttatgtcatttgtatttgtcgtgtcgagtcgtagttaagcacgtaaaaaaacctaactggtatatttgcagtactagtcttgtcctatcatgcattaaatgcatttatatatatttattaattaacaagcctattatataattaacaagccatgcatgatgcatgcataaagtttggttttcatcttctataatgtctgtatccctatattatgtgtctatttgtatatatcatctataataagctaatatttacattgatacatttaatattgtaatttatgtatgacatgaaatagaaatattgtcagccaatttatttacaacttgataggtagaatccgtgcagcattactaaattcgatgtgtgttttcagttgtcactgattataacttaataagattacaactaccaatctaccatacacttaaagttcatattatttatagctctattaatatatatcctgtcttggccttcaactatcacaatgagcatatgaatacgttttaataaatgtcactcaattatatataggaaaactacagtacatatacatatagcataggtatatatatgcttacaaaattacaacaacccacttatcattaatttatcacagtaaataattaatccatgagcacttttgataatctactaaggtcatattttgtattaatggatcatcagcttctagactcatataacgctcgaagcacgttgaggaaatataatactctctctctctct

SEQ ID NO: 319098 - DNA, 1340 bp, Cannabis indica
aaaaaaagaaaagaatcccaaccattgaatagtattataggaactgaaagcaaaataaattgattttttattcatattttttaatagcaagtaaatcaatacaacaaaaactttctttcaataaagaagaaattgctttttttccccaaatattgtttataatcattctttctattctgggcccatgtttataatgaaaatttgggtttgctcaaatgctttcaattttttatttttttaatataagaaaagggccattcaacctaatggagaaaaagtaattcatgaatgttgattagatatgaatattatgtaacaccacacctaattatttcagttgtgtcttttagataagaacgtaataatgtcgtccaacatttaccatattgcctagttaaaagagggtttttttttcattcctctctagctagctacttgttattattattattaaatttcagaaatggagaaatcatctgtgtcttcaattttaaaatgtgaaacaagcactataaatataaatatattgaatttttaatttgtattttttaatttataacattaactttaatagaatatactacaacttaacaaaatattatttattaattttataatattattatttatatttaaaaataaaaattatggaaatattttacataaaaaattaatttaaatttaaaatacttaaaaatattataaatatttttcactttattaatttaactttgaattaaaacaaaagacatattccgctcaactaggcacacaacacaacgatatctcacttagattttattgtacatataaaatacatatatatataatcacattcaaagggcacaccaatgtagctaacaaaaaatcctcaaagattaaaatctcaaagcccatttcaaaaaaaataaaaatgcattacctaattaaacctcattaaaaagaaaactaaatatacgtgcattgcacgtaacatcaacatagtatatataaaaaaaattatagtaaatgaccccaaatcataggactatgttagtaaatgtgctcatttcaaaacttgtagcaaaatgaccattttaaattatttattatttatattgttatttgccacataaaaaaatcaaaactttttttttttcatattttatttttagaattagaagcaaattacttaaagattatggtatatctatattagttttgttaaaatcttttttatttgaaagttgtatcgaattttttttaattttttataaattgttggtatatagattttgttgtacagtatatttctattttattatatagtatattattattcttaaatgatatttattttt

SEQ ID NO: 319099 - DNA, 908 bp, Cannabis indica
gttaaattggaaaattggtatttaaatgaggaatgattgatgctaggtattattttggtattttatggacttattaaatctatctttttggtgattacataactgtggggatattattgttcttttatattgatgagttgtcgtgattttgttactaatattttcttattaatgtagaagttaattaattacttttaaattagtattttgtaatataaattgaaggatcatttataagctttatcttcctacaagggtcaaagtgtgacctttggccacccaagttatggatattacatatctgccacggcctagggctcaggtcgtgacagcaaatctctacagttcttgaattgaaagctttgatttggccgtgcactcctgactttattttcataaccgaataaaaagtggatgcctcttctttggtacgctcccttaataatttacacttttatcataatattgttgttcctgttgtggggggtgtgggggtcttatcttagcttagaaggagggttttagttttgcgaatattttcatttccaaaaatcagattacgcgtttggtgtattctgaccctgatcattacccctggttgttgtctggtgtttatgggcctccttactttcatgagacaaagaaattctggtcaagcttgatggaccttggtaagaacgttgttagaaattattttaccaggatcttagatctactcacaagcatgttgattaacaccctaaatatgaactttctaaaacgatgaaataaacacatataaagtttagtaaaccttacattgggtgcatcggaatataatgactccttccgttcagatatcaagcccttgattcctttctgtaccagagcattatcaatatctgaacctggatctctttctctgattc

SEQ ID NO: 319100 - DNA, 1070 bp, Cannabis indica
aggcttcatatgtacttgggatacaaatcctctaagataggactaaatgtattcttcgattatcttagaaaacttacattgttcggatcttgaaaatattcaatatgcatgcttattctcatggaaaggcactaatagtgaaatgcggcaagttttctaaaagccaatgttcacaaaatgataaagagagagataaaataaaagtggttccttatgcgtcacgagtgctggcccaagctatgggcaagaagggaaactgcctaaggtccattaatgaaaaaggccattttttacctatatgcatgtttaacgggtcacatattatatataatatatatttactgacattgctattttcaaaccaaaaagaaaaagtcaaatcataataatgagactaatacacacggttgagcgactactacaagtaacttccaattataatttttttttattttgtttattataacttttattacttaaatagtacctattttgtggagaaaataaaaactaattagactaaacaatttttattcaaaattaatttattttttattaattagttgttagagatatattttttagataaataaataaatacaatgtatatatctttctcttttatttttcacaaacttcatttattcttcttctattttcttactcattttcattctcctttagcaattaccattatttaagagctctcattcaattccatcattattacaaacttatagactatattgatatttgattttgcattgaaagagacaaaagaaacacaaaggtatatattctaacttttgtttttatatgtattattaacattattacatatttttcatcttactttaatttataataattattctttttggataggatctcttccaagaaaagaaaatttcaaagaaaatattcatattgaagtacctgttttggcttgcaattttttaggttatatctttctttcattcttttttctttattattattattattattattattattattattattattattattattattattattatttgtttagttgttcctaactt

SEQ ID NO: 319101 - DNA, 2566 bp, Cannabis indica
tttttttaagattaacttgtgtccatctaagagaagtaactagtagtatttgagtttctggcagtagcgtagggccggcccaagggtgaggcgggctgggcccttgcctaggccctcacactggcccaaaaacctctaatttatatttttaaaaatatcatgttctagatatcaaatttatttttaaaaatactatatttaacatattattaagaaataagacacaattatttttcaaataccatattttagattttactactatatatatagacaacatacatatgtttttggcccaattcctaattctcattcatttcattcatgatgctttaatctaatgatattacataattatcctaaactagactagacagtactaacaatttagtcataagtctacaccgtaacataactcttcatttcacattctctgttctctctcttttttttttaacaatcataagctcaaatcgcataagataaacgagtaattgcctagtccaaatgtgtacaaagtcacaatattagtattgaacaaaattaacttaaatgatagaaactagtattgtcttccatttgaaattaaacaccaatattagcatataatgtatttcaagcctaattgtggtataattcctctaaatgaaataatattatctctaaaaggttaggtgtctctcgaatgttgtttccagacagctaacttgttcatcccgtaagggatttggtagaatgatggttgaattcggaaaggagttctcgaattactatcatgtccacttcgggctcggtctttaagatagctagccctcctccggaatggagtttcagacaactagttattctactggaaggcagtttcggatagtcgactccagctaattctttcctatctaaatgcttcttcaggggagtacctttggtccgtgatcctaaaagcttgtatatgttcccgaatacattaagactgatgctgatgaggagacttcgctcaaagaggggttgattaagttagttatttctaactaacttaacaacatcgtttctcacaaccaactttaagatcttattcctatgcctataaatactatcttgacttgttatttcgatatacgagtttcataactttgttaagaggggatttagagtttgagaaagagaaaagattgagaggtccagagagaggtgcatagaaaagagagagatttagtttggattttataagaagaatcttctgtagatgaagaagattcttgtatgtaagtgtgagaattgaaacactttatgagaattcatcaaagaatctcatctcgactgtattgtacctattcttgctcaatcaatgaagaaatattacggtggtgttccaaaattggagtagagccataaatcacatcgatctatcagacttgaacttttttttgtgttttattgtttttagatttatatattctgtttgcccctgttttcatccgtttgttgttcttgatttgtcaatttgtcatttctaattgtttgattgtttaaagtttagttattttgattctgcactaatagtcataatttttccacaaattagagcttggtaattgatcaagaatgtagaatcaagattctttccgctgtaattcttaaagaaacgttgaatgtcatcaatgacgagtttcgaattagagaagttggatggaatcggggactttgcgctatggaaagaaagtatgaaagaaattctagtgcaccagaaaggctccaagattcttggagacgagaagttattggcagaaaaaaaatatcagaggaaaaagcataaatggaggagatgtcgcactacacgatcatcatgtatctatcaacaatgttcgaaaaaaattcatcacagagaagatgacaaaaggagtttggaacaagttggaagagttacacttaaaaccatcgatagctagcaagatcaatttgctagaaaggttatacagttttagaatgatttcttccatttctttagatgataatattgatagatttaatgagattattgtaggattgagaaatataaatcacaaggtttatgaagaaagccagaccattattttgttgagatcacttccaatcgcatattaagaagtaaaggctactatcaagtatgacagagacgtgattgcattagaggatgagttacaattagaaaagaatccaagaaagaataagtgtatatggcaagaggaagatcacccaagaaaataagttcgaagagtaaataccatcactctcaatcaatatcgaagtcttgagagaaggaaacaaggaagtgttacttctgtggaaggtctggacacttgcaaagatcttgcaagaagtacaaggagcaacaatgctttaacaaatctcataatagagataggaaggacaactgacatccactctaggaaggactctgctgctatcgtggaggatagcgatgactgctccacagacggggaattattctccatctcagaatcctcaataaacagggagtagattcttgactctgaatgcacttatcacatgtgtccaagtcaagagt

SEQ ID NO: 319102 - DNA, 2048 bp, Cannabis indica
tcactggatgaagatgaacttgcacggagacaaggatgatcttcatacaagagctggagtaagtcctaattgatatggtgcttgcctccccagatttcatcagggttcatctacaaaaagatgggagacaagaaaatgagagttggacgaatggaaatatggaaaataggttttacatgccgaccaaaccaaattaaagacaaaatgaagggaattcaatcaaaaaatagaattcccaaacctagaagtttaaaacgttgaaagacatctggaaatttatagaatcccatgaatgggtgagaacgaataattttaagtcaaaattaatacacaattagagaatcagaagttataatcgaatgttagtcaaagctaccagccctaatttcatctattctttgatgagtcaagagcagttcaagaatagataaatatgtagcatgaaattcagaaaataatgtgtacattcagtgtatattgaagagaaaagtaacttactcattgtttgaagctttattgatatgcgtggagggtaacatcaacagatctaccaagaacctttctttgaaggtttaaagtaaaatgaagaaaaattctgctctgattctttagaaatgaaaatggctaaaaaggttttcacgaaggttaaaaccccttttataagcacctaaaagaggaagttaattaaattaatattcaaaatttgattttccccctaaaagtgtacgttcagtactcattatgaagtacaaatatcacgcatgcggtatcactcaaccatcagtgtgtgactcgaggtacaacattccagaagcatttaattccccaaacatcgaagatactctcaatcaagttatgtcgaaataacttcaacaactaggacacgcatcactcatccagacaacttcctagttgaatgcagtccacatgcaaccaagaaggtcccgcacatactttggggcaaatgttatcttaaattttccactgtgacgtggtacctgacttgatgacacatgtcttacatttctcagcctaggcagatggttttactcctaccagccaataaagattgatatgtagatcgaaattatacatacatagtatgatgtccaattagagtcattgatggacatccgaccagctcgatcatgtaatcaactcgcatgcaccggccaggaaatgtgagttgggaattccaaaagtgatcgatactatctcgaaattccatgtcacgaagctatccctactattttgggattaatttgtaccttcagagaataaaggcaatcatcctaaatttcccaatttcctcattgtaattatgaaaacatgataatttcctattttattagattaagggaagcattcttatgtaagtagcccctataaataatggtctcgtttcactactcaaagatacgaaattaatcaaagagaaccttcaagagaaaaactttgatcaaagagtgattactcaaagatctttgtaagagctttcgagaaagaatacttcattatttgttcacaagttaatacaataaaaaaaggaataggctattaccactatcatggggccgaacctcaataaattttggtattttctttacttattactcttttctttccattatttatttaatctaattgctttattgaaaatttactgtcattggttgaaagaaaaatcaacatggagaaacgtaaatatatattgcaaacatgatctgttatatatacttatataaatatatatttatatgcttaaactatttattttaaagtaaaaatataaatatatacatgcatagattatatttttcatttttaaaaatattatacataaatagagtaatttgcggcataacctccttaagtgaccaatttttttgcaactaacccccaattctaaaattttggtggttaaatctcctaaactcgtgttctgttagcagttgaacatttccatccatttttagctattaactgccatggtggaatgtccacgtgtacacgtcacacaattttattggtccacgtaaataaatatt

SEQ ID NO: 319103 - DNA, 500 bp, Cannabis indica
ttttttttttttttttttatagattttgttgtttaattttttgtacttttttgaaatgaaaacgttaattgataatataaaattagacatcccggtcattacaaaggatagagctcgggatagccgagggttccacaaaacctgtgattatctcatttttaactttatttgtactttgagactttttaaattttgtgtctgttaatggattatctcatttttttttttaaaagaagtaacttcgtaataatataattactaagatgataattacacaatttagtaattactttatattttaaaatatatggtgtccttagatatattttacaaagagagaaaagagataacagagagaaatagagagaagaaacaaagtgtattattcattgatgaagacaacaactttatatatgaatcaataacagaacaaaggagcttaactaactgacagctaactaacagctgtaactgaaaatataacagactaaacaactctt

SEQ ID NO: 319104 - DNA, 710 bp, Cannabis indica
tttttttttttttgcttttttagctcttttagtggttcattaagataataaactaattaagtgaaaaaaagaaaagaaaagagtttaaaagggtaaatatcatattcaataattaaaatatgcaatgtatttttttaaacagcaaatataatagtgaaaaatttagtagtgtttgtgttttaactattttctcaaattaaattgcaagattttaaatttttaataatataatattgtgcgatatagtacgagtaatttattttatctcaaaagccaaacaatataataaagtttcatcaattcaatattttattaaaattttaacaacatgcctaataaataaaaaactaaaaattaatgttgaaagttttaaacccgaagaaaatatcaattattataaagttcttttataatgcaccctaaaaataaatgatatctaaatcattttaatctttttgtatatatatgtgacagggcatatcataatttttaagacatcttacaaaatattaataattttaaaataatttacatacgtaaagtaaggtttaaaattcaaattgtctatttcatacgcttataagataaaagaagcactatttgaaccttatttttagtacgttaaattatttttaatttctcaaaaactaacaaaatatctttttttttttaaaacagaattcatttaatcaaaaacattacaatggata

SEQ ID NO: 319105 - DNA, 1037 bp, Cannabis indica
atagaaaaatagtcatatgctcaaggcggaaccgaaattggataagcagatgccagtaaagttgtacattcgtgtagcccgacccgacccatttttataaaagcccactttttgtatgtgagctcggactgacccgttttataaaataggttgggctgggcctagcccatgttttcaaagtaagctaagcctagcccataagcacaaattattcgtgttgggtcggactcgtgccgggcctaaacggtccaacctattttttatgaaatggacgactcatatttatcaaataggcctaaacatgcctataaaaatgcaatttttttgtactttttaaattactttctatattttaaagcagaaatagattctttcagattagtttaaaaaaaaactacaattacatgtttaataattaaattaataacaccataaatgtggtccattattaaattttcacatagagttgtacataatgttcaacataatttcttttaagcaaaaaagaaatgttcaccataatctcaataagaaaaattatgttcgcgtcatattttaatatgaaagagtagatgcattactaaataaaaatacatttaaataaagtacctgtatatgaaagagtagatgatttactaaataaaaaattattttatggatttaaatttgtattttatgtcgtgctttcgtgctaagaaattcatgttttcttgtattgcttttgtgctttcttaaaactatagctatatcgtttatggagtacatttagaggcagttttagaatcaggattgtgaagagtgagaagttccctctatggcattagttatttaaaaataatcgatgccaaatagaatcttgacacgtgtaattttttacactatggcatcggttaatttcaaataattgatgccataagggtatatatctaaccctttcatcatatcatcctcacttcgtcttcttcttcaccacgatatacacagcagccacaccagcacagaaatcaccacaaaccctcgccaaccaccaccctaaa

SEQ ID NO: 319106 - DNA, 2738 bp, Cannabis indica
gaatggtaccgaggtcaacactatctacatgcattctttaattgatacaaggtcaattaagaagaagaattgggccactgctgcctttcgatatctaatgagctctctacagcggtacaagactaaaaacacgaaaaatgtttctggttgcaccatatttttacaagtcagttttccccttattatgatggtattaattttattcgctcatgtactgtagtgcttatagatgtatgtatttttgttttgtggcagcttgtatacttgactcatgttgactggactgctagtcacgtggaccgcactgtgcctccaattgacttttggaacattaaacattgcaaattagtgtacaagtggattcgagaccacagtggtcacactagaggataggtacatttactacttcaattttctgatgcatttgaatttgaaggaggagatatgcttaataacttttttttgtgtactaagcatgtgaaattgactaacacctatgttgtagtacgaagttttgaaatctgatgtagttgggggaaaccaacaaatgaacaaatttcaaagttgtttgtgaattgaaagatgaagtcttctgcattgatgtaaaggtgaacaatgcaaaagagttgtaactgaagctagttttaggttaccttgggaagcataatataaatgaagtcgttgagatacctgagacgagcaaagttcagtgctctctttctttcaaagggagaccgaaaagaaggatgatttgggtgtggaccaaaaagatgatgatgatttgggggatgaatctaagttgtttcctctttagagagtgtatatataatttttgaattgctcctttaacatgtctttccattttaatttgtagaaagtatacaatatatatggtgtatgttcaaatttaaataaagtatataatttaattttttattacaataaaaaatttgaatattaaaataaattatctttactttttgaattttactttcaattcagatagtttgtttttttttaattaaaaaatgattttagatttagatatttgtagtttttttttttaacccattccttccccattttgtctcaagatgaggtctctaattctcaatttctaatcattctcttagtattttgtaatatttaaaaaaaaattaatttggtttgcttttcttaatgctaaacaccaatgacgaaggaatttagaggagtctaactgttgaaaaaagtgtagcatggctatgtaaataacaatgattgtgtactcaaataacgaatatgtggaagaatttgaattgtttaaataacaataaggtttttcccgtatttatgtttctcttattaattatatataaattgattgtgagtatccaatttacggaaaaaaatgtcgttctaaaccacagtaaacacaatctattcataccaacactaatatattctctatgaattattagtgcaatctcgacgatggtatcaagttgctagatattgtgatcactacaaaaaactgttacttttagtgacaactttttagtcacaacataatttttttgtgacaaaatgtgacttttagtcacaataaaattttacttgtgactaaaacattgtatttagttacaagctgtcactaatttagttttagtcacaataagtattgtgactaaaaatacatttagtcacaacaaattaaaatttttgtgactaatacctttagccacgtaccttttaatcgcaacataggaaaaataatttataattagtcacaatttttttacttttagtcacaagttttattgtgactaaaagtaagattttttgtagtggatgttcacagatattacagaaaatatattgtcatgtactgcagttcaattaaagttgtattcgattgacgtaaattttaacagttaaatacatataatatattttcacaaataaaagaattatgaatcttatcttattcttaagaaaataatattaaaaattatttttgcagaaatataggttgtttgtccaaaaaactaaaaaaaattatcagcaaaaaaataaagaatctagttgtaagtatatccaaaacaaacgataagtttaaagtacaatcaagtcaccattcaaagagttgattcgatcgaagatttagataaagttttactatgctttgattaatattaagactttattttttaattgttttcttctattttaaggtgccacttattctttatttttcgttacataatgtttctattaaattttgcaaaatatatatattattgtttctttaaattttccagaaacaaataataaatgtcaaagtcatatattgttataacttatcatatataaattaattcttcacgtgaaagataactacaatattggtatgtaaatattgatattagcgtatttttcattattaataacaatgtacatatcataaatttacaaacacaactatattttactaactaaatgcactgacacaaatttaacttttataaaaacaagtagttggataattataccactttaagtacctaaatctaaaaaaaaccaaaaataccaaaccttaaataaaactaacgtttacgtggcctgacacgtaacttccaccaagtatatataaaactctccatgttgtaaaattaaaattcaatatattaaacaacttacacatgttttatatgtacttagagaaatttacactaaaaattatttttttttcaaatttt

SEQ ID NO: 319107 - DNA, 792 bp, Cannabis indica
gaccttgaaatgattttttgtcaaaataaaatttaataattaccgatctaaaggtgttatgacaaaattgtttacattttctttatctgttcgtgttggaattatcttcaagttaggtatattaaaaaaatgttgttaaaaattaagttcaggatcctatttttactattttagaaaatatagggtccaattggtaacttttgcaaaatatagggtccaaaatagtatttacccaaaaaaaatatatatatatttatataattattcattaaaataatatatatttatataataattgattaaaatgattcatttttgaaaaatatctaaaaaaaaagagatgtctcacctagtccaaaactttttttgaaaacttttttaagaaaaaactattttgtgtaaatgttaatagaaatgaaaaaaaaaaaacagtttattttagacttttaccattatattccaaaaataaatagaaaaaaaaacttctttaaaaagctcaattgaattttttacagcccaagttttccaattattatggaatgatacaaacattgtgaggtgggaaaacaaaacaattaaggtgaaacccaaagggcttttgtgagatgtctcacctcaaatgttgggcttttgtgaactgaaacaaaggagatttttgagaaatccaatactattttctaataggaaggtcaaagattttagcttcattagagataaaatatgtaacgccctaagtgcaccacccttttataagggaaatttgaaaaattatactttaaaaactctaatatt

SEQ ID NO: 319108 - DNA, 1040 bp, Cannabis indica
ttcgagatgtgatttcaaatgtaaaatttaactgaaaaattgtaataaaaatttgtaatcgactctcctctaactattattattattatttcatatagatagttttgttaaatatattattttatataaatagagtatttaacttaaggatttatagaccactcataattaatcataacaaaacgcctcatcaatcatcacatgcaaatgtttttttttttcttttcttaaatcttcttttctctatcttttttaacttttatggacttttctttttcattaattaatttaatctcttatatatatataggatataattaaagaaaataaaaattatttgatatgactacatgatctcttaactagtgtcacacaaaaattttattatgatattacatataatataactcatttaattattatttatgttatctcatcattttataaagatgaattagaatttttatctcaaaatttcatacactaaattatatttactaaacttttaaaattattaaaaattctcataaattattgagtttattaaatttaagaacttcggggtataatttagtagatatcaaaatttacaaaacataatttgggatataaataatcaccgaattaataaaattaaataaaattagataaaaattcttaaatctaacaatctcaataattcataaaaaaaaaattaatgaccaaaaaaattcaaaaattatagttcaatatatgtcaaagttttagaaaataaaaatcctcagtttttaaaattataaagatattgaatagcaactctaactcatctatatattaatatttgacacttgttattatacataccttaatatataatatttatatatacagggccctaaataattaatgtatatatgttgctatatattttacaaaagaccaatcagttatttacattttaaatatatatatataaatttgtagggataataaaatatattattctgtgacagtcagtagtcccgtgatccgtaaggggaaataccgggtaagctgtgcaa

SEQ ID NO: 319109 - DNA, 2122 bp, Cannabis indica
gatgggtcctttgttgtgagaaaaactcttctaagtactagatcccctatctcaaactctttactgttgacttgggtatcgaaatatcttttgaccatttgttagcaagtcacgttccttatttgtgattcttcccttctctcatcaagtaagtcaagagattcttctagcaacaaatgattacgatgttgtttgtaatattatgtgcaatgagaagcaatattaattttgacgagaatcatggcttcacttcaaaaataagcgagaaaggagtgtgtttagttgtggttcgatgtgaggtgtggtatgaccatagtacttgggggtgctcttcgggccagttcccttttcctactttgattctcttttttaatgtgtctttcaaaactttattcacagctttgacttgtctattggcttcaggacgagtaaccgatgcaaaactctttatgatttcatttttctagcaaaaatcgacaaggagatcgcttttgaaccgtgtgccgttatccgacactaatttttgtggtataccgaagcgacacacaatgtttttcacaataaagtccaacatctttttgctgtaattgtggctaagggttcagcttcagtccacatggtaaaatagtctactgcgaccacaacatattttatacctctttttccttgtggaagagctccaattagatctatcccccaaaaagcaaaggaccacggtgatcattgatgtcaattccatgggaggggcccttggaagtttggaaaagcattggcacttgtcacatttttgtacatagttggaagagtcttggtttatagtgggtcaacaatatccttgcggatcacctttttggcaaggatttgccctcagtgtagtccccataaaacccttcacatgtatttctttgaggatgacttgtgactcttccattatcacgcatttcaacaaaggcatggaatagcctcttttgtataaccttccctttaatagtgtgaaccttgggaacttgtataataattttcttactttattcttgtcattaaggagggtcccactacttaagtactcaatgatgggtgttatccaagactttgttgggtaccaattatttcaatatcttattcacttggggtgatacttctttcggctaaatgttctattgggaccatattgagagtgttggcttcttttgtggtggcaggttgtgcgagagcattagcattggaatttttctcccttgggatttactcaattatattcaaattgttggaacaggctttgtgccttttccaagtaagaggccatgttggctcctcttgcttggtattctccaagaacttggtttactactaattatgagtcgttgaaacatcttttggatttggcttgtaaacctcgtgcgagtcttaggccagcaagcaaggcttcatatttagcctcgttattcgacgctttgaacccaaattgcaaggttgtatggatttggcagccatcaagcttgactagtattattcctgtccttgagccatttttgttggatgacccatcgacaaataactgccatgtatgctgaggtgacttttgaatttcttctccttctggaaacccggtacgtttagctgtgaaatcggtgagatcttgagcttttatggtatttcttggatggtaagttatttcaaattgtcccaattcaacaacccacttgaggattcagcccgaagcttcttatttcattaacacttttcgaaggggttgattagtgagtacatgtatcgggtgtgcttagatatatgggcagagttttctcgatgcatggaccaggtaaaaagcaagtttttccatgactggatatcttgcctctgcccccaagaggcgcatgctgacataatatactggttttcgggccttcttctgttctcgcaccaaggttgtgctggtggttgttttagtaatgcccaagtataaatataagatctctcctattattggtttggacaaaatagggggctctgccaactgcttttaagtgcttggaaagcttgttaacattattttgtctattccaccttgttgtttccccgaagcaagttgaaaaaggataggcatttgttggttgacttt

SEQ ID NO: 319110 - DNA, 555 bp, Cannabis indica
ctataatttacattaacttaagtggtctaatagagatatcatatataaaagtgggtatatcttaaagaaaataaaaatagaggtaagaatcaaaacaagtaaaataaaataggtatacaatataatgccttcaagatagattaagtgagtgcatgttagaaagaaaaaaagttaatattataaaatccattttttttaatatttttgagaatttttttgctcttattttttttttttaaaaaaaaatatatacatgtatattaaaatctgtacgaatgtaaaaataaaaaattgtagattagtaaaaatgtaaactttttattactttttggtatttatgaaataattttaagaaaaaatgtcgacatatctaataaaagatgatcggcccaaagcatagctgggtcacgcgccccaactcgaaaggcatataaaattgaggaaattacactctataccctttttatattgtcctctttcatttttaccttcttttttaaagtctatcatttttacttcttttttttaaacattataccaattttgctcctgtca

SEQ ID NO: 319111 - DNA, 1095 bp, Cannabis indica
gaaaaaccatatattgcatgctataatgtttaaagtaatatgtttatttttacactttgaaacaccactacaaccaattaacaatgatggctttttaccataaaattaaaataaaaaattggtaatatctaactcttgtcattgtataatatatagaaattattttcttattatgataataaatatataactaattaatatatatgtcacgtaataatgttccttaggtggagtttggtcaagaattttaggtcaattctcatcacctactaatagtgaaatgccagcactaacattggcaaagagaatatggaagcaagttttggagagacattgttatcaatacgcagaaattaaaagcataattgaaaatccattcaacttagtgatagaagctgcaaataatggaaattttgagctattggtagcactaattaataagcatgtatcctgagttgatttggcaaagggatgataagaaaaacaccatatttcacattgccattttgaatcttcatgttaaaatgtttaaactaatacatgaagcttgtgtattgaaaagtgtaataagaattgaagaagacaacaaatccaacaacatattacatcttgttgccaaagagccacaacaaaacacactttctcttattgttggggcagccttacaaatgcctcttgtggtttaaggtacgtacttgtttgaaacctcgaacaaattttaggtattggccatcattttagctctcattgtaagggttttttttattttattttttttaattttgggtaccctcagaaattatattccaatcatttttagaagataacgtgcgttatagttatagcatgcatcttgtctgtttttaatttatttaaataatttataatgttgaaaatagaattcaaacagttaattgcatgtgtgtttttccttatacctagtataactgcaatatgcaccgtctataaattttctaggtatcaagaatagatcctaccaaaaggaaaaaaaaaaatagctacctttagagacaacattttgtagtcacaacataaattttttgttactaaatgtgacttttaataacaacaaaa

SEQ ID NO: 319112 - DNA, 1342 bp, Cannabis indica
ctattcatttttttaataaaaaattaatgctaaaaagttcttgttgctaaaaaataaggatgtatattaaataataacatgtgaaattataattatagtatttttgaagagtgttatatcattggagtgttttttttaacatccttaagggatgctaccattagagatgctcttatttcatatattatattacagagatggtgaaataaggttccaattagagatgcacgtggggcagaaaattggcagggagtgctcccttgtctccatctccattaagaattttaattcctatcccgcttatttctcatcggggatgcaggggatagggcagagaatcccataataggagcggggatggggtggagaatcccctaataagaaaataaagtataataaaaatttaaatatattaaattaaactacataaaaattaaaatattacacattaattattattcaaaaaataacttaaaaatcataaaaagatactaatatacttaaaaaatgcaaacataaactataagttataaaatataaaatattaataaaaatataaaataaaatactaaacgagtcctcgtcaggacgggaggtgtaatcctcgttcccgccccgtttaacatcgtggacaagaaacaatcttcgtccccgccctgttccttatctatacgggaaattcccacctcattagaggcgggtccccatggggctattcccatgaggaaatgtacatctcttgttctaatttattttttatttaaaaattgaaaactataattaaatctttacattaattctccacaaaacaaaaatcatatgaaatttagaaaaagcaatacaaaaagagttcttaattcataccctaaattggaatccatctttaaaaggtaattaattaatctaataaacataaaattgaactaaaaacaattaaaaattatttaagtaaaaaaaaaaaactaaaattcaccctaataaactttatcatatcataaactaggatccatctttatatggtaattaatcctaatcaataattataaaactttgagctaaaaatagatagcaaagctattttttttaggaaactaaaaaataagattaaatattaaatatatattaccaaataatatgtatatattttatcttaggtaattagcggcataagtacccaaaattttaaggtttttaagtggcataaacccaatgtttatttttagcggcataagtacccaatgtttgtaaaactgtaaatttcctccagctttatcagtacagactctgttttgaatatataaaaagaacatttggaagtaactgatactacatgtttatgtct

SEQ ID NO: 319113 - DNA, 794 bp, Cannabis indica
ttttgtagaagtgcctcaagatcatactgaatataatggactaccagctgactatgatgtgcttgacacctctgttactacaaggaaagatgactacactattgcagagatagaagccttgtcaatgggtcaatcagatcgcattgacaaacacataaagaatcttaatattttgaaagctaaagccaatctttctcacacaagattcaatggtttcaattcatacaatcgtccaccgtactcaactctagctattccaccaagattcagccgtggtggtccccctcgcactgatggttatacaaggtatcttatgtctcgaggtggtcctactctaaataaaagtggtccccctggccaacgtggtggctattctagccctagacgtggccaaattcaccaaatgaatcaaaaacctcactgccaattatgtcacaaatttggtcatttggttaaataatgtttctattgttttgacaagtcattcattggccctgaatcctttgctaatttccttgccactgctaacattgctaagatgcatgtaatgtatgccaccccaaaagatgtacatgatgacaactggtaccctgattcgagtgccacacattatctcagaccagattctactaatcttggagctagcacatcttatgcaggtaatgaaaaagttcttgttggtaatggtgctggcctgaatattaaaagtgttggtaagtccatgatctactcttctttctcatctctaacattgtctatcaatagtcttttgcatgttccttccataacaaaaa

SEQ ID NO: 319114 - DNA, 1051 bp, Cannabis indica
agatcctggtgaaataatttccaacaccaaccacccgtacttctcatatagagatctaagtgttgttaggagaaaccatattgaatgagttccgatatggggatctgtggctttgtagaattagttgagaagttagttagaaaagttgttgtaattgagatgtaatgtgtgagttagttatgacagttgtgctggtttagttgttgtaaaaatgagtcgatggcaactgttgtataaaagctctgtggagcaatcttttaattcattcactcaataataaaagatttcattcttttctctcctaaaactaaaatggtatcagagccaggaaattcttgagctccttctctgttcttctcttcttctgttcccatctcagcatcggttttgtccctgctgccatggcaagaggaggaggagctcagactcgcaatacttcaaatcgtgacaatgatcctgataacaacaatcgtttttccgcattagatcaaactacccaatatgatgatccacaaagtccatattatttgtcgcactgagaccatcctagtgtcatgcttgttgcaaaagttcttactagaagtgagaactatggatctttgaagagatcgatgatggtggctcttgggagaaataaaatgaaatctgtgttaagaatattttaccaggatctaaaatttactaacaagtatgttgattaacatcctaaatatgaatagctctaaaacaatgaaattaaacacataagagttcaagaaaaccttacattggttgtaacagaataatcttcctgtttaagtagttagtaatctaccaaactttataatttttgagcagttgtcattctgcctcgcaatttcagttataatctgccttaagcaaacttaaatatactttaaggattttatcactttgtatatttttaatttgctcgtatgaatagttatattatctatctattttctaggtttaagtacttttatcaaggcatcgcaatttcattttgtactttcttagctcgcgagaaccgttattattcaattttatacgc

SEQ ID NO: 319115 - DNA, 1622 bp, Cannabis indica
atgtatataagatagtgtaaaaataatttcaagttatagtgtaaaaataatttcaagttatagtatagaaaataattttaaattatctcttaagtagtgtttacctgatcttccaaggactaaataacatttggtgttggctattcatcgatgataactaatgagtcaatccttctgatgcattcttaaaagactttgccttctctaaattgttctgaccgttcactgcaagaagctctgggccgtaaaacttgaaaactcatctcaaatcatgtaagccctcctagatgtgcctgcattaaattattaaatattagtattttataataatttcagtaaaatttgatatataaggttaattagattagagaagagtatacatcattccaaaaagtattccctggttgctgatgaagtcacacacgccacctgctacaaattttctctagatatcgtggtttggctacgaggtgctatgaaaccacgtggtacccaaattgggattatcgcattttctccttgattctcagaaattcttcaaccatccatttgagtactttggggaatagtgccatgacctctggtgtaattaataaacctgcttgatcaccattgtcttttcgataaggcacgggaccttttccctttaacacatcaagtcttgatggtggttgagctaatggattctatacaaaacaccatataatatatcaaaactgatcctaattttaccaaatttttgacagcataacaactgtaattgatcgtctccaaaaattttaaacatgcctaataacaaacaaaatcgataatataattgattatccatccattcgactgtagtacatgtattcgcagaacctacttcactatggttgaatatttaagatattcaaactccactaagcattgataattaattaataacaaaaattacctcgggtgttaaaattaggtatttagatcaaggaaggaacatgtttgctacttccttaacaaattaatatgcattcctcaattgagattggaatttcagcatcctcctatagcatttatgaaatgagaacccaggcatatgaatcatcgtaagaaaaagtgtgaactgtgatttaaccctcatgttcgtacagataagctcgggccactatgttgccgatattgtttgagcagaggaatatactatctaattagctgccctctgttcaacaaaattgtacatgataggtggctcatatagggaaacaaactcctaagcataattttgtggaccttcatcctcctgagcatgttattatgaaacatacgcctgatgagccacctgtccttcttccacatcctcatcctcattctactcttgttcggcaacatttttcttttgtttaaggaattcgatttctacttttaatttcttaatctcatttgttttagagccacgacatcagaaacttcccttttccaagtgccaaatagtttagacgacgacaaggaactttgcaaattaataaataaagttagctataatttattttgtataactaatgaaaaaaatattttttaagtactagaatacacaacaaccctgacacatccaggatgctctggtgtcccgagcgcctgcatca

SEQ ID NO: 319116 - DNA, 587 bp, Cannabis indica
gattttttatttgtttattatatattttttaaaaaacttcctataaaaatttcattaagaatttaagatacggtatggtttcttttttaaatgggggaagagttatttaatgtcagttcaaatactaataggatttattttattattatttattatatataaataatattttataatttattaaataaaattaaaattcacccatgaatttctcataaaccaagaatttcaattatatagacacactttatatagaatagatatatatatatatatataaatatttatatgataacttccatctagcacttcctcgtagtaaaacagaaaatttttaatatatactgtaattaagtaaactaattataaattcatatgtacaagtgtaaataaattcctcccatttttctggtgaccaaagacaaaagaaaatataattggaggatcaaaatgtgtaaacgattttaaagtacctatagagaatatctttatctttatatattaaaagtccctatttaaaggcattttttggtttagcagaatatactttaaatataaaagaatattctgttaaatttaacgatgtt

SEQ ID NO: 319117 - DNA, 1377 bp, Cannabis indica
cgttttttgatcaccatcttattttataaaataaattaaataagttataaaattttcatgtactaaaatatagataaattaaaatgcatcaatatcacttttttacaacttccattaagtttggttaattatagtatatatattggtatgaatattgttctgtttttattacataataataaacaaattaattaatacccaattttccaaaatggtagttagaaataaaaggattaaaatccaaaaggacaatgatgaagatttagaaaatgaaatgatgattaagcatttttaaaggggaagaaatttcaaagcaaaaaagccttgacatgtgccataacttgattttagttagttttatatattgtcaaagtaagccctaataataaactaagtttgaatttattagaagtgttataccgtgtttggtattatcccatttagcctatatagtacatttgtaggaattaatctcactatattaatctaaatatatacataaatattatatcattttattgctttgggtaggtcaagccaaggtgtcattatgaggaaattattcttctccactatacaaaattctaatgtcataattattaaggttgtttatgaatcgatacaatctaattataattagagttggtaaaacagatcaaggatgataatacgattcgaaattcatacaaaaattaataaatttgagtttctcttaaatggatttgggtaataaacagtcttgtttgaagttaatacggttagcacgaacatgacttttaataacctatttaaaattatttaagtactttaatagatcataaatgtattgaatatatgtcataaacgtgttaaatatatcattaatgtattaataattagttgacatgtttaaataaaatccatttgtaaacaggttacatgtttgggtttcatatttggatacaatttaacgggccatgtttgggtttcatattttgatacaattattaaatgaggtgtgtttaggtcagcatatacttgtaatacatatgggttttgtcacgacccacaaacatgcctgaattgccacccctaattacaactgaccgatctaatgaaaattaactgacaattattagatctaattatgatcagattggatcgaatgatatttttaatatccaattggattgaattgagtattagatgtgttgtccaaaaatccaatacaatccaatattcagttgattattaattagtatttttttaatttgttttggataaataattagtttagatttttaaaattttacttatttttttattttatttattttatttagtattggtaatgaatccaatccaatccaataaatactaaccaaattgatgaatctg

SEQ ID NO: 319118 - DNA, 1231 bp, Cannabis indica
cgttgtccccatatatggtacatgatactattacctacccgtatacctagatccactaaccaaaacaaaattacagttatttcatgcatggatggtaccatataggtaaaaaaaaataaaaattagtaaaattgctaaatttacaataggaatgtttagaataaattaataataaactttaggcgtttcggcttaataataatatatatatatatatatatattgatacatatacacttgacacttcccttctatttcattaattgagttttcttgttttcttcttcaaaatgtgtatttaatgtgtgttatagtgttatcaaaaccgaactcatcaacaactttattaataattatatatattatttaagatcaattttaaggagacatataaaagttgtgttatattttgattaagagtgtttataaaataactaattcaatctaattcacacgatctaattcagttcgcaaagtgtagatatccgcacttatgcggattgaattggattggaaaatcaaaaatttgtacttgtgtcaattgaatgttaattgacatgtaaaagtaacaatttcaatccaatctacaatatttatatataatatacaattaaaatgttaattaatataaaaaataataatttaaaattttaatacatatgatataaatgacaatttaatgtttaatataattatggtttatcctttaatatctagattttagaaaaagtagtatcatatataattaaaatttaaaaactatactacaataatgaattaaaaaatggacgaaacagtaatgtataagattattctcaaccttgtttctttcttactttataagagatcaattacatttagactataaaaaattatattacaataaaatttgtgactaaaattaaaaactctaattaattataaattaaactagtaaacacacaccaccaacaacaataataatctcttttactattattgatatttattttatttctacacaaattaaaatgtaggggtcttccttaaaggtattacgtaattgataattaataatgacacattataatttactagatgagagttacgtggcgagccacgtaaatattattatataagttttaattgtttttgttttgttctgatgtattcatacttgaatatttatattaatgaaattagtctgtagctttatggatttagaaaaaaaaaaaagatattttttaatata

SEQ ID NO: 319119 - DNA, 2488 bp, Cannabis indica
gttaattaaaaaaaaattgtaaaaaattaagctcatggtcctatttgtaacattttggaaaatacaaggtccattttgtcatttaacaaaatagagggtctaattagtaacttttgcaaaacaaaaggtccaaaatagtacttacctttttatatatatatatggaaattactttttattattaaataaatttaattataaatattaattttaaaaatattaaactgttaaattttaatgcaataacaaataataaaagagaaatttaaattactatactcaattaaaaaaatattaaaaaatatttatttttacactatatcaaaaatatgttatatacaaaatattaaatcaaactcaattcttttttttcttaattttttttttagctaatggaacaactctagcctatataatgtaaaaacgaaagatttttttaattagataaaaaaactaagcataaaaactcaaattttcctaatactacccattcatatgtgatactcattaagagtgtatctatatatatatggtatccatgtttccggcaagagacacgtggattccatatcagcaatcccaaagaagataatttgggccaagcacaagtcacacaaaaccttacaggaaggcaccttagttccgtgactagatgatcttccatatgtatccagaagcagccctatgtatcgtgatgtcgaaaggttagacaatgcgttcctgaaagatcaatccaatttcctttttatttaagtgcacaaaataagaaagtaaatactcctcagatctcgacaaaagatagtatcaagctaaaatgagaaatacctaaatgaagactaaacaattaatacataattaattgcccacaattatagaatacggttttgacagcattaatcgtattcaatctacttagtcagtagatcgactccttcaagggttggacttcacgagaacaatccaagttatgtaatttgatgtaaactccccattacaggaaaaaaaaaagaaactaagtataattttcttaacattataaatacccaacaaatcttttagattgagggttgaattctcttaaaatatttgctcagatagaaataaagaacttatgctcattgtatctcaagggcttttctagcttaaatacataataatattgactcgtggactaagactagttaacgctccaaccacgtaaaaactttgtatgttattctcattcttgaattatttatttcctcagttctaatttattataatttattttccaaaaatctcgataaatattttggtactttcattgagaattgaaggatgcagtaataccatctgaaaattacattcagtaatcgtggcactcacccgaaacaagtttgatcttcacttcatcaatcctaatgccaaggcaggggatattgaagatcaaaatgaggcgaccgaccgtcacaaggatcaacttgggaaagacaaatatctagacgctcctatattcgaagatgataaattagaagagaatagttcagatgatccctaagacacctcgaaagatgatcctcaagacaccctgaaggatgatcatcaggataaatccattgaaggtggtgctggagaaaaaaaaatctcgatgagtcagatctcctggtcatcatgaccaaaaagttcaaattaactaaaagcaggttatctcgacaaaatcagttcaataagatactactcggtaaaatgacaagaatagaagtcgtgatgacagccctcaccaagagaaacactactatgcaaacaactccaattactgacgctcccagaagagttgaccctaaagatcctagaacctctaatcctcacaaggataaaagaaaaaggataattggtgaaactttaaggaaggctccttcgactaaacaacaaaaaaggtctaagattgtcgaccaacctcaacagaaaaagaaaggaaatcatgcttcagggaaaggtgaccagactaattctagaggtagagtcgcacttaaagataagatgatgccgaaatcaagaagtctacttcctggaaggacaagaattgtcgtaatgactctcataatcaaagcgatgatgttgatgaggaatattcagtctcaaacggcaatagtggaagtctctttgggcgataacatttgaaggtttggagctaaccaacttctacaatggaatgttctcagccttgaatcaaattaaggcatcaccattggcaagaagccaagaaccctgcgcacgtagttgttccaccatgtctgaactagagtacgaaacaccattttgtacttcatctggagaaatctcaatgttggaatttataccctaaaagcaattaattattagataatatattagagaatttatgaaatagaattataagataaatgatatattaattataagagtataattattagatatcaaaaaatttcttattcatatggagaaggtataatcttgtaaagatgta

SEQ ID NO: 319120 - DNA, 1728 bp, Cannabis indica
gttatttattttgtttccgtaattttatatttatattgattaaattatataatgtaggaaatgtgactagtttttctctatatgaaaagtgagccgtaaagaataagtttagagattcaaccaatatatctatctacccacctgtgtatatatgatttctttgtaagtttcctaaaatatttttttagattttttgtgaagaaaaccgaagcaagaaattcttggattgattgaagatctattttaggaaagtgtctagtgagttgtggtcttgtttagaccgtgtgtgaattgtcaataatgtgtatattgattataaatacatcttataacatctaggtcttgtatctctttcatacactttgaattgtatttatatctttaaaaaaaagaatctttgttttgtagagaagagattgttcgtcgctttatctgtgtttatgtattttgtattgtcttgagtctataatcaagtctacaaaagaagaagaacaatagtgctaccttcaagagaaaacttttcaagtcttgccttggggggaagcaagcactcttcaaggaaatcgaagggagttcgagcacttgacgcttcaacaagattcaattaaaaggtagaatacattaagcttacggcatacaatacaagggagtctaccaaagtcaataactttgtattttttagatctatctaattaattttatctcacgacgtggccccgtagactagtaataattatttataccacgtacaaaaaccttgtgtgtttttattttcttgcatagtttgttttctaattttattctgcaattacagagttatattttgtagcctattttaatactatatttattattaattaattaaataataaatttgtaatattaaaatacaaaatttcaaaggtataaataatcccaaatgtttttcaccacaaaccattaatttccgagcccaaaaattgaccccaatataatggcatttcaatagtacaaatgagggagcttcgcctattcaaggagatcagaatagataaaatttgttgagcttcatttaccgaaaagagagagtcaatgagctcacaatttttttaattaccattctccaacttaaaattactcacctgatatcacaatgttcatgaaaaaaagaaaaaaaaaaaactaggagttgcaacttttattatgtttctaaatattatgttataaaatacaaatcacaagttttatttacaccccaaatcttataaaacatttatttaataattttaaattatatattttattatacatgatttaaaaaaaaaaaaaaaataatttaaataattttaaaattactattaatatttttataaaaaaattctcacattattttatattaatttcaatacttattttgatttcattttcataattttttctaactcatatatatatatatatatttatttttttaagaaaattttatataattttttatcatagtatttaaaatataatttaatttgatttgataggtatattttttaagaatataaattagaagaaaaaagttaaaataacttagtacaattaaatatataaattttatataaaataaaaattattaaaattgggtgtctttaaaaaattttagggtgtaaataaaatttcccttacctttttttcatttttatgttttgagaagttgtcttctacttttcatcttaagggtcctagtaggggcggtgt

SEQ ID NO: 319121 - DNA, 732 bp, Cannabis indica
aaatttgttaatatatcttaggaagattttataatgaatatgaagaaatgttttctgtaaatgaccatataagatcaatttcatcatgtatctttctaaaatgttatgccttattgagaaagtttgagctattttagagttttttttttttttaaaaaaatagagacttctttcacatgtattttttatataaattattttgtattattaatgagaaagtattagctattttattttatttttaagagagagatttgtttctaaatatttgaaatcaatctaaatacttttagatttgtgtattttcgctattttatttactttttttagtgattttttttttttttaaaatatgtaatttttgaggtccaaaaatgaaatatatgacaacttttgaattgtttttccttttactgttttaataatatttaacttaaagacaataatttttttttcttttgaaaagacttaataattttaatgtttagttttatgacatattttcaacaaattttaatcaaagtacagtatattgttatttattctcataaacaattaaaatgaaccaaatatatatatatatattcaatggttatatttttattgtaaccatatggtaacattttttttaacctgtaatagcagattattaataggtagacattctttttttaaaattaattaattataattaactattttttttaaaataattaattaaatatttaacaa

SEQ ID NO: 319122 - DNA, 954 bp, Cannabis indica
tgtccagccactccaatagccattggtcttcatccctgaacttcttagagattgtcatttggtgcaaaggccccactgcccacgtcttcttattcttcttcttatgtccttgattaacattgattaaaccactgactagatgatcaagaaatgttccctcaatagctctacaagtgttgtagagatgtccagcttgacttttcatttcttgcatctcagttcttataaaatctaagaacacagatgagtaacaagactccagaggaggataattctttattgggataatgtcgtttcgtcccatggcagcaaaagtgttggtgaaaattgaaaaaacagaggcgcaactgatagaataggcttctacgtttggtagagaaacgacgcaattgacaattgaagtcatcaatacatcgtgaacaacgacaagtcgtttgatgtttgaagagagtgctctgagaagagcggcgacaggttcgcggatgaacttggtggcttcacaaggtaacaatgtgccgccagagccggcgcctgggttgggtggtgaggaggacagagttgggattaatgggaagtcatggaaatggatttttgttaattgttgaagagggtttaaggatcgagacttgacttgggaagtgtggagagttgagctaacgtagtgcactggaatgtggtatgaggaaatgagatgagcgagttggaggagttggttgaggtggctttgagatagatatggaaccatcactactacaactgatgatggtgatgaggtggccgccatggatgaataataagattgatgagtttatttgtttgagttatgacactgattatcttttagtgtatatatgcgaaccagaataacttgttgcccaaggtcagatacgtcacagttggattgcttctcaaagcttcatctatgttaagggaatgaagttttttttttttttt

SEQ ID NO: 319123 - DNA, 460 bp, Cannabis indica
ttttaaaaattttaaaaaaatcactttttttttaaaaatagtttttatttcttaatcagtattttggactctgactccaacttggaccttaggactcgaactccggcctcggccctagttccgaactcggaccacaaccccagcctcagtacgtcgacccgacttaaataaaatcaaaaaataaaaataaaaaataatagttatataacacacttttattttctgtttataaaattaagaaacaaaagtggttatagaacgtacattttttttaaaaaaaataaaatttttattttcattttagtgattaaaaaattcaaaaataaaagtgttatgaaacgttaccattgattatcttcaagaccaataattcaacatataaccatttccaatggagtaatttccggcaaaaccccccccaactatcaatttacttgcaaaaaaccatctaacctcatat

SEQ ID NO: 319124 - DNA, 1480 bp, Cannabis indica
catagtgtgtaagactgtgaagaatcctatcaattgaaggagaatctagctcagatcttggtgatactctgctacagaaaggatacaagggttagagatctgagcgaaaggagtcatttgattttgctgcaaccaatgtaaggtttcttgaactatatatgtgtttaaattccattattttagaaattcttatttacgatgttaaacaacatacatggtagtaaatctagatcctggtaaaataatccccaacagctccttcaccggcttcccgaggggaagtgttttgaaggtactgtgcccaagccacgcaatcccgggcttattcctcttctgggacaggaagttgctgccaagaagaatacttagggtatttgtaatcaaaagtaaactccttttcagtttggagatccacaaaccacagattgacgtcatttagaaggaaatcgaatgacctaaggccgtaaggaagagtcaacaggagcttatgctgctcggccatcttaggagtggggctaggtcttttcgagatagttgtcgaaaacaaaacaaaatgttagtctgttaacctaaattaaaagacatggattaatttaaccaagtctaatgcaagcaattacttacgaattatacggaaagtggttgtgccaattggagagagctcggtcgtccaaaagaagtcgtccatggaggaagttttgtttggcaaatccacaatgattttgtgcttgccagagtgagtgccgagatagtaaaagcctcctgcggtattcttcctccctgggacagctttaatagagtggagatactctatttccagaggtgtggggcactcccaattcaaaatgttgtacagaaccctcagacttacaaggattctgtaggagacgggatttagttgaaatggggcaagcctgaggtgatttacaaagtccttgacataatcacgaagggggattattgcccctgccctgatgtgatcaaggctccaagtgcctataccagtcgagccacttgtactggtctcgccactggccccctcagaggtctcgcctgtaagatgcacatgtgggtaacattaggatcctggggagtctttgatttacgtggctcaggagacattatttcaaaatctaagtgacctggttcaaaagcaattgtgactttgggtaaaaacaaaggtttagccaaaggaatagaagacacattgggaggttcaagccaagcagcatctcgcaagaaatgacattttccttcagtaatttcttgcaagaagcgtctatggcgactagcaaaatcttcctgatgaattctcactaagtgttccctaattctttcatcgtttacctttaacttagaggtgggttttgaaattgtggctttgtaagggatggaaatttccgtaggaaactcaatttctaaatcttctggacgataaatttctaagccagattgggacattgtgttggaaatattttac

SEQ ID NO: 319125 - DNA, 1054 bp, Cannabis indica
tacaacataacctaattgtcgtgatgcttttgaccactccgtcaagtttccaaggccgccgaactcgaaaacattttatctcataaatagtgtttactattcccacaatattcaataaaatttccgtaattaataaattacgctttattaatcacaaattaatttttactttaattattacacattagcttaagtaagatcataatcttactccagtatcagcaaatcacatatttaataaaatatgtccaattaaatattataatattttctgagatattacatatagggaaatgaagtatctaggtttggagccagttcaacggaccagtgaggctagagaagattaagaccaagatgtttgctcttcacagcaggcaaaaaagaatatgtagattcgaagctcagaaatatagaaatcccaagtaggggaaaatcatgtcttcctacgaatattattagtgaaaggaatgaaatacttctgggacaagggtaagatatgccttacattcctaagacttatagagatttttgaggaaaatcagattaataatttattgtctagcattgtgattagtattgccagcatcacataatgtttttaggttgtatgttaagaaaatatgatttggactcaactcatatgctaagttataaaatcctataacttcagtcagatctatcttatgaggagaaacaagttgagatcctcgatacaaagataaagttcttcgaagcagaattatagtattggtcaaggtactttggagaattagtaaggtggaaaagccccttgggaatgaggtttcgacatggggacttagtattcgaagatattcatattagattttgaggattaaattcttttaatgaaggaataattgtaatgaccacataattaaatcatgagaataagtatataattaaggatttaattgttattttatgattatgtactttatagtagaaattagggcttactgtcacaagtaggccttagaaaaatatgttctcaattatagagatatatttaaattctagatgtaatatatat

SEQ ID NO: 319126 - DNA, 6184 bp, Cannabis indica
aatgaacaaactgatgtacctgagtcatctctcatgaatgcagatgcgaggcagtcacgaccaggaaaccaagaaattccttgtaatgatggaaggaatcttggaaatcaacctaggtctggtcaacccccgagacattcataaaggccttctcgcacagacatagagaatacacacacatatctgagtagggggcgtgtgttaaatctcttttggagaagaagaccaatgcgagatgagacacgtgaagctagttcaagtactggggagtcacgatcccacaggcacagtaggtcaactagacaaacatgagatgggaatagatctcgacattattttactgatcaagaaagtatgagtaacttgcgtagttaccaatctgaaagttactcagggactagatttgtgagtaagtacgatcagagaagctgtgagcctgatctccatgaataattaaatcagaggtagcagaccttcgagagcatttaaatcaagatgcacctctgcgtaaccagcttaatcaaaatgcgggtcaacaacctgtggatcccattcaattgcgagtaatataattagaggacaagttcagaaaatatcaagatcgagagtatggaaaattaccaggatatgactcagatgaagaaatggaaccattccaccttgatatcctaaactctcaatttcctcaagaattcaaaaatccacatgtctcgcaatatgatggtactactgatccagtcgcccacttgaataattttaacaccataatgcgaggaagcaatgtttcaaataacttgcgatgcatattgttttcaatgtcattaacaggggcatcaagtagttggtttgataacttcaccaaccattccataacttactgggaatagttgtcgaaagatttcaagaagtagtttcaagctatgagagatcgtcaaccaaaatcaccttcattgaataatattaaacaataaccaagagattccctcaattcttatttaagttgatttagtacagctacagctaaagtcagaaattcaaatgatagcattcaattaacaaccctccgtgctagaattacaactcacttatcaactgtaggaggagagttatgggatgacttgcaagggcatcccgtaagaaatattaatgaattcaatgtaagagcacatattttttttgtgaaaagaagaggcatagaatgaaatcaagctgttaaagtcagatttgagagataaacccagcattagcacagcaacagcgagcactgtgacttccaaagtagaaaatctaaatggttcaaataccaagaggaaggatgtgtcaagagactcatccaaagataagaaacaaaagaagcatgagaagtatctacttatttatttagtgtatactgaatttaatgaaactcacaaaaatatttacctcgccaatgaaaatcgggtcgcattttgcagactagacccaatgagacacgccaggaataagcgagatcccaataaaaatttttcgtttccacaaggacattggacacacaactaacgagtgttgtcagttaaaaaaatgaaatcgaaagcctaatctcgcgaggatatttaaggcagtatgtgagggcacaagggaatgagcataaccagcccaataacccaaataacccaaggttgcagcctccccctgtagagggcgaggatattggttatctctagagggccgcatctcgtaggaaacagtaatagtgcactaaagaggtatattaatgaggtaaaaaatgagctatcaacatttgctctagaacctttgaagaaagaaaaattagatgaaccacccattgtcttttctgaagaagactcaaagcatgtacgatattcacatgcggatcctctagtaataacaattcaacttgttaataatagagtaaagggagttctcgtggataatggcaactctgtcaacatcctttataaagaaacattaaagaagatgggattagaggatgcaaaattaagactttgtatggtaagcttgtgtgggttcacaggcgacaatgtcacgagtttgtgcataagtgaacctcccttaactatgggggaaccactgttgtttgcgactcaaatgcaagagtttttagttgttgacatcccctctgtctacaatgtgttgatgggtcgcccagcttgaaaaaggtgcatttagacccaaacaatcccatttagtgtgtttgaattgggaaaagtttgggggaagaactaaaatagcaactaatcaccttcctaaaggaaaaccaggaccaattcgctttgagccattcagatatggtcaggataaatccgaatgtgatttttcatcacctaaatattgatcctgattatcctgcgaaatgtcaaaagtggcgaccactagatctcgagagactaagtgcactcaaagagaggttgataagttattaccaataacttcatatgagaagcattttattcctcatggatatctaatccagtactcataccaaaaaaatggcacttggaggatgtgtatagattttgcagacttaaacaaggcatgtcctaaagactactttccactaccaaggattgaccaattggtagatgcaatagtagggcatgaattaatgactttcatggatgcatattctagatataaccagattaagatgcatatctcgaatcaagaacatacaagcttcgtcacaaatatggagctttattgttacaaagtcatgccatttagattgaaaaatgctggagtaacatatcaacgcctcgtgaatggtatgtttgaaaaccatataggatgaaatatggaggtttatgttgatgacatgttggtgaaatcggtcaaaagcgaggaccatacgaaggatgtcacggaatgttgtgccatacttaaaaagtatgatatgaaaccgaatcctaaaaaatgttcttttgtggtatcattggggaaatttttgggtttcattgtgaatgcaaggagaataaaagctaatatagacaaaataaaattgctactttaaatgccttcaccgacaaagctaaaagaagttcaagctttaacggggagaatgacagcacttaatagattcatctcaaaatcaattgataaatgtctttcatttttcaatgtcttgcgaggcaataaaaaatttgaatggaatgaagagtgcgaggaagcatttaaaggaataaaaaatacctttccacacctccagttttggctaagtcaattacatggtaaacaccattcctttattgggctatctcagaaaatgccataaatgcagcattagtgcgagaagaggttaagaaccaacaacctgtttactatgttagtaagaggttattggggcgaaatcgagatacccacctctagaaaaactcgcactatgcttgatacatgcatctcgcaaattacggctatcctaacaaatcaaccattacgacaagtactatatcaaaacctgatgcatcaagaagattaattaaatggtcgattgagttagggcaattcgaagtaacttaccacctgaggatttcaatcaaaggacaggctttgactgactttttgatagaagaaattaactcagaagaagactccaaaataggaaataaaattgaaacatggaaactgttcgttgatggagctttcaacgagaatggctcgggggcaggagtattagaggtgtcaccaaaaagcttcaaattccattatgcacttaggttttagtttgaaacttcaaataatgaggtggagtacgaagccttgttagcaggattaagaatagtcgatgcactaaaagttaagaagattatgtgcttcgatgatttgcaattgattgtaaaccaagtcttgggaaagtaccaagcaaagggcctgaaaatggccaaatacttagagaaagtttagaagaacttggaaaagttcgattatatcaaaatagagaaaattctaagagaacaaaactctaatgtagatgccttagcaaaactggcatcttagtttgatctcaacaaattgaacttggtcccggtggaggtacttgacgagccaagtatatgtgagaaggaagatgttgatatgatagatgctctgcgaggtctacatggatgaaaccaatcgtcaagtatctatgaaatggagaacttcccacagataaaactgaggcacaaaaactcttatatttgattcctcgctacacgatgatcgaaggaaaattttacaaaagaggatattctattgctctactgcgatgtgtgttaccaatagaagctaatgaaataatcaaagaaattcatgaaggcttctgtgaagatcatgcaggttggcaaagcctgtctaaaaagataatccaccaaaggtattactggaaaactatcaataagaacacacacgagtttgttaagagatgcgacaagtgccaacgattctcacatatacctcgagtaccacccaccaaactaagaatcatgacctcgccatatctatttgcaatatgggaaattgacctgattggtagttgtggtagttgacttcttcacgaaatggatagaagccgaactattagtatccattacctacaagaaggttcttaattttgctatcaagaacattatttgtaggtttggtattccaattaagatagtatctgacaatggtactcagtttgatggagagttattcactgagttctgtgagagaaaaaaataattaaaagcttctcgttcgtatcgatgccaagcaatgggcaagtagaagttgttaataaaaccttgaaggatactatcaagaagaaattagacaccgccaaatgaagatgggttgacgagctaccacaagtgctctgggccatagaaccacagagaaagtagaaatgggacacactccattttcattggcatttggcttaaaagcaatgtttcctgtagaagtaaatattgcgatccacagacgtgaattctataatcaagaacaaaactaaaaacttctgagcatgtccttgcttgaagaaaaatgcatggagtcacaaataactaatgttggtttcagcaccgtatcactagatactttaataaaagagttcgaaatagaatctttaaagtaggagatttggtattaagacgtgtatttgaaaatatgcgagatccaacagctagagtgtttaacccgaaatgggaatgtccatatatttacaaattagcttggcttaatggcttactaataaaaaaaactactgcaacaacgagcatttatgaccatattacaagtaatttattttgtaatatttataattattgttacttattcttaataaagatttgaatatttcaagtaatcataaagtttatttctttaaaattacttgggggcatatatgtgtatgataactagattctacctagaaatatatgaaaaaataactaggttgttaaaacctaaaaattaaattatttaaatcttttcacaaagaaaatgatgattgattaaaaactgtcttaggatagtataaagtcaaaaatcgaaaaacctttcattaagtggaaattaaaatagcagttttacgtgagattttttctcataaaacaacaaaaaagctaaatgcgatctgaataaataacgactcgcatattatagcatgtattataaacgagatgccaacaaatcttgaaaaaataatacacaagctaaagtatgaatagaggattaactactcatacgagcaatcaaataatattcaaaaacagttctaaaagaaatgttcaaaatatttaaagtttgtcttaacatagcagactactaactacttgtagaaaacatagcaaactactaactgctcacgaaaaatatagcagaacactaactgcttgctaaaagcttagcagaatactatctgctcgtagagacttagcagaatactaactacttgcataaaatataacatgataataatattggtgaacgtgtaaccctaaaatatcaaaaactaaattgagaaaactgttttgttgtgtgaaaacacaatatacaaatatcattaactcgagaaaagcatgataaaatggcataaagtaaatatataaattactaaactctttagaactagtaatcatgaaaagatcaaaagaattgagtggaggcagtgttgggttttgtgccctcaataaaacccatt

SEQ ID NO: 319127 - DNA, 804 bp, Cannabis indica
tttttaaaacaaaataaaaaatataagaaatttaaatatttttttccttcaaaaaatatttttatttttgtaatatataataattaaatacattttgagtacaaaattatttattatagtcttttaatcaaaataattttttcttaaagttgggttctactagctttaatttctccataaattatttaataagttgtttttaactgcttacaaaatacatttttattacaatttttttaaaaaaataatttttaaatttttcaaaaattatgtcaaacaggttcaaagactactgttgccttgccttgtgtctgaactaagtaactcttgtattgtttatcatcgttttatttatgttttcattgtgtttgatttattgcttttcttctagttctctttggtgttgcttgtctttgtgtttggctgtgttttgcaggtattgttcctcaactttattaaaaaaaataacaacattaaagaatagaaataaaaaatataaggatgtagaattaattcctcagagaaatgaaggtttgcacattatgataatattatccaaaatctctgttccaagcctattccaagttgcttgaagcatcttcaaagatagaatgagattgtaatttttaaaatcaaattgtgttgtgtttatgctatttttatattgttatttaaattagaatatcatattctattattttaatgatatttttagtgttataaatatatatatcatatactaggtaggagttacgtgcgaaagtttaagttttttatttttttatttagattgtacgtgaaggt

SEQ ID NO: 319128 - DNA, 778 bp, Cannabis indica
aaagtcataatagttcaacaaaaacatagataaagagcaaaagataaaaaatggaccacttaagcattagcattagatcggaagaatttcatgatgatgtccatcctcctgacaagtaggtattgacttctctccattcttccaaaacacaacctgaattcagccatacctgtaggaacagaagtagatgctagtaaaaccgcgaccttggtagaaaaatggtaacttgatttcttttttttttcactatttaaaagagggctttaggcaaaactttggacacaattcgaaaatcttaggatattctgagcatagaaggaggactagcagtagaagacataattcgaggtctccaaacagtgttccatctctttcatctttatcttttatgtttttaattgaatttttattgttttagaatgatttttagtagctaattttcttttaaggattattataatgtgaaccacttgaatttagtttatggattaatgtacttgttcaatttattcttcctcttttaattcaatttcatacaatctattttaattttacaattatttactagccatctataattgttatctatgaatgcgaatcaaagttctgaaatgtgagatttgaatatgctctgattgttatggatgcaaattaatttaagacgaaagtacataggttgtttgtatgattttattagatattttgcttaatattatctttctgattaaattttaccataggaataatatagggagtttttacatagattggatttata

SEQ ID NO: 319129 - DNA, 690 bp, Cannabis indica
ataataattgaatgtaaaaaaaaatattggtgttcggtttgggcgggttaacccgaccaaaccgaccaattcattgggcgagttattagttttttttttctcaattgggcgggttgcactagatttttctaacccggtctttacattagattgaataaaatgtagcataaaccgaccaaaccgactaatctacacccctactaagtacatcacaaaattaccggacctacagaccatgtcaagcctatcctttaaaaataatggcatagtacgatccttattttgaaagggaaatttgagtttttcatttatattggtagtataggcacattttattatatatatacctcaaattacccctcccatctcaaaaaaaaaacacccaaattttttcagcccttctctctctcccaccagctcattctctcttcccttctctagttcccaccaaacttcaccactgaaaccaccgtcaaacatctttgaccaccacccatgaccctccctctcttgttggttgtctttgttgcgtgaccaagaacccacgaccctctctctctaattctctatagtgcatggtcgatgactcacgaccaccaccgtcaaacaaaaagattagggcccgtttggtacgcactggattggactaaaaaggattggactggactggacaagattggattatgctga

SEQ ID NO: 319130 - DNA, 966 bp, Cannabis indica
tataagggggagacgcctagtttcttccacttaagttttgctaatttgttcagtgatttgccataatgaagttcgtttattctctttttttttttcaaccttacgatctgaggaaccaactataagcaagcggatcttagaaaaaaaaaataataaaataacaaaataaaacttttttaatattaaattatttaatatttattataaatttataatataaattattttcacataatcaacaacaaaataaaataaaactattataaaaaaactaacaaaataaattaatttattattgttatacgtctccaataataaattaaaaaaaatacaaaatagactaaaaattttaaaaaaaaactataaaaatttttcagcacggaattttttttactttctttgaacttttttatttactaaaatatcttttcattcaaaataataaaatttttttagttgttttataatttaattgtatagtttatgtatagttatttttatagttgtaaggttaatttctaattatttttttagttaattattgctttttgctaaagcaaagtgtattttgtaattttaaaattttaaaagtgtaaatctataaataaaaactctaagtcataaaattgtaaataaaacataaaaaagagtattttaaaaaaaaaatacgtggtgcggtgctgagcctggtttatcttggcacggtgttgttcttggtttatcttggcacggtactgaccctggtctatctcggcacaatgctgtccttggcctatctcggcacaatgccatccttggtctatctcaacacggtgcctttattgttctatctcggcacgatttcaagtgctatcagtcctttatattttaattgagactttatgttggctttgatcgggcttggactatctctgcaattttatctttactatctaattttttatgggcttttaagctgtctttttt

SEQ ID NO: 319131 - DNA, 1509 bp, Cannabis indica
attctactataaaatacattaggatttcatattgttcattacatatcaaaagagaaaacaaatatacttataaaaaaatattcctctcatatattaaaccaaaacacaccattataaaagctatttcttcttcttcttcttttattaaatggataagggaataattagatgcgggcgggtgcagaaattggttgaggttgcaccaataagtcatgtgatgacgtggcataaaatgaagtattattccagatcatcatcttcattattatcaagtccaacaaaattggagacaattgctgaagaagaagaagaagaagcatggtctgaaaatattgatgaattggttataataccaaagtcaaaaagaaacattagtaatattattagtagtgaacaatatgtgtcgtttcttttcttgttttttcttatgtttgttctacaaaacttgtcgtatgatataggcaaatgctttttgtattaattaattaatttataaatatttgtatttgtgagagaaaagagactttcttttgggtataaaaattagaatatataaatataatttttactatttgatttattatatgtagggtttgcttcttgaattattatttttttttttagaaattcttcttgaactttgaaaataattcgagataattgcggcaaaacactacaaaaattcttacttttagttacaataaaatttatgactaaagataaaaaagttgtggctaattataaattattattattgtgttgtgactaaaaagtccgtggttaaaagtattagtcacaaaaattacaattttttgtgactaaatgtgtttttagttacaatatttgttgtgactaaaacttaattagtgacaacttgtaactaaatactatgttttagtcacaagtagctttgttgtggttaaaagtcacatttagtcacaaaaaatttatgttgtgactaaaaacttgtcactaaaagtaacgattttttgtagtgaaagttctcaaaaatttaaggttgatacagattaatcctcaacttcgaaaattggcagtaatagttctcaatgtcacatttcctgttagtctgttggtccccaagttaactgatccgttaagctcaaatcaaatgccacctgtcaattttttattagtccaaataataattttaattaaatttttttaaataaaataaaaaaactaaaaaatatatataaaaattaaaaatttattttattttattttattttttcttttccttattttaaaatcataaatatatattttcttttttcttcttcttctaaatccccagtgactatctcatccccaccccaaccacatccactccagcacccattctgtaatatccagtttatatacatatattggtgtttggtatattaagtgtgatacaattatattgttattattattactattattattattattataattattattaatatctttttttttttattttttttgtttgttgtgcgtgtg

SEQ ID NO: 319132 - DNA, 657 bp, Cannabis indica
aactggaaaaaggatgcagaaaaaaggatgagtatcatatgagtaactgtaaaaccatgaaggaaaataactgccacagagcactagaaaaggcagacgctcattttttgtatagcatcaagttttattaatatgctgaagtttactaatcttgaaatattatatatataatatggggatatcattaaaatatttcgggatcgtttattaatatttttaatttttaattttttaatcacaaaaatatatgtaaattttaaaattttaatttttaattaaaaaattataatgtaaaagttaattaaaaaattgttaccaaatactcaatatttttttaatttacaaaaccactatttgattatgtcccataaaatattgtcagtttactttttcataaaattgtttaataatttttttttttataaaaatgactttaaatacggtattaaatagaaatgaaaaatattttaacaagatgaaaatatgtatttcttaagtttttcgtacactatcataatataaaataaaaaattactaattggtgtatcttaataattaagatgataaattttactaaaaaaaaatttaagaagtaaaaatttaaaaacgtatatttaaattattatggtactaaaattattaaatagtgataatttt

SEQ ID NO: 319133 - DNA, 580 bp, Cannabis indica
ttgggcaatggagaaggggaggaggaagaacgagtaatagccataattatagatagattcacaacaataaaaatagagtacaaacggttatggaaattggttaatgaaagtttgaaaataaaatgacagaatagtaagtagggagaaaataaattttgatcgttgggaggggggggggcaaagtttagttctggaattttattttttaaaaataaaactgaaacaaaatagaaaattaaaagaaaaaaagagagggaaatcatggtgtgattgataggtgtcaagtctatcgcctagcgtctacgcaacacttgtgctacatgtaatgtgtgtgcaagtggtataagtgtaaataaaagaacttgaagtgtaaaaaagtaagaacaagcgtgtgagggtatttatgtaataaagattgcattttgtattggagacttttatttacactccataaaattataaattcacccaattattaaaaaatatataaacttaaataattttaaaaattacacttaatatattttaaattttttcctcacattattttatgttaatttcaatacttattttgatttta

SEQ ID NO: 319134 - DNA, 1535 bp, Cannabis indica
tattatttaacaaccacctttattaatgttatctttaaattaataaactaattattaaaagcatttttatttattgtacacaagcctgtcatagtctcatgactctattgataaaattattacttttaaacttataataacaataataaaattaataataataataagattttcaaaaaaaattaaaataataataatgcgtgtgtgttgtcaccagcccaacccattttttcaaagtatatatacgaaaatacagatcgtgttaagctgaatcatgaaaaaatatatcgtatcgtgttatgttaatatttttataagataggtttaatattttcttatcatgttttagattcgtactttactttatttgaactgactcgtttttctcaaacagggattgactagtttttttttatacaaattcgtgctccatattttaatatttttattacaattaatcaactaactacaaaactatatatctatgtgtttcttttataactttaattacttttttgtaattttttttacaaaaattatacagtcacataaagaaatttataattattaaaacttaaatatgtagtgtaccattgttttaatggcttttaattaataaataaatatttattattattatctaattttttgtaatgcgttttgttttcaggttagtatatttttgtcatttttgcttattacatgtcatgcctttgagtttatcgtatcatatcgtacctaaatacatatttttcatattataacctgtccatttgcaatatcatatggtattgtgcctaaattaatccatatatattctttgcaagattattacatatttttcttaattatatgatcatagctaagtttgtgtcaaactaaatagttttcttcttcttctttctctctcttttttgtaagagaatttttaaaaagtgcttctaacaatttgggagaaaaactcttaatctatatatgaactctcacacgaatttttaaattaatggataatgttatacatctcaaaatctatattaattaatatatataaatattgtgttacattataatatataaaccatacaggataaggctactatttaaaagaaagacacacaagtaatagtagaatggtaccgtcaattttctattataatttctcaatcaaccttctttgtagttaaaaacacatgctgaaatttttttaattttttttttcatgacggtattcgtttgtgcttacaacatatcattcccataaatttttaaaaaaagtcgaaatagtttgtcgtgccaaaaatatatatttaaagtttttttgaaaaatacgtggtaaaattgaaaatatcaggttctctgtttacgataacgtaaaactatttgaaatttttttttaaaaaattaactaaaaaaatgaatcttgtagctataaacgaataaccgttataaaaaaaaaatttactataaatttcaaaatagtgaaatgttaactaaaaacaattataataaaaaaaataacaaaaacctctaagtaa

SEQ ID NO: 319135 - DNA, 658 bp, Cannabis indica
cggcttcagtaagcttggatgcaatcttctcgtccttaattgcgttcctcatgttgtaagtgtagttctccaaagcattcttggagtcgaccttcttcctgtgctcttcatcctcagccttgtacttctcagcctcttgaaccatcttctcaatttcattcttggacaatcttcccctgtcgttgttgatagtgatacttctattttgtcctgtggactcgtgcttaacagagacgttaagaataccattgacatcaatatcaaagcttaccttgatctttggaacttccttgggagctggaggaatgccagaaagcttgcactctccaagcaagttgttgtcacaggtcctagctctttcaccttcgtacacgtagatcaacacagaggattggttgtcgtggcaagtagtgaatatgtgctccttcttggttggaatggttgtgtttctggggatcactacagtcacaacacctccaagagtctccacaccaagagacaaaggagtaacatccaaaagcaaaaggtcctggaccttctggtttccttgaccggtcaagttagcagcctggactgctgcaccgtaagcaacagcctcgtcagggttaatagtcttgcaaagctcctttccattgaagaaatcttgcaacaactgttg

SEQ ID NO: 319136 - DNA, 591 bp, Cannabis indica
gagatcatgagaattaagttggactaaactagatccaaagatctattgaatgtgatttaataaatactcatacattttaaatgtagtgccaacaattaattagtgatattttataagaggttatattaaattatattaaaaaactgatttttaattatactagaagtgatatatatgacaacaaaaaaagttataggtatcaatgctagctacgttttaacatttctctaataatatccacaattatggaatgcgatagaacagagtttaggtaagtacttggtaaccatatatacatataataaggtctttttcaaaacaaagtagataattactttcccgtgagtatttttgtgcttatccttgtcaacattcaccacaccactactatatacagaaagaaaaaaaaaaagtaaattaaaatgtcacataaaatttacaattaacgagctagctagtgcataaaaagaatctttaattagcaagcatgcagggaatttgaccaccaactatatatatatatatatgtatgagcattcttattaggtaatagtgtacccagggccggtcctgaaacaaagtgggccatag

SEQ ID NO: 319137 - DNA, 2472 bp, Cannabis indica
ggtaattcattttgataaaaaaacctgtgatattaaggccatggtcctctgacttggatacaacaagattggtgaagtctgtcccggtttgaattcttctaaatggtcttagtcttcaatattgggggaagaattgccttagtgctcttgtgagcacaataggaaagcaagttatgattgataaggtgactcaaaatagattaatggtgaaatttgctcgtgttagttgatatggatattttggatgaacctccaaaatcgattgaatttcttaacgaaaggaagcaattagttgaacaacaagtggagtatgaatggctcccatcaaaatgtggtgcttgtggaatgttgggacatattgttagcaattgcaacaaggataaaagagttgcttggaaaaagggagtgaatggggaaaagaaagaagtgagtcatgaagtggaagatgatgttcagactagataggggtctaaactagttactgcagtggttgaagttcagaaaggtaaaggggaccagattgataaggctcaaaagggagatgaagagaaaacgaaagcagctggggttgctatgatgcctcagatggagaaagaaaatgactggatcactccaaaaagaacaggaggcaaaccttctattgtgattcaatcaaaagaacaggaggcaagtttaaggaatgattatgatgtgctacaaatggatggaggtgatggaaacttggagactttttctaaaccaagttaagatggaagcttgtaatatgttaggttggaatgttaggggtatgaataagaaggagaagcatcatgctatccttgaagtttgtagagagaataagattggtgtggctgctctgtttgagactaaaataaagcatgaaaaggtgaaaaaggttgttgaaaccagtttccctaactggaattactattctagtaggcaaacttctagaaggattcttctcctttggcagaataaatttgttacggtgtcaattcttgctgaattgcaacagatggtgcattgtagaataaaagtttgtgggcaaaacaaagctttcttcaccacagtggtctatggaagcaattctcttgttgaaagaaaagagcattggaagcaacttgctgatttggggaaaattagtgatccttggatcattcttggggactttaattcggcttttagctatcaagaccgaataggaggcaaggtagtgaagactaaagagttggaagatgctcaaaactggttctctttaggccaagttgaagaactcgttagctctggggctcactatacgtggtcaaacaaacatgaggaaggggatagaattttctctaaattagaccgtgtcttcatcaacaatggttggctaatggaattccctaatgctgaagcttgctttaaatgggattggatctcggatcatagctattgcgtgttaaagaatcaggagattagcaaattcgaatttaaaccttttcgtttctgcaaccattggaagcttcatagcgggtacaaagaaactgtcattgctaagtggaatactaatctggggagcctctcggatattgtcaaaaacctgctcagggttaaacatgttctaaaaaagttcaataaggaagttgttggagatatagtggcggattacaaactagcaaaacatgagttttgcaaagctcaagaggctcttgcataccaaccaactgacagaaggttacaggaagaagaaaaatgctgctacaacaatttgcttcagctgcaacctagttacttcagccatcttaagcagcaatcaaagattacatggatccaatgcaatgatgagaattcgagctacttccacgctaccatgaggaaaaggagactggagaatgggatcaccactttcaccatcggagacaaggttaaagatgattatccaaaggtaatttatcgctttgttacccattttaaaagttttataggaagccgaagtactgctacttctgagattgatcatgatagcttggtgtacggcaacaaaatgtctcttgagcaacaaattagactcattgctccgttctcaaagagtgatgttaaaagagccttatttggtattcattccttgaagagcccacgaatggatgggtttggatctgattttttcaagcacctatggcctgaaattggggatgacatttcgagagctatgttgggtttctttcaaactggttggttaccttcagatatgaatgaaacggttatctccctaatccctaaggttaaagacccgaagggtgccaaggactacagaccaattgcttgctgcaacactttatataagtgtatctctaaaatgatatgttcaagactttcggaagtcctcccaagccttattcatagcaaccagggagcatttatcaagaatagattgctggagcataacatcctaattttccaagatcttcttaaaggctacaccaggaagaa

SEQ ID NO: 319138 - DNA, 1285 bp, Cannabis indica
aagggctagagatcttgaacggaaggagtcattacattccgctgcaatcaatgtaagattttcttaaacccttatgtgtttaatttcattgttttagagaattcatatttaggatgttaattcaacatacttgttagtaaatctagatcctggtaaaatattcccaacatgtatcaagagggggttggctcaccccatccctgcaaggcgtataacacaaacatggcagataagtacttgaggcccttgggagtgaattgggtcagactgatgtggtaatagtttgctatcttcttgaagtatgggagcaaaggcaccattgcaccctatttactatgagctcctaaccaagcacaataaccctctccagggtcgatagccagttgacggggcagggaaggaagcattcaacatcccctaagagatcgtccttaaaaagtttggtcaatattttcattgtcaagatagatggcggggaaatcttttgatctcccttcggacctttccttcttgtaggatgagcctcagtgtactcctcctcaacattgtcctgactagcttccaggatgtctcccacttcaaacacatgttctccttgctcactataactgttgaatggcagcacgtgagctacccctcttcttcgtcgccttcgacctcagaaggagtagtaggacggacctcgccctagtcctccacttcctagacttcaatgtccctagtagtttcttccttgtcaacagcaggacatgcctgttctgccctggccagagtggttagatgagcaatatgagggtcggtagatgaaggtttcctaacagtctgtttgattcgcgccatcattctacgtttggacggggttttattaaaagtgtgcctggcaatggtcacaacaaagttggcaataggtttgccctcagcagctgggtgtgggcggccctcggacagggtgtcaaccacgcttggatagaccatatacgtccagctgacaagaagataacgcctccaacctttcttgagttcccagataaaacgactgtatccctcaccacgaatctggtcaggatagaagtgatgttgcacctagggctccagggaaggtgtatgatcgctacttatgtaacgccctaagatttaggcacgctacccaatatgattaagaaaccctaatcccctaaacgagattggttttaaaataagcgcggacattaaaactttaaacgaaaacggaatgaaaataaacttgtaataatttaaccttacaaacaaaagttacatgtttcgg

SEQ ID NO: 319139 - DNA, 704 bp, Cannabis indica
ttttttttttttgctttttttgataaaaattcaaaagaaagaaaatacctgtgtactctttgttccttgactctttctgtgatttgatgatgaatttcagtagattttgtaggatcaagggctggttgtgatatttccaatccttcttctctaactattgacaaatatctacatccatacaaaaataccaaacatctcactaaattatttatacacaatcaaagtcaaaagtagattctcatgcctaatttttgtaaatagtgtcacatattaatacagatgaactcaaatattaagtgaatggatactaataactaataagttaccttttaacattgaaatgtttaactccaagatcttcatcccaaagaaatatataagcatagtctgaaagaatgtctggatgcatgaaacgttttgcaaaccacctaataaaaacaatatcaaactattatataacacaattttaatttctattatatgtatatctatacatatatataattaattaatataccatttagtttgatgtaaagcagagacatgtatagcttgatcacaccattcaaagtttctccattgatttacatttccatcataatgaaatagcatcacaacaaaattactcttcaaaaactgtaaaacaatgagtaaaaaaaataacattaaaagttattaattatttaaaaaattaattaaaaaat

SEQ ID NO: 319140 - DNA, 1827 bp, Cannabis indica
gactcacactcttacacacacacacacaaacaatttttgggtttcacacttagcacagttgcagttgcacccacgacgacgacgactactattgctagctagctgtcgttttataatacgtgactgcctatccaataattgaatttctgttcacatccgggtcgtttgggatttttcatgtgccctctcctctctctctattctcacccaactctaacttattattattattttacaaaaataaataaataaaaggttttcaaatttattcaaaactactctcactttcaaacttacatatcacttattacccaacagaacataaatgaaaatttgtgtttggtaaatttggaaaaaacataactacttatatgcatgcacgttcaaggatataatatgataatgtgtgataataaattgggtattttgtaaatattaaattttaatattttctactatgtaaattggtattttgtaaatataaatttttaatgtttttttaatagaattgtttactggaatttttgaaaactagttataaaattaataagcttaagaaataagtaaatttaaaaagaaggtttgattgtagaactctagtctacgagtcgatattattgagctagaaaaagctttaaagtataatttacaagtgtttttgtcctagttgaagaaccctgattcttagttcttctcccaataatttgatttcccaccaagagaaagagaaggcatacccactacccagaccaggtaggatttttaaggggtcaactaggctctctgatggggtaaaatataatatttattgattttgggccacttaaatgaggcccaattcatgaggtgaggattgttcagacaagcgggaccattgaaagatgacaggtgttgggtatcgtgcacagtccgtaccgagaaagttagagaatatgatgttggacaaaaacctgatcttcttttggtagcaagcgcactccgccagtctcatgtaggggacaagctctgacactgtagggcccagtgtctagctggtttcatatcaagtgatattcgagagccatttgagcaactcttcgactacctgctactgggtcacctcctaaagatgtctggattgcttttagcaaactcttcgcgtcaaggctgaatggcctctctcagactaggagaatttggccttgttaggttggtgaattagacacacgcccggatctggaatcgtaacatgactttcccaatgaattggattgttatcttgattgggcccaagcctgggtctaccttagctattgttgggctttgtaattgtacacatcatcactctagaaacataaataataagaataaataggatttttctccctgaactatgattcttgtagagttttgctccttaaacttttcttagttgaaaaaatttgcccttgaactatgcaaatcattacaaatattctcctctagttgcatttttctcatcttttaaaataatttgtttaagtgactataagttacaggatggcagagggttggccttcaggctttaggtggaggggattatcttagagagagagaaaggctaagttagggtcggctcataaggttgagttattcaggttttatatattaggttttaatggttttcaaaatgggcccaaaatcagtgatgtttttgttttttaatataagtaaattatcgtcgatgcacaaccgacgaaaaaaatcctatattcggtgctaaaaggtaggggtgttcaacaaaatttacaaaccgcccaacccgaataaaccatccaaaccaaaacgaataaatcgacaaaaaataca

SEQ ID NO: 319141 - DNA, 765 bp, Cannabis indica
caaaaataggagaaaaataaaaataagatgtttttggccgttgatgaagatctaacagtgaaaaattagcttctagtggtgatggccattttttagtgcctagtaggtctcgctattggtaactcagaacttatttccgtaactctcatggtggtaaattttgacaataatagcttcagaataacgtctagagtttgagacatgacttgatagggcattaaattagctttaaaacacaagacgaatgtcaaatttctacaagaaaaatgacatggctatctttttgacaaaaaaccagatattgtcccttgtgtcaggtcatggtagtgcgcacaccaccaaaagtatgcatcctttttatccaacagcacctctgacattcttgcctgcaggagtggctgttggaatatgttttatcaggatctagatttactaccatgtatgttatttaacatcctaaatatgaatctctaaaacaatgtaaataaacacatataaagtttcagaaaccttacagtgggtgcaacggaataataatggctccttccactcaaatctctaacccttgtatcctgtatgtagcagagtatcaccaagatctaagtccgaatctccttctcttgaaactggattcttcacacccttacacactatgattgagtaccacttgatgtgtgtgggcacttactctataattatagggtatgaaaatatgaagagagaaagagaggagagtggttcaaaataggtagaagagatggctca

SEQ ID NO: 319142 - DNA, 842 bp, Cannabis indica
ttttttgggttttttttttttcattaaaacaaagaaggattacaatggaattggtaagttcgacaaaataatatgttattttaggtatacttttatgggtgaaagtgctttgacaaaatttatcttaattatcaattcttgtggttgaaaaccaagatgttatttaataaattatctaaaaataacaatgatgttcggcgaagatttaatttctttgtggaaagattttttttacaaattaagattgaaagagtatatttgtgagagaaatacaagaattcaattgtatccaagcttattatgccaaatgatttagtattttcactctctcaatttttcacaatactaagttgtgccccctaacatatatagtttataaataataccgctcgaaatataatttttgtattaacatttaaaatggtcattccatcaccctttattcattttttttttgtgaaataagtgacacaataaatgatattgttgataaataaatgtaaattaaataccttctaactttttttcgttaataattaaaaaatgaaaaataaaaataagaattgttataaaaacaatatcttttattctataattcgttaacgtaaaaatggtgaaaatatattctttgcatccatttatcaattacgtaccattcaccagggacggagggactttagcctatgtgtaggctaaagccctcactcaaatatgtacattaaacttttcacatattgatatatacatatattaattcactttactcaacttattaaagcccaatttacaaaagccctcactcaatatttcaatcataattcatgggtctactcttattctaa

SEQ ID NO: 319143 - DNA, 469 bp, Cannabis indica
ttttgattaaaactgaaaaaatctcataataaatgattcaaacaatgataaaaagaactttaaacaactaaaatataacaataaatataaaataagaaactacaaaacgacaataaaccaacatagctattaaaaatttgcaaataaaatattaaatcataaaaacgaaatcaacaaagagaacacctaaacactatcatgaagaaaaaaactcaacttaaagaagaaaaaaaatcaaaatcagagatgtgttccttctttaaggcatttcatcaaacatatatgacaacagtatctttatattcatacatacacaacaactcaacttataaaaaagaaaagatcacaaaatttgcaggcaaattactataatcaatgggaaacaaatgtacctcagtagcaatattctttttttttttttttgtacgcggtcagtagcaatattcttaaaaaatactcaattcaaaac

SEQ ID NO: 319144 - DNA, 582 bp, Cannabis indica
aataaaaatgtaaccattaaaacctcttccatatatatatatatcacattttaatctatttattaggtaatataacacaaaagtattatcaaaatagttaataaactaagtataaaagaatcaacaaatgatttatactagttaaatttcaagattaatgtaatctttatcttactctaatttaagaactattatctatttatttattgaatagaaaaatgagttataggcataatttaatagtttcacatttttgttttacaaaaaaaaatatctatcctttttcccaatataaaaaaactagtacaaaacatcaaacatgattctaagagcaatattggatcaaacactcaaatctcacaagtgtttttctcttaatatcttaagtaagaactttattgtgtttctcaatacaatcttctaaatgttagacttttatttgggcttacattaaattttattggttttattaaaacttgggttgattggatagttctttgctgtgttagcctatgttgttggtgatcaattgttaatgggcttagcatctgtgtgtaaagtctaggtgaagcagaagtgtgg

SEQ ID NO: 319145 - DNA, 1066 bp, Cannabis indica
gtttttagtaattacacagtgtaattacattcaattctcataggggccatgagaattggaaagtgtaattggaacccctcaattacttccaattacacagttgatgtgtaattacatggtcagacaaacatgccaaattgtgtaattacctctaattccacacaattccaattatattgtagctttccaaacgcacccattatatatattttgtttccttattactacaaagaaacttgcatgaatagattctaactttcctttttgggaatatttttcatttattatttaattgttttcttacttgaggttgtgattttatattgaaagaataaaaaactttattatgtaataaatactgttattcgtgtttttagcagtagacacgtagaatccaaatcagtatcaaaggccccctaatgggttcccaatgagataaagtgggtcaggcccatttagacaagacattcgagaaacgtatttcagttccgtgatcgaataaccttctgccaatgacagctcgtgtctggaagcaggtccaataccatgagcctgtgaggatgagatagcgtattcctggaagaccagttcagtttcccattttatccttgtgcacaaataaggaaatatttgtttggcagatctcgacagaggatcgtatcaagctaaatgggaaaacttcctacaatagaaatcaagcaattaattaacagttaattgcccacaatcaaagtacacaattttgattaaatccaaccgtattcaatctgcctagtcagcatatttttgttgggctttgtgccttaaataaagctctatttcaatgtaatcttttctattcaattatcaataaagaaacggatttaattttattatttgtttaatgtgttatttggttcatgtgatcatttattaatttattttatttataaattcatccaaatccttatcgcattgatattcttgtttattgtgttgttagcacagtgaaaagtaatcaagattgtgtgattaaatgtatggagtatgtatcagaagggaccgatattgaacttaaactagatat

SEQ ID NO: 319146 - DNA, 1723 bp, Cannabis indica
attgaatttgtatcacttacaaatttagaactttgagtacttatatcgctatttactcctaacattattagtatatatatatatgcggtataattactcaaaattttgagttaataatttattttaggggtataagtacttagtaaaattgtaatttttatccagttatattagtacagactctgtaaatgtttttaaatttataactagacttagttttgaaatttgttgaaagaatatttagaagcaactgacattctacttttccttccagatccgatggttttagtatctaagctttacacgtgtcctgttctaacagagtctgtactaataaaattagataaaaattatattattactaatattaagtactgctaaaataaattattggatttatgcttactataaactcaaaaattttattaattatgtggcaaatatctcatatatatagggatatgattttgttccgtgattgtattttcacggattatattccgtgatgtatggtagctgttagatgagggagttatttgatctgagggctgagattgatttaggagtaattaaggttaaaaaatagtaacgtaccctgacattcatttaatgtacactgagccccatctaatgtaccacggaatacattccgtgaaagtataccacgggacaaaatcgtgtccctatatatataaataatacaagtataacattgctaattatatatattatgtatatgtattagattgctggaacaattgaagcttcaactgaacaaaatgagtacataaaggatatgtggcattggcttgtgtttgtaagtgtgaaaaacttaagagttgaaggtggtggaacttttgatggtaaaggaaaaatatggtggaaaaaatcttgcactgtcttcaaatctcttgtatgttcctatttatttatatttcgcaataactcattacaaaaaaaaaaaataaatgttgcttagttcgattaagttaactcttatctattaggtcacatgcctgtaaaacgaccgtccattcactttaccgacatgtgacctaataaattgttcgtcgagctaagacaacaatactcttattaagtactaatttttctcttttctctctcttatttgtacgcagtcttgtgttcgcgctaccaattgtaagctcttaaacccttcttactattttacacaaaagtatcgaaaacttaataatttttttttcaatataagtaaaaatattaacttttttattttttttgttgttggtaattataggcagtaactttctttgattgtaagtaatctaaatgtgaccaatatttggttcaaagattcacaaaaattccatctattctttgattcatgtgataatgtcaaagctaatcatctattagtaactgcaccaagtaatagtccaaacacagatggaattcatttgagaggttcacaaaatattcatttaatgaataatattatccaaacaggtaattaaataaatacatatctttaataaaatctcacataataatatctatttattttttctaattttattttgttttttggttgaaggtgatgattgtatttctattataaatggatcaagtaatgttatagctacagatataagttgtggccctggtcatggataaggtcttggaattattaaaatattattttgatttaaatatattatttatatatatatataatattaat

SEQ ID NO: 319147 - DNA, 1264 bp, Cannabis indica
atattaattattttttttaaaataattgtgcctaaatgagctacacgtgcgaagcacgtgagactccactagttatactaaaatgtagggaccaaagcaatgatggatccaaaatttaagttgaggggttacaagtttatcattatagtattaaatataatttttttaaaaaataacataataaaaaatttgcttcatgatcatggttcaaaaagtaaattttaaatattaaaaaaaaatgctttcagggtttgaagctttgaattctattatatttgtaagtgagcttaatcacattttttttatgaatcaccaaggtatattgaacaaatagcctgaaagctccaactccactatcatttacaattgagaaatccaatctctatctatactagatgtattttttggtatttgaatttctattctattccttacataatgtttgacattactaacaattactgaagcccccattacactaatttggggccaataagcttgactcctcgctttccaaacgtgttatattgttgctgccataacagaagcaagcacctattttttgctcttcgaactcttcctcttccttatccattttataagctgctaaatcatgaacacttaagtcttctagttcagccaaattttgagcacttctatacgtattctgttgctaggacagaaaaagaaaaggtgttgaatcgtctcttcttggcttctacacattacccaccatgggtccaaaatagaacccatcttgtacaatttctcttctgtttgtaatcaagcatagccaaccaaagaataaaacgatgctttggaaggttaagcctttcttacacttcttttctcaaaacaactttgattctagggaggctaaacatattgtctcttgcattaattttgtatagcaaagtagaacaattacgaagctcagtacaattcttaaatctattcttcaccttataaatttgcttccagctctaattattattattgtctaactaactaaaatatatatacattttttttaagaggtataattggcccttgcctctatgtggattagcctctagacattataactcttttaatcactaaagatattttggttatatttaaaaatattttaattttaaggtcctaattataattttatatgaaacacaaagtgtaaagtaatttttttaaaactatagttaccaaaaataaaatatagaatctaaaaatagtataaatcccttatatttatatatatatatat

SEQ ID NO: 319148 - DNA, 2079 bp, Cannabis indica
ttagcctcgtccccctagggtccagagaaccaggggacgaagaagcagcttcatgagtagacgtggaggtagaagaacaagacaaagcaaatgatgtggagtacgaggaaaaccaagaggagtatgacgcctatatgatggcagttacactgagttagtggccttgatgcaaaaagctactgatcatgaagccgaactggcgacacagaaagatcaaaataggaagatgcaatagataatagttgccatgcagaaggctatggagacagcaggcatgcacatgcacccaaaagctatacctcatggaccaagcgaaataagagaagaatcttcaccaaatacctaaagacgtaaatgtcgagaaccaagccctattcggtatccctcggaaggttatccaaagaaaaatcccacatctttcccataaaagaacaaaaaggctcaagatccgcgaaaggtccggttcgattcccaaagggaaaaggtccacagaggggcaggctccctaaaaagagcactagccctcaggaccatgaggactgaaaagcgtatccgtgcatcaagagcccagggaaagaggaaggaaaaatcgtaaacaccccctattgatttaagatagaagcttaacgacatgcatggtgaccttaggaatcacctggagagaaagaaacaaacaatactagtttcagagggcgctttcaatgagagaatcctggctgaactctctatcctccgaaaagacacagctaaactttctcgaaggcaaaagggagataattcagagtccgattgcaaagattgggagccgtgtgctagaaacatccttgaggcagagctccccaaaaattttaaaatgcttgaaatgatgatgtacacaagagacatggaccccagtgatcacctgacccgattcaaccaggtaatgagtcatgagggtcagtaatgacgtgaagtgtttgtgttttctgttaacattagggggattcactgaggagtggttcaagaagctagaaccataatgaataagttacaagtcagctttcgaagacagttcgtggcggctaggaaaattaacctcgaagtaagtgccttgaccaacattaaataactgccaaccgagactctgaaaaactttataagaagattcaaagaagaagtctccaagaccaaaaaagttgatgatggacaacagttggctctactccaagttggaatacgaatcgaaactcctttctggaatgaactccagttggaatgggccactagccttcaggactttcaaaagagggttcagaagtacatcaacttaaaagaagtgcagataacaacctttggaggatattatccgaccgacagaccagggtatatgccaggaacacagttttcaggagctactctcccagttacaccgtaggcaaacagagtacagttttctggaacactagggtatactcaatctagttttggggcgccagggagtaatccaactcccgaagcgaatgcacaataccctgctcaatctgccccactagctacaaatgtggcaggtactcccaaacctctcggagtaagagatcctcaaaagagagcactcaaactgaggataagaggcaaagaagaggttacaccccccaatatacacaatatatggaactcatggatacccaagaacgagtatactttgctaccaggcaaaatactcattatcgaagaaaatatccaatttgatttaaattcattattcaaatttaaatataaatatcatataactgattaacagaaatcagttaaatctttttattttattattatctttttaattaaatagattatccaataatatatttattttaataattaaaagttaattaagtaatttaatttaaattattttaactaataaaataatcaaacaaaattagcatgacctttatatgtcatcctacatgtgtgtgccatattttaaagtccaaaattaatatgttaattttgccataaataagatttattatttattctgccaataaataataattaattaattttttttgagcaaataattaattaatttttattaat

SEQ ID NO: 319149 - DNA, 1583 bp, Cannabis indica
tcggttactttttgaggtcaaacaacatccaatccgcacaagtgcggattttaaatttttcaatccaatccaatccgcacaagtgcggatatctgcattttgcggatcggattggattggatcgtgcggattggattggatcggatactttgtgaacacccctatataaaagttaacttgcgttaacttatatatataaatataatattataataatatattaataataataatataataatattaataaaaactttattattaatagttatcttattatttcttagccattaaaaaatctctctttctagggtatttggccaacttggagtaccctaaaataccctgatatttctaaaatcaacttatcccaataatctcatcaatgtttctaactaaaactgttgtgacatttttagcctctaattgggtctccagggtcaccaaacttgaaaatatttttatttcaccaataactcatattatatccatgtatttaaaataaatctccgtaattaacaaattacgcttatatatccacttattgagtcatagggtcgccgaacctgaaaatatttttatcccacatataggtcatattacattcacacgtgctatataatctccataattaacaaactacgattatttactcacttatagtaaaatttaaattttatgctgaaataaattagtagggtcataatcccacttattacttgattaactcataatataaatataaaccctaattatttaccattagacttattgggatattacagtctgtcaaaggatgttaagaaacctaatggagtcgatgagaaagattaggaaaatccactcaagaaggctctgaatacaatcattttgtgtctggaagatgagattctcgtaaatgtggttaaagaaaccacaacctctacaatgtacaataagcttgagcaaatgttcatggctaagagtctaccaagccgtgtttatctgaaacaaaaattctatggctttagaatggatgaagataaatctcttaatgataatatgaatgactaagagtctaccaagccgtgtttatctgatcttagtagcttaatagtcaagattgaagaaaaagacaaggtaatttttggctaaattctctaccatctcaatacaagcaattcaaagatacgattatatactcgaaggttacactggtgtttgatgaaattattagtgccatatattccaaggagttatctttgaaacaaataggcaaggcttgaaagaacaattatgagcatactactctcgggaagacatcaatacaaagaaaaaactcaaatggaaatcactcacatggaaggaaaggaagaagtcaaagtgttaaagaaagaggtcaatgacaattatgaggtccaagaactaatagtaagtgttaccactgtggaaagataggccacttaaggaaatacaattatgaattgagaaagaaacgaatatgtaacgccccgatattttgccttattttacaaaaatactattttcatgcataatttgaaaagataaaaacaataatttaaatacaacagtggatttaaaaa

SEQ ID NO: 319150 - DNA, 1412 bp, Cannabis indica
tacataaacatatatatatatatcagtttatacatataaatgtctaacacgaataacacataatacctcataaaccgactgtaattaaaaaaaggtggggatcaatttttaaaaaaaaaaactaaggcataaatctaaattgaaacagttttataaaacaaataacacagaataactcaaagtattagataaaaattaaaattattaaatacacctttatactgcaattatacttataagttacagccaaataagcaaattactatataaaaaaataaataaattgtaactgagaatatttgtaatgatttttataatttaagaggaattttcataattgagaaaaatttaagagataaaacactacaacagtcgtcagacaaaaatcatatttattttaatattaatttatttaccaaccaataatatcaattaattacacaaaatacataaggtctttcaaaagattccattaaattttgttgttctataccacacgttaaaatagtaagccttattaaatatttaatgtttaattaagattccaaatatgaaaacaaagaccaaaacaataataatggataagggttgaatatttggtctcaaactatttaagaaaagtttatagtccgtaaacctaaaaaaactcaaaaatataaattaataataaaaaaaagtcaaaaacagaaataatcaataatcttggctcaaattcccttgtctcctcaatttataaatctagctcaatagtcaaattgaaaatgcacccaaaaatcaggcaaactttttcggctctaaacaaagaaaggtatatgtacatatatatatttagatgttgtatattcaccaatctttagaaatataatacttaaaaaataactaatagcgtgcacgtggtttatgaataagaacaactaatcttttaccttttctttaaagatattaacttggacttatttggcttcagaaaaatatttattattattactatcatattaatagtaactacgtacaaattcaaacttaagaatatcgtggacgatgaatacacttttttttctcacttttgaatagtgattattgtgtcaagctgtgtgatatagttatagtatatgaacatggttttgaaatgttaatagtacaatatcctattatttccacaattaaatcttcattcatttctaaaaattcttgaggacaactacaattaaagagactaattaatttaggagtttaagttggcagtccttgaaagttctgttcttaattaattttatggactcgtttagaacgttgtattagatcatattgtattgaattatattgaattggattatacaatatttttttatagggtaaataccattttggaccctctgttttaccaaagttaccaattggaccctgtgttt

SEQ ID NO: 319151 - DNA, 842 bp, Cannabis indica
acaattcgtgaaagtacaataatggacaaaatcatatatattttttttaatgaaaataccagtaattattaaactgaaaaatccgtgcactacctcaggagatagagaaccctcgtggatggttaaaaatattagtcaaactaaaagctacatttgtaattcaatttatatttagttattgtgattaaaaagtaatatttagtaaaaaataaaatcactctacaattttgtaatataacttaatatacataaaagtatttattataatatccagcatcaataagtttagccaaaaaatttacagcaacacgacacaaaaaattctcacttgagcaattcattcccttgcttttacaaaattccttgtatcaataaacttaaaaaattgtatattatttcataataataataatttaaaagaaattttcacaatgtggaaattaaattgaaaggacacgattttaaagaactagtaatgtagttttttttagaaaaaagaaagaactagtaatatagttggaggaataaatatcctactttttatttattatatggttaaaaattttactattgtagtgactagtgagtctcaaggaaattattgtatatataatcagtgacggacctagaatttttactttatgggggcttatttatcatacaaaaatatttatacttacattataattactattactagatttatttaattttgtggaagcttttctactattttagttcataattatcaaattaaaaaatttacatttaattttttaaaagacaatatttttattagtaggggctatagcccccacaattatataattattagtgtttat

SEQ ID NO: 319152 - DNA, 855 bp, Cannabis indica
tttttttgaattgtcttaatatttatggtatttgctgcttatttcagtctaaatactaataaaataaaaggtaaaagtaggtgagagcttaaaaaaattataccgatcattaatttatttttctttattttgctgatatatttttttttaagattttgcagataaataaatataactaagaattttatcaatggcaggacatatacaaacttaatatgtataattaatgcatttaaaaaaagtataattaatgtagttatgctgcttatattaccaatacaaatttaagagccaattcataacaaataatttattattaactcattttgttgtgttgtaataaatttatttagcatgggatagtttttcattaatattgtacacctttttctctcaggttgtaataatttacacaggtgaaagtgataattgattttataataagcaaactgttgacatgtatgtaactttaatattaccgtatatgcagtattaattagtggcatttgtatatatatctttaatgggtgactattcaatggttacatttttattgtaactatatggttacattttttttgacctgcaatagcaggttaccaataggtaaaaattccatttttagaattaattaattataattaactattttttaagtaattaaataaatatttaacaaagacctattttagcaattaaaatttttaaataattttttttatttatatataaatcccttgatttaattattttaaccattaacctattttaaataaaattactattttcaaatttattatttttttttttaaaaaaaaaaatgaaaatactgaaatctaagagtcatggaaactg

SEQ ID NO: 319153 - DNA, 1025 bp, Cannabis indica
tttacctctttttttaaacattgtaccaattttgcccatgtcactttaagatactctccatgtgattctcttatgtaaggatattttgggtacaatacatataaaaagaggtatgtttcaaataaatataaaattagaggtaaatttgattaactgatgaataaaatgggcatttttcaacttacccctttaaattttatatatataataaaaaaaaaaaaaaagcagtttttcatgtgacttcgtagttatacaaaatttcccttgatgtcccaatgttcacaaaaaatgatcagcttacaatgttcactaaattatggtccggatcaccattcttctcatttagtgataatatttcattgaaatcctaaaccctaaatcccatacacaaatccataataaatgaaagaaagaaatctttaatccgtcttaggagttgccatgaatctttcttaagttgtgttttcgaattaccataaaagcctgtgaagcgccataaatcaatcccaggacatttgacaagagcatcaatatgtccttttggataggatttgacatgaaataaataaaaaaaaaacttataagagtagtatattattttatggtatattgatttatttgctattgtatatcattaaaaaaaatgtaaaaattatatttaaatttttagtatatttatattttattatggtaaatttgtagtatattaatttttcactatagtatatagttggaacatattttattaggattttaatttgctaacatgtatgtttaattatcacttgaagaatctaacattctaaaatataaaatcattacaacgacaaataacacataaaagattaccaatcctaacaatgatgatagcaaaataagtgtcttcttccgttaaattaatttgattttctatgcatcttttatacctaaatttattccctaaactaatagttatagctattgaaaaaatggacatacatttccctaaaccctaaaatacccctcccatttttctcaacctctct

SEQ ID NO: 319154 - DNA, 751 bp, Cannabis indica
aaatatgattcatttactacaaacaataaatcacctaataaaaaatcttaacagttttttagcaaaattgttgttaaaatttataagtttcaagagctaataagggaaataccagtagaatgatacaatgtattccactatgattaaaaaacttgtcaataatagacactattaaatttacaaaaaatattcaattttgaaaaaataccacgttccaacactaaaaaaagctttttatgataagcacctattatatttttattagtataataaatatcgagttctatataacttaagaaaataatttttagataatattatcaatcaatcgtaaggcgttacttatcaaaagtctactgctgtcaaatagcaatgctttcaatttttggtaaaattaattaaatttctattgtcgcagtgtactatggcaaaaaaaactcatgagtaacatgttatgaaattcgttaaaattttcaatttaagaaaaatctttgttcctacactaattaaagtattttcgcgatagaaattattaagaaagagattagagttttgtaaattaatttttgacaaaattaattaaagttttaaccactaaagtgtactatttttataaaactttttatgaattgttgaattcgagccgtttttacaaactataaatttttttttttttttgaaacatgaaatatcaacttcattgaaataaagcattcgaattacaaattggcatgaaagtctgccagaacat

SEQ ID NO: 319155 - DNA, 1508 bp, Cannabis indica
ctaatatttacaaggtttcaaacaatattctatctctattggtaatttttttaggccaaatacaagaaatttggcactttgtaatattcttgacttgtgctatgattatatcactttttacaactttgttttcccataaaattgaatttcgggagcaccacaatgtgtacaccaaagctgcaagtgcagcagccattacacctcttcgaaacttgctgattttggcctttccaagccattttattactcctggcagcgaccttctgcacatgttccagttcagccacacctgaaattgattcaagcaaacctgcctaagagagcagttgaaaaacaagtgctccatcgtttcttcttccctactgcacaatagacaagttttatcaattttgggttggtatttggctatcctatcctttgtcttgagttggttaagcatggccatccacataataaacctatgctttggatagtttagccgactccaaacaatagtcgaccaatgctcctttgtttcggcagtgatgagtttttgatagccttgagtaattacatacttgttactcaaaagctccctttcttctaaatcatagtagagtctctttcactactctctcttttattgccacaatctttttccaataccaactatcatttcttttagctttgtaatcccaccatgattgttcttttaagtatacacaatgcacccatttcacccacatattatcttctttttttagcaatagcccaaacatatttaaacatagcaacaatattccattcagttacctgtttgaggcccaaaccctctgctgatttctccttgcaaacagtcttccaagctacggcagcaacccccttgagttggtggctaccactccacaaaaaagtccagcaaatagcctctatttcagcaacaattttcttcggcaacaccattatttgactccaatacgagtgaatggccatcaaaacagagttagtgagcaccgctcttcgtgcaaaagttagatgtttagtactccatgttcggattccagctaccattttctccactagcaatgaacattctaatgaagatattttctttgggcaaattggtactcccagatacctaaacggcacctcatatctctttaatccagaagcatcaaggattcgttggatgtctgtgtcactcatgttattgcaataaacagaaatctttgaagggatagggaatagacctgatgtttgagagaatagattaagcccctgcagcataaaataaatgcttttgtagtctccattatagaaaagcagaacatcatcagcaaaactaagatgatttaacttcagatctccacatctctcatggaacttgaaatcttgctttgaacttatcttcttcattatcctggacagatattccttacccaagacacaataagggtgacatgagatcaccttgtctcaattccctttttgcctcaaagaatccatgcattgatccattgaacatcaaa

SEQ ID NO: 319156 - DNA, 2236 bp, Cannabis indica
tgaagcaatactaaaataattttattaagacaataaattaataaaccaattaattctatataatcaaaaattggtttcttaacgaaaaaacaattgcaaatacaaaaactctataaattttacatgcttcttaaaagctctaagacttgaccaccaacccagtcgttagagttactgtcgtgtcgctcatggtgatggaaagttactggagttgttgatggtgccggaaaagtctccagaattgacatcgtcactggaaaatttaccgaaaaagtcatctgagttattatcgtcaccggagtttgatgtcaaatttgtcatcagagttagacattagaatctatctcacagaaaccaattacatttattagctaattagaaatctgacaatgaaactagtttattaaaataacaaaaaataaaataaaattaagcctcaattacattaaaaaaaaaaactaacatttaaacacaaaaattagttatttaatacaactaagtaagaaattgaatataaataaaacacctaaaaaaacagtttcctattaaaaaaatccaatttcaaaaattataaataaacaactaagaaattgaacagacataagacacctaaaaaacagtttcatgcaaataaacatataatactatgagaagataaattgaaaaaaaaaatgaacatacttcaaaaagaaacaacaatgtaccaaatgatgaatccttacaacttggatcaatttactttttttttcttcttgatatggatgaagttttttctcagagtcagcacttaaaatctttaacaacatcttccattgcatttttactggaggaattagattccatctgaacaaaaatataaaaaataaatcgaaaccagtttcatcatgcaacaacaatgaacattatgaaaccaaacaaaacatttcgttagacaacaacaatgaagattatgaaaacaaaacacaaatgataaactagtttcttgttaataaaaccagtttcaaaaactacaaataaataactaagaaattgaacatgcataagatacctaaaaaactaatttaaaaaactataaataaacatttaaaattgcgacaacataaatcgaaaaaaaaaataaacatacttcaaaaacaaaaaaaaataataccaaagataaatccttagaactttgatcaatttagtttttttacttattgatatggaggaaatttttcctcagagtgagcacttaaaaatctttagcaacatcttccattgcatttttattgaaattagatttcatttgaacaaaaacataaaaataaattgaaactaatttcatcatcaactaaatggaaaaaaaaaagcacaaaaaaatactaacaaatataaccaaaacaacagaaaacacacaacaataatcttaaaggaaaatataattgtaaaaatcagtttcgaacttagagataaaaataaaaagaaaaaacttaaaataaaaaatatacaatactaatcacaattataaaacccttaaaactcgtgaaaccagttttgaaccctgtgaaaccagtttagactttatgaaaaatcataacagaatataaatgctaaacaaaaaagttaactgaaactatttcatcctgcaaccaaatgaaaaaataaaaacacacgcacacaaaaatactaatcacaaatataatcaaaacaatacacaatccataataataataatctaaaaacaaaatataagtgtgaaaatcagtttcgaacctaaacaatgatataaaagaacttaaaataaaaaacatacattaatatcttgaaatagcacaatcatttcatatattaatgtaatgtttgtgactctaaatatttattatgaaaaaatatctacttttttttacacttaatttcataaattaattaattaaatcattttatatattaattaatttaaaagaaatataaatattcaatataattttaaaaataaaaacaaaataagttttatttaattttttaaatacaacattaataatgacgacattgtcgtcgataatgggagcggattattaaaaaaatgacgataatgttgtcattgatatttaatattgccaacgacttaaaatgtcgttgttgataatcttttttgccgacgaacttttcctaacaactttttaccaacgaaatgtcaccattgataggcattactaacgaaaaggggcatttcactgacgaaatttgtcctcattga

SEQ ID NO: 319157 - DNA, 1017 bp, Cannabis indica
tacaactattctgccaaaacgcaaatacctcgcatatagtatagcacaccttatttactaataatatctttctaatcacatcatcatttaataacaatttcaatactaaaaataaattacatactatacataaactaaaaactgttgagaatactaataaaaaatctgttgtggaaagaaaaaagaacaaaactacacccattttaacaatatattgacccattcatttcgtggtaatcatctaatcttttccaaaccaccttatcatcatcaccttacaatacgaagatattgtctgtgtgtatatatataagtatacagattatttaagagaggtaacattcattgtatagattctccatattaaattcttgcactcgaaaaatggagtttgtgaaaaaagccttcattattaccttactagtgatcatttcatcatcatcatcagcggtaacatcagctaataacaatgatgagaaaattggaggaatatttgtatggccaacaagggttcaaatctttaataacttgaacgatgaggtccaacttacggttcattgcaggtctggtgatgatgatttaggtgctcatgttttggctagtaatcaagaatatgagttcaaatttagaatcaattttacaggtacaactttgtatagctgtagtcttacatggattggtggaactggatcctatcagttgtttaaagcaagcagggattctgacagatgtgcctccaagtgtgtttggagggctcataatgatggaatttatggcttcaaagagggtagaaatcagaccaaagctgatattatttacaaatggacttaactctaattattagcaacccaatatacatatattatagttatgtgttcgacaaataagctgatcatgtattacggaagacattgtaaatgtataaatacatataatatcgttgccttcttcttctaatttcgatctgtatcttttacgtaaatttatataggaaaatttgattttatatacttaaaa

SEQ ID NO: 319158 - DNA, 1008 bp, Cannabis indica
ttagtgaaatattttgtactgcgtaaaatttaaaaattagtggcaaccataggtgaatatagaccactttcaaatgactataaattatttttcattacaagtttagtggagagactagaagaagaaatagtgaacattccaatcaataagtttcaatgtattagatatttaattaaagatataagagggtgacatgtactctacaatcactctaaataatattaattgttctctcttttttttttaaatttttatttaggtattataaatatttatttattttttctattttgttctatttttattcattttactattaattaactatattaattaataatttgttgtaacattatatgataaaaattaatttaaggtcctaagttgtaactcgtggctggtatgtttcaaatttataattttaatttgaaaaatagaaaaaaaaaaaaaaaaaaaaaaaaaaaaaaaacaataatatctaaaatatctatcaacctatttattttctcatatttaaatgaaaatatttgtataatttttttcagaaaagaaatatacatctatataaaaaatagaaagaataaataagaatcgttatctttcttttggcaaaaattctcactctccctagatatctctaaaaaaaatattctttttggagacataaagaacaaaaatatagtgcaaatagaagagagtttatttttaataaattggatatcagatcagttcattaattattaatgttatatgttcataaaagaagttcatatatgtgaatgtgtatactatatcaactaatgtacactttcaatttttattatttttaaatttttattgtgattcattctctaatcttatatggttatttatagaggaaattacaggagttttaaaaaattttataataaatatgtcacatttaagtttgaccaatttatatggtatttttttattttgaggtctttttatggtatttgatatgccatatatatgtaattatgtttt

SEQ ID NO: 319159 - DNA, 803 bp, Cannabis indica
tctctctctctctctcactcctctctctctctctctctctgttgatctcactcctctcccttaatctccccaccttctctccctccatttcagtctttctcaatctcaatctctatctctcaatctctccaccttctctccctccatcctggtctctttcgatctcactcctcttttctctctcttatctctgtgtcaatttttacagttgtggggtccttaaactcaaagatcgttgcaaaattttggtggagaatgtgagtgtatgcccgaacccattgttcgtgctttcaaggttcattctttagtcttttacttcttacccatttgtagttttggtgtaaatttgccaacttcaatctttataataatcttgttattgtattgcatgtcaacatggaatatgatcttgatccttgtattgagcaagctaaatggtaacgctgagaggggagtgggttgattaggcgatctagttttttttagtacgatggttttaaactgtcggttatagtgtaatatagcaataccttgaaacatttccttaaattttttccaaaaatatcccattgatcgaatcctacccataaaattctaagacatatttttctaaacacaaagaaaacttctagttacactaaagatataacgcaacataaaatatgtaaaactaacatgaacacattgacaaaaacttacagtacagtgagtcgagctcgtctcgtggcaatgaactttacatgttagggctaaccacattctttaggaccgtattactctgataccatattgtaacgccccga

SEQ ID NO: 319160 - DNA, 1154 bp, Cannabis indica
ttttttaatttgttttagtgttgttttacagttgttttgccatgattatttatttgatgtcgatttctctatttttgttccatcttgtcagtattaatgggttttctttaagtgttctcgtattgctgggtaggtctgtctgtgggtgtggaagatagaggcttggtatgtgatttttggcatttacagtataaaagacaaaaaattggcaaaaacagtataaatgtaatttttgtcatgtgacagtataaatataaacatttactaaaattacagtatttttataagtttccttatttaatacaatgtaatctttatacatggcttcgtaaacaatgttttaattatttatccaacttttacaaaatttctgtattattccatatttatgcaaaccagttgataacaaaaaagcccaaataactatattgatgcagagtaaaagatgtatggttggtccaccatgagtcatcgcgcgtggctccacaaccacttatgttaatctgggctttagtccattttgactttccccatttcagccaactagactcacaaactcaagccaattttgataacaacatatttagaaaaagagacaattcttttccaccatacaaaagttgtctaaaacattcatatataagaaaccaataaaataaatggtgccagtactcttataagttataatattcttattggtataatttaataaaaattataaaaaatcgctaaccaattataagacttcatgtcataaaagtgttagacatcttagtgcctcatatcaatactctttatataaaaataaagaaaatttacaaaagtactccaaattaaactttttttaaaaaatatttttatggggttagaattataaggagttcattccttaattaattttaatgttgtgatcgtatttatgtgttgaaattaatttaattttttccattagtcttgtcttttgacatggttctttagtcttgtcttttgacatggttctttagtcttttccttttagttttttctggttcgagtcttgtcttttggcatggattgtgtagcttagaattatcatggtgctatagaagcattcaagaaggagaagattggatgtgttcaactcgaaactgctgagataataggcattaaagaag

SEQ ID NO: 319161 - DNA, 1361 bp, Cannabis indica
tgatattgtagaaactttaaaagtagacattatgaattaatgaaaagttaggaaaatgttccctcttgtttctcctaaaaaaataattaatttaaataaagcctaaagaatctgagctaagatgctgaggtggcggaatggaaatttcttgtctattttgtttactgtatttgcttattatttttacataattttctgtagcttcttggaggagggagctttaggcaagactctatcaatcttgcaaagcagccacatatcattgtaagtgttgatgcaagactcttagtgctgtcaaatatgcaatgtgttcactatataagaatgcggctgtgctggaatatattactattgttctttcctaaaatttactgtgttgtgaaataatgatatgaacatcttgtgcatgtaatgaaagatgttttattttttggcaatttcattttttccccctcttttagcctatactgtaaagcaagcaaaatgtgttcctttgtataagtgattggtatactcgtaagtatgtggtttttttttattggttagtgccgagattttcaaactgccctttagtaacgtataaattgtttgaattgttgtaagaaatgaatatccattgtagtatatcaatgaaaatttcttcgaagaaaaataaatgaaggatatatcgtatgatctttattaatgttgaagatattttaaactgattacattgtatctgcagatttatttacctgatgggattaaaatgattgtattttgtggcaattgacctttgataccagttgcgtaatttattacgacatgtttctgatattccaaatttctatctttttttttgggtaggttgggacacctggtcgcctgatggatcatttaaacagaaaaagttttccttttcgtatgctgaaatttctggtattttctaaatttaaatttattttgtttatattcagatggtttctggattcattttattttttggccatttagaaaacttgttgactgttatttgactgaggaatcatggtcacggtctcatggcttggctacattctatagcgtatcattggtgctatctgggatctgtgtaaatgttgattttaaaactctgaagtttttcataatattggcttgcacattatacaggttttggatgaggcagataggttgatgtccgaaggctatgaagaaacactttatgaaattctcaaggttatcccttgtgatcggacatatttattttctgctaccatgaccaaaaaggtgattaattactatatatatagtgactattcaatggttacatttttattgtaaccatatggttacatttttctttaacctgtaatagcaggtta

SEQ ID NO: 319162 - DNA, 674 bp, Cannabis indica
tgatcatatattttctataactcttccagagtatgtgtggacttctaaatcacactcttttagacaatataagtcaacgactttgggaggaactatctccacttctagttcagttctcatatgaagcaaccgtaaaacgcttcacctatttgctcagaataatggtagtgttgaatctcagattctagagaaccactactgatctcagaagcacttgaggaactgtccaaagaactctcgaaagaataattggctatctaaattgaaggatagtcttcgtagaaaagactgagcaagtcttcgtcaatccaattggtattgactaaaagtgattcaagtagaagattttttatctttctgtacttctaaatttcagctggaaattttgaacaactacactatagcaagatgtgcaaccacacaatagtaagcaacaatggtatgcttctaacatctggatgagatatagtgtttcaaaacataaatttatcacttggttagcagcatggaactgattgaagaccaaggatagactaataaagcaagggatgcaaatggagctgtattatttaatttggggcttggaaaatgagttagcttttgagtattgttagttagttataaataaaaaaaatattaattatgttgtaatttttaagaattaatttgagtca

SEQ ID NO: 319163 - DNA, 982 bp, Cannabis indica
tgtcattttgttcgtgagaaaattcaacaaggtttgatctccacgagatatgtgaagaccggagaacaactaggagatatttttacaaaggctttgaatggggtgcgggttgattatctttgtaacaagctgggcatgattaacatctatgctctagcttgagggggagtgttagaatattagttgtatattaattgtaaaaaaattaaagtaacttgtatctagttgtttcctatttcgtaattagtagtttcccatttagtcttctagctctgtatataaatatatactattctatgaaatatacatacaattcaattcactattttctacagtgccaaacaacgggaaccttaacctcaccagttgagtgacgaaccaccccaaaccacatctattattagaagagtcaagagcagcatcaacattgatctataaaatcacccttttaggtggcacccaagcaaaactaggagaactaattagagatgaaatcaaggtcccaaccgagtgagactcactacactaggacctttctctaactgctagtaatcaacaaggaaaccatgaccccaagaaataacaatatcaggaacaattaccttatccttatgtacctttttattcttcctaaaccaaattcgccacatgatgaccaaaatcaactctaaagaggccacagttaaatgatcgagaaacttatgaatgaaatcataaaaatcatgacaaataacaagagaatcccccaaggatatatcacagagtttatgacagtgagccaaagacggacacccccataaagcatggtgagtagtttctaaatgagaattgcaaataggacatacctcatctgtaatgccctaacaataagaatgccacatactgcgactaatcatatactaatcccgctaaaccggaatctactagagccaagagcaaaaattaaactttaaaaatacagattaaaaataataacttgtaa

SEQ ID NO: 319164 - DNA, 1022 bp, Cannabis indica
tacaattataaagtgtgataaaaggcataaccaccaagtaaccgtcacttagttttatccaataaataattttgttctccgagaaaccttcctaaattatgctgcttatgaataacttttaattcttcatgtgagtttttttaagttcatctcgtattttaaatatttttacgtggtgactcatctcatcttcgtatatctcgtattcatttcaatgtccaggctctatacttagttatctttaagatgattataacatatgctattttattctcactggctctctatttaacaattaatatcttttgaattacctttaattatcttataaggtaagacttaaatataaaattgcttctataaaaaatatatatatgtaactgccaatagttatttttcgagacattttaaatactatatttataatatcgtgagattagtaaatagattagcaaccttaattaaattaattaattataaataaggaattatgttgttatataatcaattatgtgaaattatttgagatttactgtatttaaaaccccatttatgagttaggggcatttacataattttggcccgagaaggttaacatcataattttgttatatattgtgctaatgcactatattattatagtatatttattttgtctcattgcatgcaatttatgataaattaacgcagtatagtcaccatcgagtattttagctcgaatcaagttcggatctaaaatttattaacttttttgttagggctataatttgaaatatatgtgatcatatgaatataagtgtgtgatgtaaaatatcaaaaatgcccttacttgttaaatgtgaagagttatacgagtaaggcataaatgtgttactcagtaactaaaattgagaccctattaagatcttatgtataaaagagacgtgtgagcgtaacacgtaggtctatgttatatagacattagatgcaatggcatcattgtatatgagataataatatgatatatatgttggaaatatttt

SEQ ID NO: 319165 - DNA, 692 bp, Cannabis indica
gatatatttcttcttaagtgaattattttataaaaggtaaccaacggttatcttatcgatatcataaccaattgatctaaaaattgagtattatttatactcgaaaagttaaaggtaacacaaatataccccacaaatattactaaaaataaagtagtatgaacgtttcttaaacaacaaaataatatattctaatctaaaaaacacgtaattttaaaaataattaaaatgttatcttttacgaaaaaaaaaaaagtaagaagatatatatttttataaaagtaactcattaatatcttatcgacatcatatataattaattgttaaattaatatgtttataaattttgctaataaactatgttgtaagttctgtataagttattttttaataatttatcaaagttattgtataaaatagacttatttaaaatattacactgtaacttttagatctaaaataataaaatattttttaataatttttggaactggttagtataataagttttatttaaatcatttagttactcttttggatattaagcctaaaaagaaattgcaaagaatgcatgtgtaaagttgaataatatataggatagatggttgcataatatataaacagtatttaaggttaatatttgtgtgtaatgttattcttgtcaataatttgttaattatgtatattattaa

SEQ ID NO: 319166 - DNA, 713 bp, Cannabis indica
aataaaaatgtaaccattgagtagtcgcctttcattaggggtgccaaaatgtattttcaccttgtatttgtattatattttatttgacttgacttatgcgcttcaatatttcctgccaggaatgttaatttatttatgattcacgtccaattttctcaattctaacacaatttataaaaaatatcgtactcgtattgactactttaacccattttattattactgaaaaaaaattgtagaaaaaaaaataaatttaagattctattgaaaaaaacttatatatatatatatctatgtatatactagacaaacgttacgtgcaaggcacgtatacttagttatatatttagattttttttttaagttatttgttttgatttttgaaagctagaataaaagtataatattattttaatagaaaaatatttattttaaagctttataaaagaaaatataatattatacttttgaaaaagataaataaatacacatgctcaaagtttttagaacaatttattttaaaaaaaaataaataatagaagttatttagagtcgatcaaattcaagccaaaacaaatcgaattataggaacacaatgagtattaattttttatctatccacattgtatatgtatatatggaggaggttctaatggttacatttttattgtaaccacatggttacatttttttttagccattggatcactatt

SEQ ID NO: 319167 - DNA, 782 bp, Cannabis indica
tttttatttcatatattctctaatatattattcattaccttgtgcagaaattaagataacatctttcttttttattttcactgagaatattcgtaaaaaaaattatcctaaatattgtatggaccatcgataaaattgcaatcttgattttacggaatgctctacatatcaaatatagatatgttataatattatcctttatttgtatcataccaatcaattatcctctatagatagtctataatcaataaggactaaaaattactattttaccctctaattatattttatctttaaaatacttgttgaactaatgatatttcggtgaactaatatataatcactgaaatgagcgctctaacattaaatacgtcaacttagctcaaatgaaactatcatttcacttcttacatagaagttataaatttttaaatccatgattaacactttcacttaattatgatatcgagtacttcccaagatacaaatatgggctagaccttataacttgaacaacacaattaacttaaaacttaatcatgtcaagagtaagatcaaattaatctaaaatattggtttactgttttgtagatgattaattacaccaaatcactgcttttgttttctcctaatactcctgaaggaattagagtacaatatgtctcctctcttgcaatgacgatgacagaagagattgaaacgtatttgggattgccaatggtggttggaagaaataaaaaagctatatttcgaccaatcaaagataaaatttggtcaaaact

SEQ ID NO: 319168 - DNA, 791 bp, Cannabis indica
atatatatataatatgaataaggggaatcgttacgtaagtggtcaacccaccccaacctttctcacatgcaatcattacagaggaataaaattaaaagtagcactttgcccttcgactgagatattgcatgttggttataacttaaatatgctaaactgtaaaatagtacttaaccacaatatacacaacaatcaaaaaaaattaaactaaaaaacttttttaaatacgaaaacagggtctaccagatgatccctttaagagattgtactaaataaatctcctaaactaaaccacattttcagtctacataggaaaaaaaaagaaagaagaaaataatatatagtaataaaaaagtgaaacattgatatgtgtaattatacatacatgacaatatttgtgaaaagaatgattctcctaacaccaataccattattctcaacaaccttaatattgatttttaaattaataaacactaataatattatagaagtgtcgtgtggggacaaatgaagttagctagctagctagttgaggatcatttttgttataatatttggaaaaaatcagattggtagagaacgatgcaaaattgtaggtgaaaagatcgtcgataaagtatataaagcagggattaattatgagtaaaccaaaatatacttgtttgagatggcaagtatatgtatatgctatactgtatagtacttaattaataattaagagtaaattacatacatacttattacttaattaataattaagagtaaattacatacatacttattacttaatt

SEQ ID NO: 319169 - DNA, 716 bp, Cannabis indica
ttgttttagcagtagaccaggaaactgtttttgaaattttcatgcatatgtctcacacaaaacctattgtcaggactgttgaaaactgtctccactgcattttaaagtcccttctgcatgttactcataaaagtaaatgactatggctcaatggaattcatgtcatcttttagcagctctaaaaaccaactccagctgttggttgtttctttctcagtgatggcataggctactgggaagatggaatttgatgcatcaatcccaattgcagcaagtaagatacctttactgcatccttttagaaagcacccatcaagccctaaaagtggcatgcatccttgtttaaaaccctctttacaagcatgaagacacacataacacctttgaaagattctatggttaccttgcatctcacatttaaattgaatcttataaggggttgttgcttcattctcttcatcactgtggacacttcccatttcaacttcatcaccaatatcactttcatcagcattatcatgcaccaactcggtgtgacttccccaccaagaacaattctcaggttgcacattctcattcaactccacatctggttcaccattatacttttcctcatgcatttcaaactcaccttcagattgtggtgttgtttggggtgctagtgttggaatttattttaccaggatcttagatctactcacaagtatgttgattaa

SEQ ID NO: 319170 - DNA, 1009 bp, Cannabis indica
tttaatggtttaatatttttaaaattaatatttatagttaaatttgtttagtactcatcaatgggtaatactcattaagaagtattctatatatgtatatatatataaaactaagatatatataaatacactttgtctatatatatttaaaacctaaaaataatatatataccaaaaatctttaaaatataaaaaattacagatccgaaatctaaaacaaaaaaaaattacttacatgaaatgtgttttggtggtattcagtggtagtgataatcggtggtgcatggtggtggtgcgtggtggtgagaagtgctgaagaagaagatggtcgagagaagaaaagaagggttgaagcgaaaatggggaaagtgtgtcggggtatttatagaactattagcggcggggtccgccgctaataggcatttaatgtttttattttttattattattagcgatcgatccaatactaatgtcctcccgctaataatattcaaactgaaagggggagaatttttctgcctacttattagcggcagattattaacggtggagttcgctgctgatactattagtggcatataatagtggcgaacccctgccgctaataattattatttttttaaaaaataaaaacagactattagtggtagaatttagggttcaccgctaatactgttattatttgcaatgaatttggtttgtcgcaaattgataaaattattgtagtaaattacgatataagtactcaaagttttgtatttgtagctgacacaaattcaataattttcttttttgttttgattaattaaaagaaaattttaaagtaacccatactatatgttttcatctatatctactaatttagaatatagttcttacatttgttaaaatattatcaaagtttatactgaagaatatcaaatcctgtttatactattaaaaagattattaaggtggcgtttgataacacttttttaatcagttttttgtttttaaaagtagaaaatta

SEQ ID NO: 319171 - DNA, 1198 bp, Cannabis indica
taacaccaatgtttctaatccaatttttttttcattaagataagaaggaagagttggaacaaaatatcatccaagtttgcttaaaatatgaaaaaaatctcactagtcaaaatttcaaaagtacacctatctgagaacttctaaaataaagtaacagcaataaatcaaaacagaacagaacccatctttctagtaatgaaagagccttaagcctctgtgattggatattcaaagacgacatccttacccgtaagcttcctgtaaacacccgataatgtctcgagcttgtactcggtgttgttgcgctcctttggatccaggtaaacctgtcatcaacacacattattataattatgcgagaaaattcataatgacaaatttatttactttcaaaaaatatttttaccttgattatcttggagccatcgactcggtatctaatccgcttcccaacaatctcagcgggatgaacaacatcctctagaatggcatcgtggacagctgtaagtgtacgggtacgaggacgctgggcagcagagcctttctttggtggcctcacaatccttcgggttgcgacaatgacaacatcctgttatgtgataacaaaagaacaccggaaattctcaaaaaaccatttttttatgtttcatttacaattttacaaaatcattactacaaatacaaaattctaagcacaaaaattccatgttgaagtatttttgttattttttgtctaagcataaaaatggaaactttccatgactatcgaaatcatcataataaaaaacttgaataatttacaataagttacctttccactgaactttttctccaactcccgaacaagacgcaaatgaattttgcggaaacctttcctcaatctgtagggaacatagataacaacagccttgcggtttccagagatatctacttggctgttaaaaataaaaataaactcccttcatattagtaaaatttccaacaaaaatatgaaacaaagaaccccaaaaaaaattcattctaaacatacatagctgagttgatgtaaagatctttcaaatcgcttttcagttcctggttagtgttctccaaatcgaaaaggttctgcatcatatcaacaccaataaattcagtatgataaacactataaaacaatacaaaaaatacacacacacatatattatataaatatatatta

SEQ ID NO: 319172 - DNA, 1836 bp, Cannabis indica
agaaaagacttttgtagaagtgatctagtattagtaaaggtggtacaatttatgagtatttctcggaatcttaagtgaattaaaggcaacgattatgtgggtcaatatatttactaccaaaggaaaaatgagatcaaaagggacatgagtcaaactacgacagtcagagcctcgtgatctgcaaggaatagaccgggagctatacaatcccacattgcatgggtgaaggtcgtatatgatgattctaagactatgtaggtatgggactacattgttgtaagggacttgaatggattgattggggccacctatatcaacaaggtgtatcttgtttttggtagcctatcacgaaagaactctacgattaggtgtccttgacctaaggtgatttcattttaggaaggatgagttcctgaaagttttcccaagaagcgtgcgggtcagttgaaagcacgttgggaatgatcgagttgacctgaagggtcagtcatcgatctaagaagcagctagagtggcgcacctatatataaaagccaatattctatgggagaagggccaatagaggcttaaagtagggatgttacaaaggtaatgtataacagaacgttagggagagtagtggtatcactgaggtaaagaagattaccttaattattcatgatgatatggtaatgatggaaaatactttcatatttgactggatttacaatctggtatacgaggttgtttactgagttttttgaaaactaaatattttgagagaataaaggaaataataagcgataaatagtatgaaagtaggcttttacgtgattcaggcattaatgatccttagtccacgagtcaatattattagccttgtagggcgaattgtataagattataatgtattacagtatgggaattttttatgttgagagttacagccaggtatttttgcagggtaacggcagatgaaaagtcttgcccctcctcttcgaaagaaccagggtttatatacgcacacatggggtaaagggcatgccctttacctacctagggtttcgtcttccacacgttactaaagctagtaccatgggaaggacgatctgaccatccattggtgggaaccttcatcatcgtgcggtttagagtgactgatgagaggccttgtatggcttaggacacgtgtcgtgcaaaggtctcccctttacgaaatagtcactacataggttgttgggcagaaagcgtgctagagggtacgtacgcgcactaccatgggctggcacaggggacaagatctaatcatgtgttagaaaaaggtgtaaccttctttggagcgccattttgtaaggagttgacgtgtcctgagcttctagaacctacatcgctgttcaaattccttgctaaaggagaccactcccggtaattattacctcttaatgactcccaggtccggaagccatttctcttaattttcctgggtcccgtgcggaaatcatgtccctacctcgaacgactgatgccccctcgtctgctccaatagactgatgccccctcgtctgctccatctctgtcacaacctcagctacaacaactgttggaaattattttaccaggatcttatatctactcacaagtatgttgtttgacatcctaaatatgaactttctactactctatcactaggggtttcgaaactatgaagaagaaaagagagagagagagagggtcggctatagagagaaagtggaaggcttagttttctgaaaaaggcagtttcctgaattactgaataattacttattttggtgtgagccatcactttctatttataggcaactactaggtttaggt

SEQ ID NO: 319173 - DNA, 1654 bp, Cannabis indica
aagagcagtgggcagtggttagactcgttaagagataagattttggggtaagatttcgaacctattttcagtcttctttttttcttttaatttatttttttccttgggttattggactttctttctttcttggtttgggtctattattgttattattattattcttgttattggtaaattttaaaaccaaaaaataaaataaaataaaagaaaaataaaaagaaacggaagcccacccaccctaagccgaacctgagtgagtgaagtgtattgtggtccgtacgtgtagaccgaatataatggacacttcattgtgttgtttatctagtgggggcccacttgagctttgctcctaatttctctttttatcttcttagcccatttgttgtgtccagcaacaaatattttatttctttcttcacaagccctgatccaaccatgggtgtatactgtatatatagattacatatatatatgtaaataaaattcaaacccagttgagacaagttcttttgagagacatttttgtttgtttaattttatttgaagatatattaattaaaaaacgatttaattaataaaatttgcaaaattcaaacagtatatatatgaggaacaagtttatgtaattttataaaggtactctttagtggactaatttattaaatttagtttaattatttgtaagatagaaaattttataagcttgtataattttattgagatttttctttttttttttaaatgaatgttgatctagttttagtttggactttttttttcttgcaaaataaaaagaaaattggaatgattgctattaagaaaattttgcttatgataatcatgtctcacctaccggatttgaatattaaactttagcaaatgcttttctctctttttttttttttttttttggcgggttcaaaattaagaaagataagtaagatgtcaaatcatggtatacattataagtaggttcgtatctatatcaattcaatatatagtatgtgttggagaataagttttatatttagacaaaatcaagattaacaaaaaggaaattatagtatgttaataaatgtgtttttcataacaaaattaatatttttttttcatattttttagaattagaagtaaattagttaaagattatggtacaactatattagttttgttaaaaattttgaatttaaaagttatatcgatgtttttaattttctatgtgttgttgtgagctgttggtatataaattttgttatacagtatatttttattttgatgtatagcatattattattcttagatcatatttattttttatttcactatgtataatagtagtatataattttgttagtataatacaaatattttaatatatatataattttgttggcatgctacatatatttaattattatttttattatattttaattgtatgatatatttattttaaataatatttaattaatttctattttcttatatacaatggtggtatataatttgttatcatgtaataattcctatatatactagtaactagatagatgttacttgccaaatcacgtatgttaattttatttttagttttttagtttttttaaattatcataattttaaaattaataatattcaatgtaatgataat

SEQ ID NO: 319174 - DNA, 591 bp, Cannabis indica
aaaaaaaaaaaaaaaaagttagcgtttttttaaccttgggcaagacgaaagtggctcggagccgctagatttggcttgaaaacttcttgtattagccggtagatttaattagtcataattcaacacgcgcttacagtgcgtttataaatcacgcgctgttttcttggtgagcagtgagttgcagagctttgaagtgagcgtgagagaattttaggcgagaaatacggtgggtgaaggagcggacgtgtcaaagttgggtttgggatattgagagagaaaatgaggatgaccgtatgtgattgttttaccagtcgaatatggaaaattcaattgaattgaaatgagggaaatgttctagagtgttctattagggcccgtttggttggaggtaatgaaagcaatggaataggaataggaataagaataagaatggtaatggaatggaataagaataggaataggattaggttgtttggttagatttatggaatcaataattgaatacaattcttatgtttggttgactatataatggaatggaatggaataaattaattttgaacaaaaatactattatttttaaaacatgat

SEQ ID NO: 319175 - DNA, 1431 bp, Cannabis indica
atctgaatcattgccatttgcttgtctagagatctggaacggctccgcattcaaatacaaaccagaattgtttaataaaaataacaaattttaatgagtttgcatcgaaagtagctcaagtttttactcactgaattgatttatgggtcttgtgaatttcgctcatcacttccttttcttgtacaggcttctgattcaaatcatcaaaaacttcaaaactccaataaaaccccccggaaaagtacccaatatatacatatatatatataattcaaaagtaccttcttggttgcacaatcctccgcgacgacttgaagctcctggtcatggcgatgactggaaatgagttgattggttgactcgaggtggcgtccacattctagaagactatcgaaattcaatattcagaagaatcattatgatgaaaatgaaaaatataaatggattgaattggatgatgaaattgcatagaaaagagaaaaggtacctgatagtgatgagaacgccgaggaagaaggaaaacatagaaacgaatggaatccatttggcggagattctaccagagctccgacccttcatttgaaaaaaccaaagcaagaagagagagagaaggtcctcttgcaataatagtaagaggaatttctctgtttggaaaattgaaaatgaaactgaaaactgaaaaagtattatataacagaatttgatttggattatttatttatttatttattttatacataaataaataaacccgcctttggattcgtattaataataataataataataatgatgaaaaagaaaggaaaatagaaattaggaccaaccaaaaatagagtttggggaaagaggagagaccatttagaccaatgctattgatgtgactattgttgttatttttgtggattggttagcgatattttttttaaattatttatacaagttatataaaatttgatacttaattacattaatagtataataccgaaaaaaatactaaaagaaattctggtattggtgtccaaagtagaaaagagatatgaaaaattggttagttggaatgtaattggttattagttattttgttaggaagaggaagagactttggtttgttgggtttacttggaaaagtttattggcgtggacgacagtcagtcacgccacttcttatgtttcatttcattctcattttcttataatcagccaatcacagttttaattcacccaaaaataaataaataaataaatgagagttttattaaaggaaaaacatatgataataaagacactcgtacaatgagtttggtattttacttaaggaaaattttattcacattttgtaatttttttttaaagtatatcttcatttcaataatttttatttcgtatgaaatttatattttaattttattaaattttttaaactttttt

SEQ ID NO: 319176 - DNA, 2267 bp, Cannabis indica
gtagaagccattatcatgaccaatgcttcttctatcataaaagtagctaaaatcctcgactttgcatgggttccccttgcgtgtattccttatacatcacgtagaatccaaggattatgtgataactattacggataagttgaaagggggaaatgtcatagtgcgttaacatggcctttacaaatgggtggaaatgaagtgtcaccccgcattaaagaatgagaataaaaaccacaacattttgagtggggatgatcgtaggattggtgaatgggagatgaggtcgctgcagtgacatgggttttgaggtagtagtacgaataagattcagcctctcaaagtggtcaattcagactttttaaccctcgagactaggtcctcagaggaaaaaactcatctaattgagcattatccactgaatctattttgctaccctcaccatctgcctcatctccaccttcgcaatctggtaattcaaagtcctcgcccatctcttcaacctccacgtttggggcaatttgtggatatgcaaagttaccttgggcggacaccgtggaatcactatctcgtacctctaagaagataggttctgctaattcttgcaccattcgatctatctcatcaatagatagtgagccttcttgagccctagccctaggagtctcatctttagatagcgaggtgggtatgaagctatcactctttcgagattcatcagcgaaagctccctctccagagttgtatctctggctgtctgataggtctctcatttgaaagatataagatcttttcagcatggtgtgagtgtaatttgaacagaaagtgttctcatccaaattaaaaaaaaaattaaagtaaagtttacaaaactgatcatctgtctcaagaagtggcttggtgtttcccagtatcctaagggtcatgcgactacatgaacattaagttacggggagacactcaccactttgagaactcagtaagctccgatcacaaatcaaaaagcaagaagagaaaaactaacagcatgtctcaagaaataattgagtgtatcccaatatcctaaggggcatgtgattgcatgaatattaagttaatgggacacacccaccattttaagaactcaaataggtttttacaatcaactaaagtgaatgtggattaaaaacccgaagttaaacaaaactggttacatatgacctaagagttaaaactctaagacaaggtcaagcagttactctaggttaaataatttcaaaagtgcaagcacgcaaaagggtattatcatagagatgcgagtatttaagagttcatcatgaaacccacgagtattcaagtttcaagcacatattttccagataaaataccatattctgcctaaacttttaattttatttataagccctattcatttcatacattttctacccctaaaacccaggatgcatatgaatattcaaggaaaagaaaatgattacatagaagaaagttactgaccttcaacgtaattctttttgggatgtttcttgtagatgatcaagtcttcgaaatcgtcctcaaatagaagaaatttgaagcttaaaaaaaattaaaagattcaaaattttagtatggggagagagttgaaaatgagaggaaaaatgagtaaggatcatttcatatctgtggggattaaatactaatattcctcatttattgggatatagacacgtggcaagagaatgcctaaggtctcccaatccaacgatctccagcacgcctgcacataccccaaagggtttagatgacgtggcatctcagagaaataaagtaataataacagctgtcttttcgaaaccctcaataagacaaccaagagtcacagtctcatgaaaataactcccctgcctctctatcttagtttccctaatgacatagctgtaaatcgcataactaggggcatgtgttatagtgcaattttttcacctacaaactcaagaccaggctcctataaaattgacacgtggactcacatccctagaggactgatgagctgtcaagaaggaactcctcgagaattaaccttgcctgaactaaactcgcaaaatgatgtgaccatgacaaagtctagtcgcaatattacgattcacgtaatatgaaataagtaagaccaagaagggtttatacaagtcgtggatataccaagtgttgggttttatgccctaaataaaactcatttcaatataatcagatttacttattaatacagatcagaaataacatttaatgtt

SEQ ID NO: 319177 - DNA, 1054 bp, Cannabis indica
agaacaggtcacagtgatgtggtatcagttattgaggatgaaatagtggaaccacaaacaacacgttcatgggatttcttagaagagggaatgcaatcaaaatggggtttggctaagcctgtcaccagcaacatgattattggggtcattgactcgggtatgtaatacgtacacacgtcgtataataatatatatacatcttattaaattatattctcatgtcatctacatattattttgcaagattattatacttaatagcgtaaaataaagcaagatgaacaactcattgacaaggttcacccctagaaacaaattctaggttactatgttcttgggtcccctaaagaatgagggtaaataacatccaattagaattaaggttacgttacaatttccagtttgtaaattaattatagagtgtaaagcaatacaacattgatttttacaacaagtttaccctaggatcttcatagatcaatcaagatcacaatctatgtccacttagattcaaagtcaagatccccttgattcggttctgttgaacttccttcatcaacacatctgaaatcccttcaggttaaacaggttccattaccactttatccctaaagcttgatcacaattaatggagaaacttgtaacaacaaagagaaggagagaagaagaataatttgccctagaagagcaaaatcaatgtcaaagtttctaccaaaatgagagttagttagaatttgttgaaatcaagaatgtatagtattggtactccactaaccgaccctgaaactcaaaaaaccaaatcatcatagatggcaaagatattttatctttgaatgcacgctgacctggcaaagtaaggaaactaaacccacaaaatacaaacttatatggaatagatgacactaacacatagtttgccaaactaaaaactatggtttttacaattgggtgttataaatagtattaattatgtggatgtccaaatcttttatttattaccattaatgtaatcaacattccctttttcttagtttccctttctcttagtttctta

SEQ ID NO: 319178 - DNA, 886 bp, Cannabis indica
ttttttttttttttgaaagagattagagcttatgttaaatgttgtataaagtatacatacattatgggcctgtctgcaaagattgaagcaagcacgatacagggatgaaattgcaaataatggataatctaaggactgtttaggagattagatcttctggtcccttttgccacgtgcctatcaattagcaatcgagatcgattaagactagtggccaaaaaggattaaaaaaatatagtttttaaattacgaaaatacccttttcataccaataataggttgttgttgtattattttacagttagaaaaaaaaatatatttaattaaataataataaattcaataaaaaatcagcttcagtttattggtacttttcccaaagaaataatgtcggtggctgtgaaaataaaattagtaaattaccatattagtcttaaaaaaaaaaaaacttattatactattaaaatgaagttaaaaaatttgacaatcttctattgaaataattatcattaattaaaaattaatagataaaaatacttgtcaacagttattattatttttttatatcaatttatcattatttttttaataaaaaagagtactttaaattaatcctataaattaattaaaactttgggttttgatctagagctttgtgtcaattcacacgccacacccaaccttaacataataataaataaataaataaataaaagcccaataataataatactaattaaaaaaaataaaacccactaataataataataataataataataataataataataataataattaataaataaaacccactcacttgtatagtttgtgtcggtcatacaaaaatatgtatttatttttttttattcatttaatagat

SEQ ID NO: 319179 - DNA, 806 bp, Cannabis indica
cttcttcttctatctttttctctgctaaaaaatttcggtgagcttattcctagagaactcagcaatatcagagccattgtctagcctgatatctggaaagcaaatccagtaccatctttggttaattgcacgttacaccacaacactgtattgggtgaggtggctaccgatgtgaacatagcttgaatcaggaaatatcccagaaaatccaccatgggcaatcaccacaggcaattttcttgaaattaaaaacaaattttttcaaaaagaaaaagtaagagattattatcttaggctttcaaaatcattatgtgtattgattaattacaatccagagtgttttcattcaataaaaaataaatctccacctagtaatgataaaaggaatattttaataatcttaatgcaagaaaaacgctgactgttgagaaaatctctttaaccaagataccaaacaaacaatactcaattctaacagcataagaccagaatgagcttgtcacaaaagagccatagaaacacaatatacagtatcgttaagagttagccatgaagattattcttctcctatctcgaacggaggtgcttgtagtggcgcgattagtggtgcgagtggtggtgcgagcggaggtggggtttgattactgttgggtccgattgggttttcggggttgattactgttgggttcgattgagtttgttgggtttgattactgttggatccgactgggtttgtggggttgattactgtggatagtggctgtgcgaaaggaggtttaggttagggttttttttagccaagaaaa

SEQ ID NO: 319180 - DNA, 1368 bp, Cannabis indica
aagttgccaagatttagtcctttagacattgaaattagatcaaacgcgttcatagctgctggttgttcttccctcttttccatcacatggtgctcctgttatatgatcagccatgttatatcacaggaaatttgtttttttttcctaaaaaaataaaataaaataaacaaccatctttgaaacgtacttctgaatccttaaacacagcttctacgtcatctaagtttgtatcttctttctcatcaaacacaggaggcttgtaatccttcttaaaccattcatcttccaaaatttctggtatagtaatccgctgccatagacagtaaagtattaagatatgaatatcacacttttgacaatcctaaatgtaaacatagacagtaaattctatcaatctccttccataccagtaaattcttctagagcagttgaaagctattctaggacattttaactttaaaatgcaggaaatgagcaacatatgcatggagatacaattaaacatactgactatacttaacaaaatcaaactagtgcttatgatggaacattttgtggctcaatggctaaatatctaaacagaaaagcttaatctatgagccttggaaaaatagcacctacacaatagtattgtagtgaatcaaaaaaattcagaaaaagaatagatggggcacatagaacaatacattttaattcttaatttgcagatttctcagtttgtgtccccaactgttgccactaaaaagagaagataaaattctgttactcatagaattaagcaattaactaaaaactccaatgctcaatgccaatctgcatttgtaatatgatagcggtttcggttaagccaaaggcccaatagtaaactccaaatgataatgcaatataaccaaattgcatagattattctccactaaacaaatagctggtaaggtaaaattagaggaatcttttaaccatgtgcttctcaaaagatttgttcttcagttgatagttgggaggttcaatcctatagggtccataatctacattgtctgcatcatttaacagtctcaatctagcattaccagcagtaaatcctacgatgctcacttttttttctttgtaaggtattccgagatgttcgacagtaactccttagcagttctcctcacatcaagcatttgataacaatgtgaaaatcaaaactacatgcatttagggcttgtttggaacatcgtattaggtcgtattgtattttattgtattatattgaattagattatatatcatatttttgtataatactatgttaaattttaatttatactaaaatattatatatttagatgctcataaaagttaataccacatatagtttacataaaa

SEQ ID NO: 319181 - DNA, 1672 bp, Cannabis indica
aggtctctcaagactcaggagaacagtaagagctatagaagaagtgagagcaagagcagcaacaaaattctgaagatctaacatggaaactccatgttgatggaagttgcactgaccaactgtccaatgtaggtatttcccttacaacacctaggggcaacaactgtacgaagcaatcaaattcagcttcaaagcctcaaataatgaggctcagtacgaagatctaatagctagcctcaagctggcacatgaagtgtgggctgaccacctagacatattcagcgattctcaactagttgtgaatcaaatcctaggtgaatacactgctcgaggtgacaaaatggtggcctacttgagcaaaatcaaagacttgttaagttggttgaaaggctacacaatcaagtagatccccaaagaatagaatgcaacagtagatgcacgtgcctgcctagtgagcagtaccatagctgacaaagtaaacctggttcccatccagttcctagaagaacccagcattgtcatcccagaagagatcgacatgctagatgacataccaacatggatgacacctattgcagcttacctccaaaccaaagccttgccagaagacaaaaacgaggaaagcaaactaagaagaaaagatgctaggtacctgaacctagacgagataatgtacaggtagagtttctctatacctctctcgaggtgtgtcaccaaagccaaagctaaatggcttctgatagaactgcacgaaggcatttgcagaaattatgtcgggggcaaatcttgtccaaaaagatactccaataggggtattttttgcaaacaatgatcgaagactcagtggatatgttagaagatgtgacaagtgctagacattctcgaagataccaagagctccacccaatgagctcacgatgatgcagtctccttggcccttcacggtatgggggattgacctaattggtcaactcccaaagggaaaaggaggggtacagtttgctgtcgtcgcagtagactacttcaccaaatggcaaaagttgaacccctggtgataatcacctccaagaaggtccttgactttgttgtcaagaacattatctatcggtttggccttcctcaaaagattgtgtcagacaacggcaaatagtttgacagtgacatgttcactaatttctgcaacaaacatggcatcatcaagagcttcactgtcgtggcccatccacaagcaaatgggcaggtagaagctgtcaacaaaaccttgaaggacaccctgaagaagcaccttgaggaagcaataggcaactagcctaaactgctcccagaggtcctatgatcgcataggacaagtgtgaagatgaccactaggcaaactccatttgctctagcttatggctatgaggcgatgttgcctgatcgccgaggtatttgtgcaaataggtataatccctctaatcacagaaattatcaaaatgaaagaattggcgataatacctataaatatataaaagaacctagagctagtgccaccatcttacagaagaacaacctatgatcactaatcaaacagcaccctgttggaagagtcccttgacgaagtggaagaaagaagagaacaagcacacctaaagctgcaggcctaccaatataaggtagcaaggcacttcaacaa

SEQ ID NO: 319182 - DNA, 1211 bp, Cannabis indica
taattattgggtttatttgttaacggaagatcaaacatattaacatcgttaaatttaacagaatattcttttatttttaaggtatattctgttaaaccaagaaaccaagaaatgccgttagatagacacttttaatatataaagatattaaaatatataacttacggaattttcctattctctcccacaagttaagatgtgttaacttctcagaaaaaaaaaaggttaagatgtggtaaaaggtaattatggtccttcatacattgtgttataagatgaatttttcacataaaattttaaataggaaaaaaatgacgtgtcaagaaagttaactgacaaggtatcctcacataatagaagtgtgtgtaaaagtaaaattgacacaaagtctagtcgcacactatacattagagaaagaagatagagagaagttaacacagtagcgacatatatcgaatatatacgatggatcagtgtttctccccgtgccctatgtaaagaccgcatctttatagtgattaatccaaatgatcatagtaagcaataactcttcatagacccacgagtcctatatgttgtcagtacatgaatgcccaacacttgatcgatatattcacagtcatttcataattactcagtgcgtttacaagactataaaacccagagaggttgttgggattttatgccctaaataaaattcattttaatataattttatttgttataaatagaaaattagaaatcatttatgtttacatgtagttttcatatttaaggtttaatatacaatttatgttaaatcaagaacatatagttattcacaattacagtgatgtcaacacaatggaatgtaattgtgattatatgcttcaaaagttaatgtcccatgattcatcaatgcactggatttacactgatgtgatagttatcagtgcagcgataaagcttacttacaccttagataagtgttatgttctttttaggacattgacaaagtatactagtatcgaatgtatgaagtatacattggactgagaccgatattgatcttggtaatgatattataattttaccattgtatctttctaagtcaatagatcaaaagatcttaatccttatacggttaggtcgatctcaagagtgttatttatgttctttgatttgttcattgaaacccatacgggtgaacacatacattttgggaacatgat

SEQ ID NO: 319183 - DNA, 772 bp, Cannabis indica
ttaccaaacggcacctaattttaccttttcagtgacaaatgaaaacaggttaatcaaattattttgtaaaaataaaaaacgaataaaattaatatatgacactactacaaaacaacattttagaggttgttttttttaactctttttataaaaaaagaaacaaaaaggtgtaaaaatacccgcctaataaaaatttacatttagagacagttattttttaaaaaccatagctataacattgattaaaatcattttgaggcggtttttaatttgagaaaaataacacattatgacgtcgattatttgataataaccgacaacatagattgaagtaatactttattgacacgtgctccctatggcatcggttattttcaaataattgacgccatggggttacatgacaaaaccctttcagcttcgtcccactgtcttctttttctttttcaccacgaaacccaaccaacccaccatcacagaacccaaaccccacgaagaaatcctccccaaccacctttaaaaaatctcctatctccactatttcactactagaaaaacgggttttagtgacacacattgagtaactctaaaactatatagtgacacttcaacgcgcgtcactaatgagggtgattggaaagacagtttttagtaacacttcacacgtgtcactgaacccttttacattcattttttgcgcatcactataggcgtatagagtcaaattttgtcagactgaaaaggtaacagccacacacatgtgtcactatat

SEQ ID NO: 319184 - DNA, 710 bp, Cannabis indica
tggaaccacgttaacacgatttgttacttattacttattacttattaatattacgaatgtaatatataaaatgtacgttatggcttctatcactacacgaacaataatatcaaggttaagtgcctaattattattatttatttatttcttcatgtaagtataattttattatagctaaaatttatgggttaacatgactatttgaagaaggtggtaactttatatatgtggttgagtaaattttcctaaaacaatagaaattagattatcacaattgaatgaattcttataattaaatttctagatccgatgccttaaagagagtaatttatattgtaaaatgaattcaaaagttccttaatgttaagatgataaatacataattagcggttttaatatgaattaatctcacattattaatacataaaaatgatactttatataagattcaagactactttttttattattcataagtttaaatttaaaaaataaataaaaatttaaatcaataaataaataattaaaaaaactcggaacctttatattggaccaaaatataactttttattctcatatacatatgacgattatatatgtacatattatattgaaacacctatcccgattcctaactaaagttagtccaattaacatatctttatatattaaaagtgtctatctaacggcaattcttggtttaacagaat

SEQ ID NO: 319185 - DNA, 530 bp, Cannabis indica
tacaagtaacgaggattaggctattaccgaactgctcggggctgaacctctataaattcttgtgtctttatattgctttatcatatatttgttgctataaattacttatcgcttataaaatagactcgttgtcattggctaaaagcgaggtcaacagaaattttcttaattttgattttcttccttttctttcttaattatctaacctattaatagtaataaagttaatattaaatccccaccttcagctagaatgatccacataagataaaaactaaaatactataaattgactattctacccctccaataatacttaggctataacataacctagggacattttggtcatttctaacttccccaattcaacctacttctcactattataatctattctgatacaactccaataaaacacaacttaattgtaacaccataactagcatagtcgtattacgtgatttttaaacatactgtgcagctcgttgctaatcaacgagatttatggaaatcgtgattaattaaaa

SEQ ID NO: 319186 - DNA, 1004 bp, Cannabis indica
aactatagctgcatttatctctcaccacagtaaattatgaattaaaatttatgtaactccatacaatgttaccctttatttgaatttgaatggtatttttatgtctagattattcaaataaaaagttgagattttatttttcaatatttaaacctagtataattttacaaaattgtgacaatcatcatataacaataagtaaaaaaaaaaaaaaaattaaaatctcttacaaaatttttagaatttttttttcccattaatgttttctcttctttcccctccaaaaattattggtacattataaattcaagatgtggaaataaaactatattatataacaatatttttgtgatgatacaaaaagtgtattgatgattaaatattacacttttttattctgactgaaaagtaaccatactagatttttttttttctttgaaacactgtagttccattattcaagtttttgtgatatgtatatatatagttggttatttgacaaaatttctttcttttttgatacttaatgttcacccataaaatgacagaaaggataaggaagagataatattatatctcaattcattatatgttttgtgtcgacatataatgatatatttcgaatctttactatataataatatttatacacagatagacaccaaattaattttaatatatatttatatctttatatataatatacacagtattttgttatataatgcctatttcctaaccccaaaagatgaaatatatatacaatatccaaattagagcatgtaaatgttagacatttatatgtataaattgaaatatgtatgtttaagtataaagtgcggaattaatcaaacatatatacactataaataaggatcgaaatacctccagccattgaatcttgagcttcaaacccacataagctttgatctgcaaaggaaattgactaccatgggtaatcgggcttcctcgctctctcaactctctttagatggaatttgctg

SEQ ID NO: 319187 - DNA, 1535 bp, Cannabis indica
caaatttgatagtctatgacaactttagataattatgatgtgcttcaaacgtactataaacgatcgaattgctaccattataaagacataatttattattaatttaagttttaaattaatttaataatttataatcttgttttaaacgataatgtatgaaacaattatactatacaaatttcaaagttgtacttatcgtggtggaaagtcttatatattgtattacatgaattataacaatgaacaataaaataacacatgcattaataaataacattcaaatgaaatgttatgactctttgtcaaagaaaagcatgcataataaatttatgaaaagttttgcattataaatagatctgaatgatcttaattaccgttgatctcatttaaattggatagtatatgataattttggataactatgagatgtttaagacgtattgaatgattgaattgctacccttatattttaaaattaacaattgcacaatataattattgtcccaaattttagcctgtatgacgtgcaatcaaaattgtaacatgtagcaagacaagttatcatttaagattgtatctagtcggtacattaagattgtacatagatgtatttcccttaatgacgagttgtcatctggtcgataaggagacaacaaccttataaagaagcttgttggatgcttatattgaaggattgatatatgcttgaccagtatatatgttttgatgagaaaaaagctttatctaattttttctggccaacttgatgagaaaaaagctttatccaatttttccaagctcaagagagatacatcaaagaactcgaggctttggaaacatcgagcaacaacaaacaaaaacccctttggtggatattgaagcccaagcatcgtctgaatttaatgaacgtacgatgcctgttaagaagagaaaattgaattttgaaaattcatcgttggggaaaaattgaacctctttcttagaagggtgaagtctgtggttagagatttcccgcatggagtgggcccggtgggtgatgagggtaacgctaatgttattcgggttacttctgttatgtcagaggaacatttgaccagtgatgaagtggaaagaaataagtgcgacaatgtggatactgcttgctcccatcaagctggcaaaccggtctcttaggggcacccagctatacttacggcgtggaaggccaaggttcgcttgatggaaattactatcccttccaaggaggatctggtgatcgaggataagggatctacgatacgtctgacactaggggtgttcaacaaaatttataaattgcccaactcaaataaaccgcccaaaccaaatcgaataaaccgacaaaaaatacaacccgaaatgatacaatgaaaattcaaaccgcccaatgaatatatttggtggtttataaattattctaaaccgtccaattaacccgaataaaccgaattaaactggtttatatatttttttaataaaagtgtatataatatattgcataaattatatttattagt

SEQ ID NO: 319188 - DNA, 2879 bp, Cannabis indica
aactaagcggtctttacagaactgactgtctctagtccaatctatacagggcgacccatcaatatgttctaaattgagggtagattaacaactaagaactcttgcatcaatgatgtagataatggtggctctcccacagttaatgagagtccaatgatgccttggctggcgacactatcaccagtgaatccacataagctcaccatacaaggttctaactttgcatcttattgtcccattttctacaatgtatccttgtaaaggatatttactgagctcccattatccacaaacactctttttattctcttcttggcgagctgaactataatgacgagaggatcgacatgtggatacctcacgtgctttgtattttcctctgagaatacaatcagaggttctttcatttttgtttttttagtggttcttgagaaaataccaattgctcattctttatttcattgacatatcttttctgggcattattactctctccattgagatgcgatcctcttgagataacccatatatcctcgccctcaacaggggaggttgcaatctttggttatttgggttgttgggctgattgggctggtttggctcgttctcttgacgcttcacatactgtctgaaatatccatactagattaggctctctatctcatcttgtaattgtcgacactcttcggttgtatgccctatgtctttaggaaattgacaaaattttgttacatcttgtttatatctcacatctctcattggttcaggcttgtggaatgcaaccctgtgctcatttgtgagaaagatgttttcacgagtttcattcaactcggtgtacacagtgttaatcggaacatatttgtcgtgcttttttaatttcttcttatttttagatgattctttcgagtcatcctttcttttggtgtttcaaccacttagattatctacttttgtcgagacggtacttgttgtgatagtacttgtgctaggtttgtttcccgagctagttttcagcaacttcttctcattctttgcttcctctttccacacaaacacttgcgctccttcattgaattcattaatgtttcttactggaccaccctgtaagtcatcccacaactcgccctagcttttgaaaggttagttgtgatccctgcttgaagagcactaagctgaatagtgtcattcaaagttctaacctttataatggctgtgctaaagcggctcaggtaagccttaaatgacttgcttgattgctgctttatgttagttagggatgatgcttcaagtcgtctatctctgaaagcttgaaattgtttcttaaaatctttagacagttgtccccaagatgttatcgaatagcgagtaaacttgtcaaactagctactcgccacaacagtcaaggatgttggaaataaaatacatcgccaattatttgagatgttgttggctcacattatggtattaaagttattcaagtgagcgaattggtctgtagtcccatcatactgcgagacatgtggatttttgaatcccggagggaattcagaattcgttatattgggatgaaatggcttgatttcctcatctgagtcatagccagttaatttcccatgttccccatcctgatattttctaaacttatgctccaactgaatgattcgcaactggatgggatccacttgatgttggttggcattaagttgatggagtaagttaggtgcattctgatttcgtcactcgcgaagattgggttgtctttgatttaaatgctcacaaagatccagttgtgttcgctcataatttctcacatatcttgtctctgagtaactctcagattgatagctttgcttattgctcatgcttttttgatcaccataacgtcgaggtctgcttccttctcgcatttacctttctgatttattgtgcctttgagacctcgagtgtcctgagctagaacttgcttcatcttgtaccgcccttctccttcggaagaggttagatatacgtccttcatttaggtacgtgtatacaccttccctctctgatcgagaaggacgttgagggtgtctcggtggtagcccacttgttctaggtagagtcccaagatttctctcgttattacaagggatttcctgttccctagatcggggctatctcgcgtcctcattctagcgagaagcctctggtatatcattacattaattccattggttcataaatccttgcgatctttaaggaacttttggatgttgttctcgattattttgttgttcttccactggaacatactcagtaaccccaggttgttcctcctgggtggtttggagacttccttgatttactcactgtcttctgattcttgaacctcgaggtctgcctcgtggtctctttaccccatgatcaagttaattttgagtattagttccttgagtcgccctaaccgctgcaacttctttttcgaactcaacattttgtcggttagatttggttaagtgttgctggagctatctagtttccaattcaactaatggtacatacctagttggatcatacgcatcctcacttctatgtatatatcttgcagaagtattggtttctttgttcctcccttctgggtttttattatcaccaccataatttctccctaaacgtgttgttttagaagtatggggactttgagaccccattggctctttcctagggtgatgtgtagtttcctcaggacgttttccatcattttgattgtgatcagccatggatagatttgtgtttgtacgaagggatttttctgagttttatcactaaggctctcaatgaaagcaataaactgttagcgcagattttcattaactaaaaataataagcctttacgtaat

SEQ ID NO: 319189 - DNA, 1952 bp, Cannabis indica
gaggctagatcaacaaaggattttcttaatttcatcagattggttattgcgctataaagacaggatttgtgttctagtcgacgatggtatcaaacaagagattctggatgagtttcataccacaccatattcattacacttaggaacaactaaaatgcatcaatatgtgaaagtattgtactgatggctaggtgtgaagggtgatatagtggaatacatgtcaaaatatctaacttgtgaacaagttaaagcaaaacatcagagaccagcggaactacttcaatctctaaagattcctgagtggaaattgaaggatataaccatggactttgtggttgggttaccaaggacaacaagattctataattttatctaggtaatagtggatcgatatacaaagtcaacacactttttaccagtgcagactacgtatacagtagatcagtatgctaatttatatgttaatgagataattcggcttcatggtgctccaaaatcgatcatctaaaatcgagatacaaattttacattcaagttctgggagagtttacagcgagctatgggtactaaattaaagttcattacaacttttcatccttagactgatggtcagtctgaaaagactatttagatacttgaggatatgctacgagcatgtgtattgaacttcaaaggttcttaaaacaagtaccttcctttgatcgagtttcttataacaatagttatcaaagtattatcaagatggctccgtatgaaatgctatatgggagaaagtgtcgttcacctattcattaggatgaagccggtgaatggagatatcttggacccaatgcagtccaaagaattagtgaggctattgagaagatttgagcttgtatgcttgcctcacagagtagacagaaaagctatgcttatccgaagcgtagagatattgagttctaggttggggacattattttccttcgagtgtcaccaatgaaggggattcagagatttggaaagaaaggaaaaataagtcctagatttattggtcccttcaaaatattgtaaaggataggtcaagtagcctattaactagctttaccccctgctttatctagagttcacaacatgttccatattttaatgcttcagaaatatgtgtctaaaatgacccatattctgagtttatgaggacattgagctttagacggacttatcataggaggaacaacttgtttagatagaagaagaaagtgttttagaataagattattttgctagttaaagtactgtggagaaatagcaaggttgaagaagcaacttgggagttagagtcgcagatgcgggagcagtatcctgagttgttgaggtaaattttgagaacgaaatttctgtaagaaggggatagttgtaatatcctaaaaaatataaattatgtttaattggacatattttattaaatatgtaattatatgaatatttgagtaagattataatcttacttaagccaattaggagttaattagtgatttttgagtaaatgaataattgagtgtaatttattaattacggggattttattggaacatgtgggtattatatataccatttttgaaataaatatttttgggttcaacgactgtgaaaactcaatggattggccaaagattgcacgacagaaatagaatggattttattggaattgtatcaaattattttagtattcttctagtgtcagattaatcgggatagttagtattaaccaaagtacccctagattataaactagcttaagtgtagaattgagggtaaatagtaattttgctaggttttaactttttgtcctatttggttttctagtaacctcaggctgaattaaggttattttattaagttgatgtttattagttttagatatttttttaaaaaaaaaactaagaaaaattacacaaccttacctctctctctct

SEQ ID NO: 319190 - DNA, 1529 bp, Cannabis indica
aaaataacaccatgtgcatttttttagcataaaatgtcaaatttccctttattatttatggtgctaccttaagctcgccccttgacatttcacattactattagaaagcaatggtgtagtactcaatgtttgtttaacaattattcttactctttttcttattaatttaaaaaatacttattattaaataatattatctcacataaattaatataaaaatattaatttatatataaaaatatttggtcgcttattttgatttcattcattaattttggtacctatctatataaaggtgtatcaagggatggattttgggtgagaagagaacaaggctggtccatggaagcatcaggtcgtggcactaagggtaagctcagacaatgtaatgttctactgttatggcattaaaggctaccaagatacactcttcacccatctctctgccaattctactacaattcatatctacgaaaccatagacttcatattcaacaacgccccaaccgtcatccaaaactgcgacatcttcgtcctgtcgcccaatgccccaccaagccaacatgatcactgcccaaggacaccaagagaccccaacgggaacaccaacatttccatccacaactcccgcgtaagggtttgaaacctccaatgcctcgttcaagactacatacttgggaagactctggagaaaatactctaggacagtttttcttaagatttagctagatgggtttatcgatgccaaggggtggaccgaatggagaggcagtttcgctattaagacttctttgtacggcgagtatatgaatattgggagggatgcatcgacagatatgagggtgactttggcctaattttcatgggcttaatagttctagataggttgatccttgtacaattgggagttttatccagagtatctctaatggtgtatcatttaactaaattggtatggaatctacacactatttcactctattgacacaccaaattatacaccaaattctacacattggattatgaatatacaccagtgttaatttttttttttgtattctaaccttattttattaatttattgttaaaaataatcttacattttagttctcaaataaaatttatcacaaagataataattattgatttaattaaaacactaatatcttaaaaaaaaaatacaagataacaataacaaaaatattagtattaaataaaataaaacaatataacactaagttataaacaaaaaaaaaacataaataaaaataaacactagtaaaaaaataatttaatatgatcacttaaaaaatcttaactttaaagaatatcaaaatattattatattcacgggccgcctatttggacacccccaagtaggtggaacatgcggcacttgctggcacaccgagctagcaagtcagcctaaacgcgcctgcagacaaacaagttcaaaggttaggcacgatacatgtctctcacatgttgagtgcaaacaagaagcatgagcaagcaaacacaaagcgtcc

SEQ ID NO: 319191 - DNA, 617 bp, Cannabis indica
agagagagagagagaggctggttcaaaaggattcctgaaagcgactgaaaaagagtgcagtacacggtgaagaggagagggctatgttcctctgcaccaaactctacggtacatactgtgttctcttacttttcttttgagtaacacgacgtcgttttaagctgcttaaaactcggatgtgttgcactcatgttttgttttgtcgtttgtcgtttcgattttgcctctatttttcttttccttatccttttgttgttttttttgtcttatttttcttttattcgcaaagttgtcttattttcttctaaattcctttttcagtgagaaggaaagttctaagatgtgtcagtctgggcgttgaagaggcaacttttgtcccccagattttaaatatagagttatagagttatctttatactaaaattctaaccttatgattatatattttgcttttattaattatatttaaattttaaaaaattaagtttaaataaaaatataagaataagtctacaatgcatttctttaaaggagatatactgatgtactctctacttatttcgacattcagaagaattttttagtctaattttttccatattcatatacgttatagc

SEQ ID NO: 319192 - DNA, 1170 bp, Cannabis indica
catttaacaatcataaacactaaatcaaaaactatattatcatgaactatattgcataacaaacaatatcatagtcacctgtgatggtgtctacctaaaagctcccccaatacactacaactcactcacaggaaacaaaaagaaaaaactaataaagtttgcataagttaagcacttgatgatgatgatgatatataatttgtacaaattcactgccatttgcagcataaaaatgttctcactattagatcatttaccacttccctttagggacaaatcacaatttgacaactatttattgtacttacaagaaccaactaaacctttcttacaatataataagagtcggtactaaatatattattagactatctttgtttatcttacaaagagattgatgaataggaagtataatataacaaacatgatcgtcattgcaaactcacctaaataagttggatgatcaggaatatgtcttactgcattaatctaaatgctttctggcagaagacaattacgaaaagaacttgaaaagccaaccatcttttaataagaataatgaaagtctaaaacatatttcttcttaaatccatcctaatgtacatctgctatatgcataggtaatatgatcattttaatttaagaacacaagtaacatgttctcatcatcaaagagcagagaaatacagtacaagttgatatatactacagggccaagcataaatggagcatgctcaaccacaatttactgactgaatttaaatttttaactaaacaaacctttgccatttattatttctgtcttccagatatgattatgagctatacatttgtttgaactagcccaaatatcttggataagcttatgaagagttgccgtttctttttcctttttaataattttacagacccagaaggtaaatgatgaaacctggaagttgactgatgacatttgggataaaaagattgaagacatgaaagctgaagcttcaccagtggttgaagaagaaaaacaaaaaccttaacttctaatggctacccattttctataaaagtaaacatctttccctagtatttagaaattttattctatgttgtttccactatgaaatcaaagggaattccaaggagcaactgcatatgctgtttgaatttgttgggttttatgcc

SEQ ID NO: 319193 - DNA, 659 bp, Cannabis indica
acatgtacatatcatctgagatgtgacaactgaagaaaagaaaaaaaaaaagaattcacaaatggacaaataaagtttgtgtaagtacccaaaaatggcatataaatgacagagtaaatgactcttaacattataattatagtaataggaatcatcaatcatcatagcaattaagtgggagaattatattaagctctaaactctaatgttgtttaacatgtgtcattgtgttgtgcctaatacattgttagatgaattggtgtttgaaataatcatgaaaactgaaaatgattgagtaccaaagcttgcatacagatgcagattctaccaaacatctaaaatatcagagattcttaataatatctctaacaataatatttcatcagagataattaattgacattattgtttctatctttaaccattgcttaatttctcaaatcagaatcattatcaactttctcaacaagttttgccaaggttgtattaacatctgtctctagtatttcgtgtttaccatcaacccaaattgtcttcaataaggtagttacgatcccatctgaaaatctcttcatctcaggacacctgttgatatataatgttgccaaatttgggaaactcatcgcacttattcctgagtagaagctttggatattaga

SEQ ID NO: 319194 - DNA, 2290 bp, Cannabis indica
ttgggaactccaattcaacttttagagatctgcatatcatggatctaaaaattgaagtgaggacagtaattttatgcaaattaaactggatttcttgttgaattttagtttcgtagtagtttttctacacttttttttttcatgaattcgaaacagcctctgttttgattgattctggtcgtcttcttaggtaaggttgcgggaattaatggtggttctctttctagttgaattttcgtttcggttgcgttaggttgctacgtggttgcccgatggttgtccaggaagcatgaatcttgggttgaaggtgtgtgtagtggtatttgtgtaatttttttttatttgagttgtatatttatttatttggccagctagaagtatttttataatattgttatcttttttggttaaaattaaaaaaagccctaaattatttggttgaacggatgaatctaataaattattgtaaaaagaatataaatttactatatgaaattcatggtattaagattaagataatatttggaatccacatttttgaaaggatttaacattaccccataagaggttaatcttatttccatagtaacaatattcatatccttgaaataaaaaacaatctcataccaaacatgggaatagaaaagattgacatccctattaaacattatttcataccaaacaactgtggaaggtaatgtttggaattacctttttgaaaggaatattaccttataagatgtaatgtcctaattcataaagtcgtcacgtgtgtatttataaattagtttataataataaactgacaatttaaataaaattgtgttttcattaaaatttcactaattatttttaaatacaaaatctatggcatttaaacttgtaaagttgggaaaccccttttaaagtattacaaaagaaatgtcattacagtaatatgtcaaaatacatgtataagtcagaaatgccataaaacaaaatcctgacaactcgacacttgtaacaccctattacttaggcatgctacagtgactttataattactatgctcaccttcgctaatcaaaagattttacaaaaaacgtgtcaatttaaactttttatttaaattttaaacttttataattatacacatgttaacgcagattttcgttaatcaaattaaatagtatttttgtaataaatattctacagaaaatagataagtaataaatgataaggtaacaccaaatatttttacgtggttttgtaattaaaatttacatactccatgagtccttattagggatatttattgagtacataatacaatatcataatttgaataataatatttctctctcaaacttgtcatccatttttccatggaatctgcctctatttataggaatataggttggcagttactcattttaggattgatttaaatataacggttaatgaaacgtggtcaatccccacgtttcttgtcacacgtggaataatatctaataactacctaaccattctttacttttatcctttagacaattattgctgacttggaagattgcatctcgcttgatattagttatcctccttgtccgttttaataagaaaaaatactaagtgttgagaaatagtttgtctcgtcatattcctttattggcattaatagtacgaggtgatcttcttgttatgtgtaatgcgaggcaattatattgttacatttattctgctcgaatagatgagtatccccttcttgtctgtatattctgaagcaggcatatgtctcgttaatatcagtttaatagttattatccttgtctcgcttaagactatatagtcaacaagttttgaatattatctattaaacttttatttaataataacgagttatttaatatgcatttattgatataatattattatattattagagttgattcatattctttttgtaggacacttgtcaacttctaaagcatagctgaatttcgggtacaataatttccctttaaaagcactttttaaataaaaggaattttttaaatgattacaagggtatttttttcttaacccattttcaaaaaactgcatgctttggcagttcagaactttgaggcacatcattagcattacatgtaaaaggtgatcaatcttaaacatgtaattaaacacaaatatggataaattcacaatcaagaaaggagaaatagcaattatcattaaccaaaagtaatttcaatcaacattcatcatctccctaaataggagtttagttcataaaatccataataacatccataat

SEQ ID NO: 319195 - DNA, 1242 bp, Cannabis indica
atttttcttatatgtatagtaagtaattatttaaaccttatttttaaaactataaactattataaatttcttaaaaatttacaaattttcttaaatacttaaaagggacgatatcatcaagaaaaaatatgagtaaattttttttcttaaatttcaatatagataacaagtgtactttctatatgtaagtttctcttcacaaatatataatatgtaaattgaatttttattttacaaaaaaaaaaaaagaaaaaaaaagttatattccatgactaggtgagacatattaacgagattagaaaaaatatgggatggtagctccaaaatacattaattcaaaggttaaaaatcaataccatacccaccatatatagggtcaggtaagggtttttttttttattttttcttctttcacaccttcacttattattacttttttctttgttttgggttctcaagaaaagaaagagagaaaagagaaatatttcatctatctttatctttgaagtgatatttgatttgacatggatagttggtgttgctagtaaactaggtggtagagttcactgatttaaaaggccactatctcttctttacttcttctacatatacatatcaccacactgcagttagtaaaaaacttgtcaatcttttcattccatactttcttactaactcgatgtagcattgagttattatacttgtgggattttttccttagtttatttttcaaatatggtgctagggttagggtagggaactagaggtaaaatgatcacattttaaattgtataagattattttaatttgaattattttgtacccttgaagggaacatttatgagaatttgtgccattgccatttcgtagtccaagatgttttggattagacctaaagaatctcaagcactaaatgttgaaaaccaacaacaagaggggacagtcaacatgaccgtgaataagttaatgttgtactaagaaaaaaaaatggtcctcaatttattcaagtttttgctcttttatttctttcaattattaattttggatcggaaccattctatgtggtcgaatgcaatcaagatataatgctaaatgtaggataacaattacacaaatagtatatatttttatatatactaggtggcgtttgggtagaagtaaagaaatgaaatgaaatagaaataaaacaattttcattcaatttctttgtttggttgtattttaaagtattgaaatgacatt

SEQ ID NO: 319196 - DNA, 647 bp, Cannabis indica
aaataataataaaatgacatacaatataaatgataaaagagtactataaaacccagaaaatacatactactcatcaaaatgactacaaaccaagaaaagtataacaaaaattatcaaaactcaaaaattcatggccatccacggtgatgagccaactaataatcatatacagccatgcactctaaatatcaacaatcgccaacctcgaacaaccaccatcgtcatcaatctgcataaaaaataaagagccaacagagaggagaaatagagaagagtgtcgacattaagcttcaatctacaataaacggagataggaagcggagatcgtcgcagaagacgtcggagcccatccacctgcacaaatcagagataggtagagagggagacgagggagccatgtgagacgattgggacggagaccgagggcgttcgagacgaagaagccaacagtggagcatcgaaggggacggagactgaaggcgtttggggcgaagacgagggtcctttgttccttgtcccagggcgaagacgagggccttccttcgatggtttgtctttgtcgttcaagtgagaaacgaagagatggcaagatgtttttttaaaaaaaaaaaaaaaaatcagatgctgtagagagagaatgagaaacg

SEQ ID NO: 319197 - DNA, 1215 bp, Cannabis indica
agcatgaaaaaatgaagaaaaatgaataaaaaaaatggattcgatgcggatggtatgcacttcataccattcgcgtgcgcaaatcatagaggctggccgagaaacctcggccaaggaggctacgtgaagccttgtgcgcgcgcacatggcccctatttggacaaaatcttgtcccctgaccgagaaatctcggagaggatgcttgtctgaatgcttgtgcatgggtgatcacccatgtccgcgtgcggacgtgggtgacaccacccttatcattttttcaaacttcaaaatatcataactaattcaaataaaatcgaaattgagttctgtaaaaaactaaattgcttaattatttccaaattatccaacaaaaaataatttgaggaaaaaattctaattatttttcgtaaacaatttgcaaacatcaaacaatcagcaaaaagtacatagatcaacatgaatcacatccaaatcacacatgtatcattttaagtccaaatttcttgaaagtaaatcaattaccatggctctgaggccagttgttggaatatatattttaccaagatctagatttactaacaagtatgtttttaacatcctaaacatgaacttctaaaacgatataaaataaacacataaaaggtatgagaaaccttacagtggttgcagcagatttaaatggcttcttccgctcagatctctaacccttgtatcctttttgtagcagagtatcaccaagatctgagcccgattctccttctcttcaatttggattcttcacagccttacacactatgattgagtaccacttgatatgtgtgggaacttactctaatcactctagggtttagatttaagagagaaaaagagagagatgatttcgaaataggtatagaaaaaatggctcaaattttgactgaagaaaagtgtttgcatcatctttttctttgaggtcatcactacctatttttaggaatccacctagggttaggttagatttatttgacattaaaataatgaaaaaattaaatggtaaattgaccattaagtggccggccatggatattgggccccactttgcaattttgccattttctaattattcatcttattttctcaaaaatgccatttttttccaatttaaccacttaaatgctaaatctaattatttaataattaaaattaattattaaataaaattatcatttaatatat

SEQ ID NO: 319198 - DNA, 799 bp, Cannabis indica
agcaattctttcgatcccttttataatgaggataggtcactatttataggggcttaatgcgtgagggatggtttcccttgtgcttataatgcataaaataggaaattacaatgattacataattacaagatatgaaataggaaactgaaataggttgccctatttctctgactaaatcccacgattatcgagcttctcttcgtgcctcgacataacaagatcattctgaaataattatctcttgtaagttgctcggcataataggcttctacctggtcagatgtcttctctacagctctactcgggtaatcgacaattatagatgctgacaaattatgtgcaggctgatagggacatttacctcagcccatgtatcaaaaatataggacatgtgtcactcggctctctcaccacatcaatgtgccgaaaaatggaaaacatttgcccccaaattgtgcgggaccttcctggttgcacgtggacttcactcgatctatagtcttgtccagacgggtgatgtgtgtcctaggcattgaatgaagaattgacgtgatcctgaccaagggtctcttcaattttgggtcattaatgatgattgacaattttgccttgaatcgcgacttgatgtccaggcgtgaagacggttactctaccagcaatgagtacataatgtacactttttggggagaattcaagaaattaaaattattaaatgattacttctcttctcaggttgcttataaacaggattgaaaaccctaatcaatccttttagtcatctttattctcaaaaaaccag

SEQ ID NO: 319199 - DNA, 902 bp, Cannabis indica
agaatatagtagcaatccacaaaacttttttcaaaaagtctctcgccacagccaccacacacatagtcccagtccttactttaacattacagataatctttatccagtcttcagaagaaggagaccaagcgagtgtaatagtagcagacagggaagggaataaacaagagccataatctgcagaacagtgagtaataaagttaatatattgtgtgatgctattcagattattattatgtaccttatcgtttcgggcccgccaaatcgtagccaccactatcaaggcatacagaaaaagctcatctaccttaacacccttagattttagtcccacaaaaagttaacccaatcccacatacggccaccaaaaccaggtaacggccaaatcccccacggggaagatctccacaaatgaaaagctaagttgcaatggagaaagaggtactccatggattcttctcccatcccacaaaccggacaagaagcgtcattgatggtcattctctttgctaaaagagcgcagataggaagcgcatccgagaagatacgccaccacaaaaacttatggcactccagcattactattccacaatctattccaaagggaaggtgccaagactgatggaggcgcacgatctaggacttggaccaggtacgcagacttacttgagaacttgttggatttgatctaaatccatcgatctttcccctgaccacttgattttcccccttcaaaatattatgaactgtgtcagtgtcgaaaaagggaataaagtttactcatgtcccaatcaccatcacctaacaacaaatcagaaacctttcgcacatcattagggtgattggtagttggtcttggaacatactcttttccatgggatatcctgttgggttttatgccc

SEQ ID NO: 319200 - DNA, 3396 bp, Cannabis indica
tcatttctaaagcacgattcaaaaactaaagcattacctttgttcttagtgttgagaagtctgggacattatgattcaaaatgtcccttctgttcacaatgagaacattgaataatatgttttctttactgttcttggattgttcttattgctggttcaatctgttgggaaagataatcagaggaaatggaagcactttctctattcttctcaactgagcctgaagtagttggattgtcaaaggaatctttattaatattctcagcttttctttttcccttgtctgcaatactggagagagatttccttgcaagtgacaatgtcctttcataagcaagtaattcagcgtccaacttgtctatttcgaacgtgttccaattgttaatcataaaagatacaaccaattggttaaactcaggtgttaagctgttgagaacaaattgaactctttgctcccatgatatgaaagtacccaacacagttgctttctagaatttcaaggtcatcacgagcaagtgtgaagtgatactctaactaggagtcatctttgcaattcggagttcattttcaaaggcatatactagttgaggattgggatgaggattgttaaacatctttttgacactacaaacatcaataaatagaagtatattacttggttcaaataaattcatacacatattcagaaaataacaagtaaacaaaatatgtttccaaaaaataccaaaataaaatatattaaattattttctaaggtttccaacaaaatgatatacagtgtctcgataggtgagagtcaaagataacataagttgaatagagtagtcagctcatctaaaatagacactattttagcaaccttttcttcgataaaaataagaatccaacgttgtcctggtaggcgagagtcaaggttattcttattttatgagcttgtaccatttcatatatttatttgtaaatttatttctaggtagtcaccgtagggaagagtctaatagaaaagaaaacttatagaatacttgtcattcgagatcttacagtgtcaatacttcaatggataatcatccataagggggacaaagtctactatctcaaggtcccattgaaacaattgaccatgtaagacaaacaatggagatcgaatgtctttatatttaacgctcatttgtaacgccataatgattgggcgcgcaacaacgactttttaattatcgcgcacacctttgctaatcataggattttcacaaaaattgtgatgaatttaaacttttgattaagtttaaacttttaaaactataagtatataattatacaaaattatcaggatctcactttttacagctttgtcgtacaacgactacaaaataaaagccctagttatcccgagaatgaactctccaggtcgcactatcctcacatgtacaattatcctcatgttatagactcattgttgcttagccttagcctttcctttacctacacatgcaagcaataactttgagtccacgaactcagtaagaaaagcatataacatacaatgtattaccaacttgtatttaggcgcccatacacctatctacaagacttaacagatgattaagaacgttcttaacaacggtaagacctctgtaccacatgcactacatactgctattgtactagtgttggtagggtttgaaccgtaccccgagtaccactaagtgttgtactacatgcactacgtacctaactgtactagtattggtaacacaagactgtacccttaaacatcatatgttgtaccacatgcactgaataccgctaccgtactagtgttggtagcatatgaatcatataaacagcatgcatataatacacatacacatacatatacaatctatgctagtcttacctcgttttcaaattcaagtgtgtcgatcgacctaaatggaaaattacatggtgaacggaggcccttaattttcaatttgaacctcctagcagatctgaagatgatgctctaaaatctctttgattcctcttgttttacttagggccgaagggtatggtgagagagggttatgggtgtatgtgttttgtttataagtctatattaaacttaatgaaataaagatagagctaattagttttattccactaaagaattcagaataaaatagattattctacaaacatccactaaaatataataaaatccctttaggaaaaatatcattttgtccttttctttacccataagcaacattaaggcttatgggtaaaatggtcttgtaccataatcctgcctaatctctatattccaaatatcacttgcgatttccccacttgataaaaggttctaaaccaaccccctgtgtctctaatggccaaaccgtcgcatttccaatcgttaccaaggaaaaatcataaaaagataaatttcacatatggcatatataatatacttagagtttaataaaatctccaaaattgagaaattataactctattgcctatttcttgaaaatgaaacccacaatatatgtaatcacaaaatccaaataattaatgctaattgcctatctaatccatattttaagtatacgatcattacaattattcctctaataaaagaattttgtcctcgaaatctaacatgaataacttcggatattgagtcctcatgacagacttcaattcccaagtggcttcctccaccttgctattcctccatggtaccttggccaatgatatggttttgttctgaagaaccttttccttcctatcgaggatttaaactggttgttcctcgtaggaaaaatatgaatgtagttctaaagcttcataactgaaggcatgagttgggtctgacacatattttctaagcatcaaaatatagaatacattatgcacagtcggtaatgctggtggtaaggctagccgatatgctacccggtcagctttctcgagtatctcgaataaccctatgagcctagggcttaacttgcccctctttccaaagtgccttacatctttaattagtgagacttgtaggaaaacatgttctcacacctgaaactctatgtctctgtgcttaggatgaacataacttttctgtctgctttgcgaagcaagctttcgagccttaataatttatatttccttgctagttcattgaactaattcatgacccaaatatctcctttctctagttttgtcccaatgaatcacggaacgatgtttcctaccatatagaatcctgtagggagtcatctctattgtactttgatagttgttattgtaagaaaattcttatcaaaggcaaatattgttgggttttgtgcccaaaataaaactcatttcaatataatcagatttacttattaagaaagatcagaaataacattttatgtt

SEQ ID NO: 319201 - DNA, 905 bp, Cannabis indica
actgacaaaactggaagaaaattacagttttacaaacattgggtacttataccgctaaaaataaacattagatttatgccgcttacaaacataaaactttgggtacttatgacgctatttaccctaaataaaattataaaactgttttttaatataaataaaatttttattaatgagtaaggtagacgtagtccattatcaaattcagttcagtataatagacctgtggctagggccttgaaaaaatattttatttataaacttaatataatagttaaacatatatttataccattataaacataaaacttgatctcaactaaaactactgaacatcttaccagtaaaccaaaccaattgtttattttatatatgtattagttaatatatatatacccatttacctaattacaaaacattattaattaaaaatatttaaaaattagattatcactttttttttcagatcactttttccttaaacattctctcccgtttgtttttagactgttttcttctcattttattttgcggtaatcattcactcacaatctttgtggtaattattcactcacaatcaaagattttataatgtacaacaaaatataaaacgagttatatttatgtaattaatttatgtaaaaaaaaattaaagatcaattttctcttgcttttttttaaaaaaaaaaaataataaggggtgcaataattttaagtcgcctataatttctcaagcaccaccctgtccatatgttaagatattagcctcgaagtgtataatcaacaaaaatgtagtccattaaattctaaaaaatatgttgcttatccttattaattaattactaagttttttttttaaagttttcattttaaaaagaataaatataattttagaccttgtgttt

SEQ ID NO: 319202 - DNA, 775 bp, Cannabis indica
gtatatatgtaaatttcccaactaaaaagggagggtgagttatcaatgatttggtgggcttttattttatggttcggtaaaaatgccttcctaaatgtgtattattttggctgatactatttgtataattattttacaatatccgtataaaactaaaaaattcccttttattatttcattagagtttgttgatttctcttgggctggtttatattgttattgggccggattggtaagtgaaagagagagtcttgtttgactcttttgctttgaccgaactaaacaaagaaagaaaaggggttttgactcccttgaccgaaggattgattggagagagaaagagtctttgactcttgattgaattggtttcctcttgggctgcatttcttgttgggctcttaatattggactgaaacaaagcttacgaattgtgttagttataaaattaccattttattttctggacccataaaaaaaaagtaaattttgaaaaattccacttttgcattttatattaattttgtttctttaaagtgtgttggacaaaacaaaagcattttggtttaaaaattccaacaatgtacttattagagacagctattatgtgtgtacctgcatatgtgttttagtaatttcttttaaattttaacatcatgtgtagtgtttttacctcatataattgattgaaacattatattttctatgttctgggtgtaattgatagttatcacattgagggtgtgagtaaaggatgatcattatactactttgattt

SEQ ID NO: 319203 - DNA, 2404 bp, Cannabis indica
tcaagtttttaaattctgcactatgtatttctggtttgtttctgcgaaattgtgttctgcagtgacagaattacattctgctactgcagaatgtggcagttaaatattttacaatattatattttattaaataaaccaaaaaaaaatttaaatattaaaatgaaaaaaagaataaaatagagaaagagaaattattaaaataatatttgaagctaaaactttgagctatttttgctcactcgacggaacccctttttaagaacatttatttatatttttatcttttgagctattttagctcatgaaatatgagtgccctttctctattttatcctttaaaatatttcttcaaaatctaattttctttattttatttcacacatttatattacataatacatcaatttctctatatttttctatattatttaaaaataatatttctttagtatattttattgtttcttaaaagaaaatgaataattatacatattaatgaaatttttaaaacattaatatagctaaatagtgtttctctagtttctttagagaaatactattcattgatctaaaaaaatgtataataggtcaagtttagcatttgttggaaacttactttttctacattttaaacaatgagctataaatagctcaagtttacctcatttaatggaagtgctcttagcaaaaatgtatattgctacaagtaaaaaaaaaaagtatattacaataattgtattatttttttattcatttttatgtccttttttattagtatatttacaaatagtattaaattatagactatctatattttattgttttacatgatataattttgtaattgtgcattagagcacttaatataatttttatatcttcctaagataaaatttatttttggtgtgtgttttcttttgttgggtaactaatagaggtgatgataacaaaggtaagtatattacgtaaaaagtaaaaagtgttggacctcgcttttagccaacgacagtgagtcaattaataaacaattaagaatataataaaaatagagcaaaaacaaataagtaataaagagcactagatttttaagaggtttggccccgtaagtgtggtaatatcctactccttagattgtattaacttgagacaaagaacaaagtatttttctctctcaaagctcttacattgaaatctcagagtaattcttcttagatctctctctaaagtaattctttcgatccctttcatagtgaagctaactcactatttatagaaccttaatgcatgatggaaggttttccttttgcttataatgtataaaataggaaagtacattcattacataattatgatacacgaaagaggaaattgaaataggttgccatattcctctgactcactctcacgatcgtagggattgtcttcgtgcctggacttcacgagatcattttgaagtagttaagtcttgataagtagttcagtaagccaaatctatgcctgcttggatggtatgcccttcaccctattcagagaattagaagttatacatgcagatgtataatataatgtccattctggatattcatctctgcccagatgcaaggaatgcaggacacatatcacttgtgtattctgccacctcattatgcaaaaattaggataacatttgcccctaagtctgcgcggaaccttcttggtcgcatgtggacttcactcggtttggattcttgtctgaatgggtggcaagtattcgaagtgtcgattgatgacccgatgtgactctgaccaacggtctcttcagtttttggctcattagtgctaactaacatgtacctcgatccaagcctttgaattagcatgttttgacggttattcttcagataactgagtgcataatgtacacttttggggggagcttaaggtatttaaaatttgaaatgattattttgctccgttaatttgcttataaatagggctgaaaaccttaatcaaccacttttagccattttcacttttaaagaatcagagcaagaaaccttttttctttcaatttcttcaaggaatcctcaggaaacaccgatcagcattgttctagcaaatccaaagcttcaaatcattgagtaaattctagtaagccaagctcgaaggaaatcatcatttcacttctatgtccagatagaagctatagattccatatctatgattagcactcctactcaattgtactattatgttcctaagctatacgtgtgacccggaccaattggtaggctttaactaacaactctaagaacataaataacactcttgagatcgaacctaactatatcaggaataaatcttttgatctaagatcaaccggtaatattgacttagaaagatacaacggtaagattataatatc

SEQ ID NO: 319204 - DNA, 1276 bp, Cannabis indica
caatatttgctctccccactaaaattaggtcatccgcaaagaacaggtgtgagagtctagggccacctctactcaactgaatgccacgaatggtcccgcactgaagagccttctcaagaattattttcaaaatttaaatatataaaattattaaattatataaaaatttaaaatattacatattatttattatttaatatagtaattattatacaaaaatacaatttaaaaaattataaaaatgatattaatacaccaaaaaatacaaacacatatgtaaaatataaaatattaataaatttttttaatagattaaaagggtccttgtcggggtcgagagtgtcatccccatctccgccccgtttaacatttggagacaaaaattaattctcgtctccgtcctgttccccatttagacgaagaatcctgctcattagggacaggtccctgcgaggccccatccttataaggaaaatgtacatctctaccaacaacgcttctataaccacgataaagtgacactttataattaattgatatttgataattttttataatttttttttaaagtaaaataagtgagactcaatattaaattaccaacatattaatatttctacatttttttttacttagttggagtaaaaggatttctcataaaaaaaatattttcgatcagattccatttaattttagtagaaaatacatgcacaaagtatcatagataattgtcaccctaagtctcttaataaatacattaaatttgcatcaagttatcatttcttttatacttttaataaatacattaaatttgcatgaagttttacaattttacaataaaagtacaatctaaaaattgctacaaatatataaaaaaatattttttgtgttaaatataacatattttttacattttatttattaaattctcatgttgaagtaatttctcaaaggataatgatacaacaatttaggaataagttgaagaatatttttttttgtatccattaatcaaaagtattctcatattaaattttattaaaatgtactcacttttataagtgggttgctcaatatatcttcaccctctacttaaattaaatctagtacataatttacagtaaaaattaaaataagtaaagtaaaccgagtatacaaatcaatcgaggaaattacactcaataccctttttatattgtcctcttttatttttactttctttttaaagttctatcatttttacttctttttaaattattgtactaattttgcccat

SEQ ID NO: 319205 - DNA, 820 bp, Cannabis indica
aaaaaaaaaaaaaattgtttttaagtgtaaaaatgaaaaaacctttttctatgaacatctaagttgaagttatttaaaactaaaaaacaaatcgcgctttacgttgcggttttatttttttaattatatatcaggtcataaaaatatataaaattttaattttgatatttcttttatttgtatttctaataataaaaattaaaaaattctcaaaaaaaaaatagagatctaacaaataaaaaacgattgataaatttatatatataaaaaaaatctataattttaaaattgttatcatcactgcatctctcttttagttactattatattcaaagtggataagatctaacaaaaagacaatcgataaatttattaagaactcatcctataatttcataatcaatattattaccatatctcacttgtagtcactactacatttaaacctaatatcatcactattatacctaagtgaatctagataaattttgacatcacactattaaacttgcactattatatattaaaaataatctttttgtgtcctctattttcaatatttgaaggtacaaattaaatcataaaataataaaaaaaaattgtagtatatcccttaaaaagagttttctaatagaccatttatgtgcttcgacatctacataagttttttagttcaattttctttttgtaatcacgcacacacattgtagcttatttagaaacacctgtaaatttattaaaaattttgaataatttacagtgttgaataattatatgtagtattttaaatttttttcttaaaagaaattatttttataaa

SEQ ID NO: 319206 - DNA, 633 bp, Cannabis indica
ttattagtttcaatcgaaaacacaaaattcggcttgtattgaacatgaaacttgagagtattgaatgtccaggaatcaggaccggccttgaggataggcgagctaggcgaacgccttgggcccccaaacgctcaaggcctcaaaattgtgaaaaaaaaatattattaatatataaataaaatattaaataaaaaaatatataacaaatattgttttgtgtaatggtaaaggatcttatttaagccaagagatcaagggatcaatccttaacttctactttttttatttttttaaaaaatatttaatgtatagctataaaggattgaagctttgacctctaagagttcttaataactttaccattacactaaagcatttgaactataattttgataataattaaactatataagggccccaaaatttgattttgccttgagtctcatataatttaggactagccctgctagaaactctccattccctagacattctaacttagaataatcattgttcttggtgaccttataattactatcctattcttgaagtgaatgacaaattataaagtaacctagctcttttcagatcttctagattctaaatcccatgttatctaattaattccttaat

SEQ ID NO: 319207 - DNA, 1058 bp, Cannabis indica
tagtgatatctttgttatcaatcccatgattgaataaaattgcacacattttattcttgactcgttgatttatagatcgatcaaatgaccgatcatctttttttggtcattaaatttttatttttatttatatattatttaataagaaaaatattatcatcatactttaaattttaaataaattggacatgagaagaaatgtagcttttctttttaaatttatctttaaactattcaatcagctcttaatgtctccacagttacatttaatattaaatgtccctattgaaagttcaaactaaggatttggatcgatttgtagaggtttcatcccgagtcagtattttgcatttaccattagatctccgttttgattaatagacgtttaaaaaaaaattgactattaaaatcattatttggaatttagacgatgaatactaatttttgtttagttagatttgttaatctgtaagattgaacgggtaaaaaatctctcaaatctgaccaatgaccacttctgttaagtaacatgtgtcacgctgttgcaatttattgcttatatattatttaaaataataaaaattgattttaaattataaaaataattaataaattgtattttaaaattataaaaatatctttaattaagtctaaaataaaaaataatgctgtttaatataaaaaatgaagggtttttttcttaagaggaaaacaaatttaattagtattgaaaaagagaggtaaaggtaataattattcaaagtattactgttttggttaaagtaatttgagagtgtttttttaggggaagtttcatcctttgactgacaactttgccccacccacctaataatgtcaaactgcattgaaatagtatgtttgacaaatgattcatctaaataaagcaattactcttttacaattattcttattgaaaaataaattaatacaaagaatcaaagtatcatgacttggatgccatatttttcgttacctgatttaattttccaaataattatgaaatatgattatcatgggattttttatttttatttttt

SEQ ID NO: 319208 - DNA, 701 bp, Cannabis indica
ggatcatcatatgggacccctcgcttccctaaacatcagattctttgtaacctctccaagttgttgatcttgcggagtccctttccctttttttgaatttaaaaacaatatgtggcgatattattatattttattttactcaaagcttcatttttattttctctacaacttcttttattttttcttttcttgtcatctattacatgaaaaaagaattggaggatctgatctagcgtttactcatcattcccgtaggacttttcccagacattgatccccttcaactaaaccaacaaagttcttcgctggaggtaacatttgattttcaagttaactgcgaccactgcatcgattggctccgacgtttttgggcaaaccttctggatgttggaaatattttaccaggatcttagatttactaactgttggaaatcttttaccaggatctagatttactaccaagtatattttattaacatcctaatatcaattctaaaacaatgaaaataaacacataagagtttcagaaaaccttacattgggtgcagcggaatattatgactcattccattcagatctctagcccttgattcctttctgtagcagagcataatcaagatttgaatctggatctcattctctccttctttgatgctgattatccacagtcttacataatataattgaggtaccacttgatg

SEQ ID NO: 319209 - DNA, 1026 bp, Cannabis indica
aaaaaacagtatagggtgtaaatttccctttgcataaacgcttaaatagtagtagtgtagactgtagacactaacactagggtcttatcaaactctcaagcttgaataagggcttgagcaaaaattaaattatacttttttttttgacaaaattattaattttattaaaatttattaaaactttattttcacttaaaagatacattaattaattaaaattttattaataagatttaaatcttttttatttcatattatttttcacatattattgattatcacactacgactatttttataaatgaactttaatttatttataagaatttttcataaaataataaaccaaccgtcataaaaataatcataataaaatataagtatacttataagaaatataattatgatattatttagaggtggtttatacataaaatttcttatttaaaaattattaattattaattaatagttgtaaaattttagattaattggaatataacataaacatttagtaataaattttggatgaagaatatttttttccttcttgaaaatatatgaaatatactttataatgtatatcactcatattattaaaaaagattatatattacccttataagtgtacaccttaaattatgtaagattttaggttttacctaaattatcttatgattaacccgccctaatgaacactagatataattttttctttctttcttttttaagctgcatacatgcatgcacattgattttttttttaaggaaaatggtaactttattaataagaagattcagccattacaatagaaagaaaatcagcaggaacatcatcctcactaaaaatacgatcgggatacaaacaagagctacgagcaagacaatgtgcagctttgtttacagaacgtttaacaaaattaattgagactaacgacaaatcggccaaaagagaacgacaaaccgccacctgaaggccaaaaggagaaggtatgtccaccgtgctttggattgcctggacacaac

SEQ ID NO: 319210 - DNA, 587 bp, Cannabis indica
atggctccaactagctaaaaatatgacacaaactagccaaatataatataaatatagaacgtaaataatcaaaatatttgactatatcaaataaaacctgctaaattaatacatattaataaaaataagctatcaaaaaaatgtaagaatgcaaatagaagtaaatattaataataataataataatattataataacatataaataaagtatgaaaggaaattcaaataacttacactaaaaaagcaatataattaggttagaaagagttaaaccctattaataacaataaatatttaaaagcaatagatataaaaatcacaaaacattgagaacatttaaacacacttaaaaacacgtaaattattgatcaaaaataaaatcataaatgtcacgtaattaattacatgaaaatcaaaatgaaaaaagtaataaaaaataagaaaacaaaataaaatccatttaagtagcaaaaataggaaggaaacacaaatttaaaaaataaattaataatacagaataataaaaatgaggagaattaccccatatactgttttttaaccttttttttttttttcaaatttacg

SEQ ID NO: 319211 - DNA, 822 bp, Cannabis indica
aaaaacatggtacaaggcctgaccagcctaaaactcactgatctcaaactcgaccaggcacgcggatcacccttctcccttgagattaaagtccttgagctacccccaaagttcaaaatgccaacctggaaaacataaacaagaaaagaagatcctttctcacatctgaagtattttgagaagcagatggacttacaaggggtgaggagtgatgcacggtgtaggatctttcttgccacactcgtataggccacccaacaatggtatttcaagttgcctccaagaagttttaactcaaagaatgccttctcatgaatatttcacgcttagtttccctcatctcatcaacttccttcacaccttgaagacctggtcgaggtaaagaaaatgccaacagaaccccttagagcttatattagcatgtttatgaccgaagctacaaaagttaaggggctgactgaggaaggaagactggctgcaatactagggggcgttgcgccactcaaagatttgtggaaggaaatcaaaaggcttattgtgtggtcaatggctaaatttctagatcgagcaaatgggttcattaagctcgaggaggctatttggcgtgtggatactgtcagacaaaagaaaagccagcaacgtgtcatctcagtaggaacatccatttcgatcaataataccctagcaactccaattcaaatgggaagaggtctaacaataataacaggcagggtaatagaaagaagggcaaattcaattgcaatgccaaaaaacaccccagggaaaatgcctcaaaatttactgccttctcagtcctaacag

SEQ ID NO: 319212 - DNA, 1257 bp, Cannabis indica
tcgatacccactcatggagaagctgacctatagcttactctagcatctagaaagttgaggccatacttccaagctcacccaataaaggtgtacaccgactagccattgcgagaagttttgcaaaaacccaaagcatctagaagactaatcaagtgggccattgaactcggctagtttgatataatatatcaacctggaatggccataaaaggccaagcccttgcagactttgtggctgaatgtacaagtgcacctcttgaaatctctcaagatttaggagaaaaacaagagccagagaagaagcgagagcaagagcagcagcaaaaacctaaagaatcaacatggaagctacatgttgatggaagctacattgaccaattctctagtgcaggcattgccttcatatcacctgggggcaacaactgcacggagtaatcaaatttggcttcaaagcctccaacaatgaggctaaatatgaagccttaatcactggcctcaagctagcacatgaagtatgagctgaccacctagacatatatagtgactctcaactagtcgcaaatcaagtcctaggtgaattaacaactcgaagtgatagaatgatgtcctatttaagcacaatacaagacttgttaagtcagttcaaaagctatacaataaggagatccccagagaatagaataccacagcatgagcacttgcccatctaacaagcagcactattttcgacaaggcaaacttggtgccaatacagttcctaaaagaacataacattacaatccttgaagaagttgacatgttggacgatagttcaacatggatgacagctattacagcttacctccaaactagagccttgcctaaaaataaaaaatgaggcaaaaaagatgagaagtaaagctgctaggtacctaatcttagacagagtaatgtacaaatagagcttcacgatgctgctcttaaggtgtgtcactaagatagaagctgagagtttgacgatagaaattcatgaaggcttctacagtgattatgccgggggcaaagcctatctaaaaagatactccaacaagggtacttttggctaacaatgatcaaaaatttaatggattatgtcaacaaatgtgacagctgccaaagattctcgaagatccctagagctccacctaacgagctcacgatgatacagtctccttggcccttcgcagtatggggaatagacttgattggtcaactcctaaagggaaaaataagggtgca

SEQ ID NO: 319213 - DNA, 1167 bp, Cannabis indica
agtttaatgaaatattctagataatgatttctagtaactggaaatcacagctgcaacatgtggttgctttatctacaacagaagttgagttcatagccatcacagaagctttcaaagaagcaacatggatgaagagaattctacaagagaccagcatgctgaaagggaaagtgtcagtattttcatatagtcaatcaacaattcatttgaacaagaaccctgtttatcataaaagatccgaacatattgatataagaatgttttggatcagggataaaatagaatctggagagattgaattgaaaaaggtgcctacaaaggagaaccatgctgatgcaggaacaaaagtgttgccagtgagcaagttcaatcattgcatggacttgctcaaccttggacctacttaaaatcttaggttcactcccccaagttcaagttatcacttgttttctatgaatttaggtagaatttgtagttagtaatccatagaaaactagtcttggaactcactttctattcttggaaaagttaattaagaagttagttaaggttgttaagattagttaagtgtgtcttaagtgttagttgctcgagttgtgagtttaaactaacctatataaacactaccttgtaatctcttttgagagaatgtaagaagagattaagagagtaagagagaaatttgagagagattgagtgaatgaaagtcaaagaaagagacttttgaagatgaagaaccatagcattcatggtgtctcgagcagctcaaccatggtggtttaagggtcaatttctctctgtgtgattctcaatttgcattactctcaattggtgtttgtaaataaccttacatattggagaaactccttgggggagagctggagtatgactcacattgagattcgaaccaagataatttttttgtctcgtctctttaattttcctctgttttgtgtttgattgtgttcataacttattggtttcaagttctggtttgtatgcattgtgtgtgttcagtttgtgttgtagagatttacaacactcttcattttaaatatttgctccttttagagctattatgagtgtttataaatatcaagagtctgtttggttgtgttttcaatttttaatttttagaattgtattttcaaaagtaagaatagaaaa

SEQ ID NO: 319214 - DNA, 690 bp, Cannabis indica
aatgcgagatgactgctcagaggacgcctgacatctcccgaagatgctttgatgccaccttgatctccgggagcatagagaacttcgtatgccttctccgggaggcatatcccggagaatgcctttctttataaagacttagctattaatttgagtgctaaagcctttgtgtccacgtgtccttgtctggttagtccacgtatattgggcgaaatcaggggcaacaggtataataccaatataacttattcttttgccattgtgacatccttgaccagtccatcgagtttctactattgctgaactcaaaatattttatttccaaaatggtatatgaaatacccacatgttccgttcaaatctctgtaattaataagttacgcttaattattcatttacccaaaaattactaattagctcataattaacttaagtaagaagataatcctaccctaaaattcatataattatatatttaatcaaatatgttcaatttaacataattataatttttgggatacacacactttatttataaaaataccttcataaggtgtgggcaaaaattttgtctttaataagcttttatttaccaaaataccacttacacatatccattcatgtcagtccaaatatcaacttttcctttttttttcctcatttttctttcattttttatttttaaatttt

SEQ ID NO: 319215 - DNA, 831 bp, Cannabis indica
ttttttttttttttttgaaagttattcccaaaattttatcacacatataaacttagatgatatgaagcaaagtttgttaatgatttgaaataaatttggcttgaaatggatatgaatagattttagagcaagataagaaaataacattttaaaatgaggaatatgatgatcctctaaagtagttataaattgccaaataatgcatgaaaaatagcactaatttatgagcatttagaatgcttttatgcttccttttgcttgaagaagcaattgaccaagcattggagtttctttacttttcaaaattaccactttttggttacaaaaataccatttattttactagtgttagttaaattgattttcattaacagtgttgctatttaaaatagaaaacattataattgtctgcaaaaatagagattctatttacttttgttttggtagttggttttgtcaccaaattatagatttttctttatgagaatttttaaaaataccattttttgttttatttacaattttaagagaactctaatagagtgctaaaaatgtggtctattgctgtattttagcacatttaagaaaaattaatattctaatagtattctaaaaagtctactaaatttgacacatagtaatagttgtgtcaacttgggcttacgatttagtattgtgttaaatttagcttacaaaaaatgctacttttttttatttactgaaatatcactagttattataattcattgactttttctttacatttgataaatcataatataaaagtactataaattatttttatcaaatgcatataaatttatatttaaa

SEQ ID NO: 319216 - DNA, 2077 bp, Cannabis indica
ttttttttctgcgatctgagagagagaggaagaaagagtgggtttcgtgggtggcgtttgggtccgagagtgggtggcgtttgggtccgagagtgggtggcgtttgggtccgatggggatggggtttgggttcgggtggcgtcgactgtgagttgagagagagagagagagttggctgagagagatagagagagagatgatgtttgtggaggggggttatttttggggtttaaaaaaaaaaaagtattagttttttatagtgttaaattttggtataataattaaaatttttaattattaagcatataaattcaaatttccctttagtaaaatgttagaaaacaggtgatttattattcctttatatttagccgaaatagtaatagtacaccaatatttgcccaaggatattaagcttatataatatataatttttactccttaaatttttttatatggattaaattatgtttttaaaattttttagttgttaaaaattctcttgaattattaaaattattgggtttaaaattttttgtttaattttattcaattttgataattcgatgattatctatatactagactttaatgtctactaaattatgtttctcaaactttgacatgtaccaaattatatctctgaactttcatttatattagattttccttattaaaattggacaaaattttttaaattcaacaatctcaatagttaaaaatttagagggtatgataaggtctacttcaaaattcaaaaggcaaaaatcataactagcctatatataaacgaataataatatttttgcccctgcattttttatctattaagttgtgtctttattgtatacaactcgttaataatacacatcgaaatataatttttacgataaatttgtccttttattatattctattcaattttatcatgaaatgagtgatgcagtgaatgttttattaaaaaataaaataaaaaatattattaaaaatataaaatacattttatctattattcattaatgtaaaaaagtgtgaaaaataaatttgcattcaattattatccatcatatccataactacgttattgtaataactatatttcgagaggtaatattaacaagtcatatattacagtggtagaaattagtaaattgaaaaatttaaaaacaaaatattaattattaaaaaaaatcaaaaaaatttacagaaacgaataatattgttttcagattaaaaataaaaagggtaatttgttttttcttttgaccaaataaaaacgtgtgtgattttcagattagttaattaaaacagtaacttatctttttgactaagtaattttatttctaatgacagtggttatatcttaattaagtctttaagagcctgattatatagaaaaaaatgatctcatccaaacttatttggtctccctcaaaatagttctttttattggaaaggtgccacgaaatgactactattagaatttagaagcttctaatgtaaacataaatatataattaattgttataaatttgagaatttgatcaactcaatatccaaaaaatttaatatacacaaaaaagattattctttaaatttaatcattattttctttcaagtatatttaatttcaatttcaagtcaaataaatctataaaatataaattatgaaacaaataatttacattaatattttatgagtgagagaggggttgtgacttagttgcttagtgacatcaacacgcattatttgcaaaataatatataaatatatatatataattaagcttcgaattacttgattgattttttaaactcttctaataatatgttttaagttaataatagagatttttacactgtaaataattaaatttaattttttataattataatacctaaattatatttatataatttttgtaggtaactaattattaaatatttagtctagatcattaaatatttatttttatttaaatatttatttaaaatataccaagaagaaagtaatggacatgtatttatagaaattttaaaaattaaatttataaaaattaaaattaaatatttatac

SEQ ID NO: 319217 - DNA, 788 bp, Cannabis indica
aatttcaagtcaaataaatctataaaatataaattatgaaacaaataatttacattaatattttatgagtgagagaggggttgtgacttagttgcttagtgacatcaacacgcattatttgcaaaataatatataaatatatatatataattaagcttcgaattacttgattgattttttaaactcttctaataatatgttttaagttaataatagagatttttacactgtaaataattaaatttaattttttataattataatacctaaattatatttatataatttttgtaggtaactaattattaaatatttagtctagatcattaaatatttattttttatttaaatatttatttaaaatataccaagaagaaagtaatggacatgtatttatagaaattttaaaaattaaatttataaaaattaaaattaaatatttatactacaaattactcttaataatattatttattatataataaaatgcatagattgtttttttttttggttgtttgtaaaataaatgactaaattttggtttgactagtaaacatggtaatgaggaatagtcaaatcaactattgaaatgttaaaacatgtccctttcttggaagattattactaagctaagctccatatttgtaccaagtaaacgtgtcaagtctttttgggaatatgctgacccttatgtcaatgacaatttttttctacactaaagttttatataaagaagaattttcttcaaaaatatatggagaaaaaataaataaaaaaattaacttagt

SEQ ID NO: 319218 - DNA, 1906 bp, Cannabis indica
tgattgttgcctcagcatcacaaccctcagaactgaaaagattggtgaaaatagaagaaaatataccaaacatagcctcaggatcattggtgctgttaccaagatcatcctttaaatatttaatagtattattcttcttcctatgagaagcaaacctatgaaaaaatttagtattcttatcaccagctctaacccaattaaccctagacctttgcctctagtagatctcctctttgtaaagaagagcatccagctaagactggagatactgaactcttagagcagactctctattacaagaagcagaagcttgaagcctagcaatctccttttgagtatcctaaattctagattgaaacatcaccttagttgatttattccacgactttaaagctgaaacacaagcatcttggcaaaaaaggaactcactaaaagcattttcatgagaagaagccctagaagaattcgtccaagagtcattgacagaataaaaagtagggctttgaagccagatgttttcaaattgaaaacgcttcctgaaagggtgaactctagacacattagactcaataagaaaaaccttaagaggacgatgatccgagccataaaatggcaagtgatgcagattagcattagggaaaggttcatccaagattcagatccagagcccaatcaagactttcatgcacagaacgattatgccaagtatacttatccccctcaaaagaaaggggagagaggcagtacttatcaagaaagtgggcaaacctctccatatcattatgattataataattactccctattttatcatcaaaaaacaaaaaactattgaaatctcccataataagccagggaagatttggggcattagaaaaagttttttccaagagattccaagtaaaaaaaacgattagaagcaataggggaaccataataaccagtaaagtgaaacatttcattatcattaaaactaatattacagtctatatgattgctagagtaggataaaatatttacatatacagtagccttccacaaaagaagaagtccacctccaaaatacttcctagggacttcaaatcattatcaaaacctagagctgctctaacacgatccacaggcataacaggcaatcgggtttccatcaaaaaaactatatcagggcagtgatccttaacaagcagggagagcctcttgaatgcacgtgtactccccaaaccacgtgcattccaacttagcacactcatttttctggttccaagttatcagcagcaagggaagattcctcttctctatcaccagcacgagcgcgtttcagttgggacctcatagagctttcaaccacaacatgatgtggctggaaggaaggtctcttaactccagaggcagaagctaagcccttcccacgaacagtagggtcaggaagaccttgagaagagttagcacccatagcaggatcaccaccagaagaggaaatctcagaaaatgacacaggattagcagggccagtagaagaaacatgcatgtggtcaactggcttgtcagccacaattaaggaatcagtggaataggatgtaaaagctgaaggcctcaaggatatgtcaaagttgggggcgagtagactgtgaagaaacaacagagaagttggggttcaaaggagtaggcatcataagcacatcaatagatggaggagaggcaaaaggaccagtgaagttatcattaaggctgagaaaggaagggaaagtcatagtttgattagagaagtgctggggtggcagattaaggttgacaggttggtagttgaccatagtaatggttggaggatggggatattggaaaggctgagtcttatctgtgatcttttctttgcctctaagaaggatgttattgttggaattatttt

SEQ ID NO: 319219 - DNA, 1287 bp, Cannabis indica
gggggggggggggtgttatgtttagtaggatggagtgagggtaggatgaatggataataaagagagagagagttttggaaagatgaagaaaatagtaattttctttttgttttgtttggtattaattgtaaagttaaaaatatgaacagaaagttaattattaaaattagtattgtattatttttagtgtaaatatttgttaatttttaaaaggataattttattttttatctttattttgtatttttctaaggagaattgaatttttggaatttagaggggtaaggtctctctccaactctcctctccctccctttatttatcctacccttctactctctccctccacccctctctcctccctatcaaacatggtgtaaagtatccatgcatccacgcatagctaaaaaaaaatcaatacataactgataactatgtatgccataaataaacgtagatagcttagtcttttataaattagtagttttaatattatttatttacatatattaaaaaaaaaggagaattaccctatatactaattttttaacattttttttaaatttacggtttggatttttaaaatagttgcagcgctagttgaaataagaatttctatacgattttttattgcaatttaaattgtgcactagttgcaataaagattttatgtagaattttataaaaatatatataaaaaaaaagtgttttaaaatgtaaaaataaaaagcatcaaaataaaataagtaggactaatattattattggtaagtatctcataatctcatagtgtttctctaaaatcatcctatccttactaagaccatacttaaatttgcaacccaacaagtcacaatccattgtccgattaattaaaaaagaataattagttaaaactttgtttgtttcaccaaaatgatcaataaagacaattcaagaacatacacctctaaacaagctatacgttggatgaaaattaatgttaaagtttgcttaaaaacatgtatataaatatacagacatatgtatgagatactagtggtatttagtatcttcttttattttatatatataattaagtattaaattttatataaattaatataataatttaaaaagtactacgataaaaaaatcatttggaaggtgctaaatagttaatacccaataaaatacttttcaatggtattatattaacagttactaaataaatttaattttaaaaatattaaattattcaattttgattgagtactaaataataaaaaaaaaattagaatttatata

SEQ ID NO: 319220 - DNA, 1179 bp, Cannabis indica
ttaatcacataatcttgattactttccactgtattgacgacataataaacaagaatatcaatgtgataaggatttggatgaatttataaatcaaataaacataaaaatgatcacatgaaccaaataacacactaaataagtaattaaaataaatctgtttctttattgataattgaatagaaaagattacattgaaatagagttttatttagggcacaaagcccaatagtacttagatcacaaggctaaaactgagcaagaggttgaggggactatacgctcccttcaagagaacttaagcaaggctagggaggagagagataaagctgaagcccgtatgatgcttcaatctgagaccatcaccacccaaatccaaaaagtcaacactctccaagaggatatccaacaaagggaccaactcatttagggcctttgtgacaaatataaacaacagaaagagagaaaagagtcttggatgacacaacatgacaatatgaacactcttctccgcgcggctcatcataaaagtaaccttcggtaggagaccattgataagttgtagaggaaagtcaaccgtagtccaatgaatggtgtgaaggcatatattgccttagctgctatgcgtgaaatgagagaaagtgcccccaaactattcaagatgcagtcatagcggcaggtaaagcatcaactaaggtggagaaatattgcctttattccttagagatggcctatgccattgtcctttataacttgtggaaggccgactctattatactctggctcattaatgaggaagatacaccaaacgttactaggagagttcttgccataaagcgcaacacacacctcgaggagtctcccctttctgttgatagcgatagcaataaagaaactggtgctgaggtctcaagttctcacggaagctggggcatcttctagcagggctgaagaggagcttgtctgggacgtagttggacctaactcggatccagaggagccaaccaatgccccatcccaaattgacttagtagcaccttccactgcccgagattaataggagccacctttgtttctcgttgtctatcttttttcttaagacaactttaattccttttgtcgtagagttgtgtttattttggcctggtcccgcgactgtatgtgacaattgcctttgggtac

SEQ ID NO: 319221 - DNA, 503 bp, Cannabis indica
aaaaaatttgaaattaggaaaaaaagaataaattttgaaataaataaaatataaaacttaattaaattaaaaactgaaaaactaaaaccctaattttgaaacctaaaaactaggaaccctaattccctctcagccattccctttcagtcgcatctcccactttctccctctgttcattctcgcacagccacaacccatccattcttcgaccacccccaggccaaaccaccatctgaatagtccccatgactaaaagaacccaactcgattcctttatctctctcatttttctttctttctttctctctctgcgtttagctcggcccaacgtcggagggttgtctccgtccatccacggccaaaatggaagcacgaatggcttcccgagccgttcgatgactgaagaagccctaggtggagaaggaggtcatttttcagattttcgccaagttttctggtaagagaaggagaggtggatgcattgcgcgagaaggcttcagatc

SEQ ID NO: 319222 - DNA, 561 bp, Cannabis indica
aattgtaaataaaacataaaatagggtatttttgaaaattttcccacccaaaaacccccaaaccccaaaacggattcttctacgacacttcctatctcttccggctcagaactcaggagcggaaaggagaaatcggtgatcaaaaatctccaactatttgctaatattaaggtaatatattcattaggaatctcactaaccatattattttctggttttccttatttaatttgtatttctcatgtgaagttacttaaattgaataccactgattaggtttggtttgttttagtaatggctgactgtaattcaaaatccaaaattgggtcttcgagcaatgtcagtgccggattatcatatgagataattgaagagataatttcaagattagatgcaaaatctgtgatactactaaagtgtctgagcaaacattggttttcccgaataagtgagctgagtttcatggatgtgttagataaattaacaatatacccaagatctatttgtatataacatagaacacaataatagtatatgataattgagtatgtgtacctgatt

SEQ ID NO: 319223 - DNA, 1267 bp, Cannabis indica
taaaaatatatttgagtttgcttgaaataatatcatttttgatgatcgcgaggcagaatcaatgactactcacaaatcgaggtagggcagataagctgctatcgcctaaagtaggttattaactacttagtgcgagagaaatacgagcaatggaaatctctaataaactttatacctatgattgtttaaattgttaatgaaatgcaagcaaacacccacatgttgaagttcaaacttaaaagtatgaggcattaaaaagcaaagttagccattcaacttcgcaaatttatctttacaaaataaaagtgcctgaaggagcaaaccattgtctcgaccgaaaggccattttcaaaaaagaaaagaaaagggggggagataaataaaaaccaagtctacatggtgggagacttggatggatcttcttcttcttcctctacctcgacctcttcctcctctgccgcggacttctcacaaaaagccagagtttcctctttcttctcctccaagaagcttatgtccatgttgggattcaccatccaagctcgatatacagtacgatggccaaccttgttgtatcgttctgtggtctcgacctccttctcagtgagcttcttctcaaagtcatcagcttgggccttgatggtcttctcagcttcttcttttgacttctcgacttcttgtttgaggcgagttatatcctgttgggcgttgtcctgttgcttaatcacaaccccgcattgggataataatttatggacctcgccctccaggtatttgagccacttcgaaagtcgtcgattgaaagcaaaagagaagaaagaagcctggagaattacgaacaaatgaatatgagaaaagggagaaataataataataataatacggtcaacttaccatgaagttgtaatccaagtctcaaaagcatctcttctggactcccaagattgattaaatcccaatcagggggaaagagagccttaagtttgtgccagcgagcaatcccgtatgcctaggtgaattcagatcccgcctcccctgctgcagtcgacaaggtctcaatggcctagctcaaggaggcagaagcatgagctgtctcaggaggatgagcgttggtgttaggagcgactggaggaggaacttgttcttgggttttggcatcagatgcctcgaggtcaataggctcagacaatgacttctgtttgtgggcagtggttttcctttgccttttgggaggtgactgttggactttattttaccaggatcttag

SEQ ID NO: 319224 - DNA, 1497 bp, Cannabis indica
tttagcgtcgccctgatcagcgtcggtagcgaattttgcgaaaaccgacgcctaaagggcttaaaaaccgcctctaaagggtgtttttgtagtagtgtgaaccgatagcagtttagtttttatatatatttcatcctcaaacatttgttagatatttttaggcgggaatatgactctgtgattcctttctactcgaatcgatccacgtcatggatctgtatttctttcctatttatcttattgtttcttctattttgttcatcaagtttcctcctcactactatttcgaacacagcgtctttgatgaaaagaacaacaattgtaataatataacatgaaaaataaagatattatcaatgaaaagaagaaaaaaatatattttaattaaactattttcattatttgtaagaatatttattaaaatatatatatttatataaatatatatatatatttgtatgaatatattaagctctagttaataaatgcataggtttcatgttctagttaatagcataaaagaaattatttaataattaaattatacctcttcttttaaagtaattaaattatactaaaaaaaaatatatagcacaaatatagtatattatctatttaagaaatttatttgagtcagtatggagttcacaaattaatttggtctcaatttttatttatactcgaatttatttaaattcaaatttaacattatgttaaagtaattaaattatactaaaaaacaaaaaaaaaaaaataacacaaatatattattatatatttaataaattcgagcaatatggagttcacaccctccacagtttcattcgatgcgaacaaacggatcacaaacgactttttggaccggtgacattgggctcacaacagatcacaagtggctctgatactatgttaaaatttggggataagatgaatggggttccaactcaaaaccaattgacaaaaagaggagtagcacattcatcttaatatatcacaatttatttccacatattagcaatgtaggattaactctaataccttcttttataatgaaattaccattctgcttataagaaaaataaatgagcttttgagaaaaggactaggcactttttttcatccaactgttatttaaataactagttttcctaaataaggtgcccgcaaaaaactatcatttacaaattatataattaatataaatttttaagtttatttaattttctcattagtttgaccaaaatattttattatttcagtaaaattttaatttgactgaattaattaatcaaccttaattaataactaaataatttataaaaatttaatgtattttgactaaattatagatgtcttagaatttagaaacaataatatattgaaaatgaagaatgctaattacaacttcttattataattttttagttaactttcacgttcgaaattacgtgccgaaatattttttcatagcagtattcattatagttacagtattat

SEQ ID NO: 319225 - DNA, 2597 bp, Cannabis indica
ttttttttaattattatttttacacatgcacgaaataccttagacccatttagagaggttgagtcagtaaggactattaaacacgcttctctaaattatgtaaaaaaaatttatctgcagggataatttaggtttgttgtatacttatagtttgatatattgcttatttgtttgtctcattagtagagatttcggtacgttgtctccttacatgttcttgtaagttggtaaacttaattaatttgcttacttataagaactgcagggaggtcatactgaaattcttacaaaaatggaagcaatcttaaaagcagattgcactatatttatattacaaacctgaatgggataagttctataccctttcagtaatggagtgagaaggtgaacccaaccatttatttttatcttgattgcatagtgaatggtgttaagtttttggttgaggagaaggatgatatccacaaaatataaaatagcagtgttatggtattcgataaagatagacaaaatttttataaaacttgaaaacattatagaggttacttatttgaaggactgcagtattttattatttaggtgtaagtggtttgacacaaataggagcagaatggatagtgatggttatttcactagcatttacgtcaatcgggaatggtacaaaaatgaacttttcatacttgcatctcaggctatgttgatagattatatccctattttcaagaacaataaaagactagctgattgtaaatgattacaaccgtagaatgtgtgagatctcctagatgatgatgaggttacacccattatgaaggaaaataacctagccgaaatataagttgtacaacttctacagttggatgatgttgactatatctatcatgatgttgacccaacaaaaattccaaacataagtgtgaaccctgatactcaggatttacatgatgtcattgtcaatgacgaagatgagggttcgaatgtccaagaaaaagaatgagtacttagaattagaaagtgacagtgatgataatattgtatcaacagctgatgatgataataattaattataattgtaataatgttataatatcaaataataattcagaaatattttgttatctaatatgttgcgaatataattgtttattttaaagttagaaatatgttctctatgtatagtatgcctacatcaggtagaaactctagtaaaaagaaatgggtaagaagtaaatataaatgtgcaaatgctgaggaagtaatttccaaaggtaaggagcccaaactacatattacccttcatgaggagacagtaactccatgcagaaaaaatagaaaatactttaacaacatatgtagactttatgccctgcacaccatccctatgaataagttcatgtgggcacttgtttctaaagttgaaattaatgtagtgtgggatagacttgaggtatttattttattattctttaatttataattaactcaagaagacacctccgaaatgagtaactcaagaagtgtggagtgataacattacttattggagaacagagaaagagaaggtatggaacaaaattattaatcttagtaatactttatgttataatcaacaataaataattaatttcaatataattatgttaatttcaggcaagatcagtaaaaaaaataataaaagttaaggtatgatgaaaattcaaggtggatggggatcaaagcctattgtagcacacgctgcttttgaagtaaccttttgtatttatttgtgattaataagtattttttttaaataattaataatcacatttatttttacttaaatataggataatatcgagacatgaaaactttcaactgctttagacactttcgaaagttccaccataataaagacaacacttgccgcaatgaatacgcacaacaagcttatgtaatttcacattgatatttattaatttatgaacatttctttcaatatgttttttattgaaattgaatatttaatttatttcattttatgtacgaaaaaattattgaatggctataaatcaatcagtgcccactgatgattagcctgctcaggatgatatagatcccacccaatacccatgagacatgcctgttatgatgcaagtgctaagtgaccaatctcaacatctgagaggctttggctatctcctgagattgaaggcaattggggccaaaagcacacacgtcacgtcttctttgtctggctcgaaggccattactatagaacaatatgtatgaggccttatgttacgaaacttaataacacgcaagtgcacgtatcgttgttcaagtaataaactcacacgagtgaggtcgaaccacatggaattgaactgaataccaataaattagacttatgattctatttgatagataaataattatgatatattttaaaataaaaaaacaagaaaattaaagaaagcaataaaggtgtttaatcaaggatgagaaattagggaaaagaatccttttcatttaattacccaattgttaatgctaattactatgctctttctcaatgtgaatgacaaattataaaaattaacctaactctttttcagatc

SEQ ID NO: 319226 - DNA, 598 bp, Cannabis indica
agagagagagagagaaatagaaactcaatttcacaagtaaattaatctccacatttacatgcataaagaatatgttagaaagaaagtgaagaaaggtacccgaaaacggagggaataggagagtggagtagagctatcttgatcaacccatgagttgatatcttaatctatttatcgatttgattttcaacaactttccttcattgtagcagttgaaaaccaaatcgttgttctgaatcatggacatagaacctagtgagatttcgaatatggtaattgaaaatcaaatccttctgaaattgacagtatgaaatgtggcaacgaaaaatcaatttattcatatgaagattgatggaagttttttcctcattttctccaaaagtttataggtgaaaaaaaaagtacctcaatcgcatggaagggaaaatatcaacatgaagaatttatatatcaattttattttatttttaggatgctaacgccaaacgttaatctgccattagtttttatagttaaaaagaaaaacattaaaagaaatcgtacaaactaaatattttgttgcataactatattttatatataagatataaatatataa

SEQ ID NO: 319227 - DNA, 621 bp, Cannabis indica
aggattaatgaaaggatgaagagaaccccttttgacccattttagaaggctaaaacttttgctttctctccagttttggtgcaccaattaatgctgcacaaaatgaaggtcattatcgactgatgcctttatcttttgtgataggtcattatcgaccgatgcctttatcttttgcaataagttattatcgattgattgttgtctgattatcgactgattttagaatggaataattatgtgttctttgttgtgatggttcattattatcgattgattactatattaagtatgtgtgatgtaatcgataggtgtcgataaagtatcgataatatgttgataatattatgtcgacaaaatctcaagatgtatgaatcttaaatatcttaaaattgacatcatatcaacaaaatgtcgacataatatcgacagatctcaacatgcaagaatcacaaaacattggccattacatcaataaaatatcgacaatatttcgataatatgtcgacaaaattcaagatacaagaatttcaaatgtaaactttaacatctaaaaaattcaagatatcaacatccaagaatcacaacattggtcatctaagaagttttatatagcaaatccag

SEQ ID NO: 319228 - DNA, 750 bp, Cannabis indica
aaagagaataagtaggtgtatgtatacacccgtgatagcgattccagctcgatgttgagtgttgttcacacttcacatcgtataatacctcgtatgccatctcaagttccagctgtcattctttttttggcatttttatgttttttaaatttggatgtgttaaatatatatcttctaaaaagtaaaggggttttttttttttttttttgaaattatctaaaataatatgtttttgatttaattgtaaaaaataatttagttaagtttcaataatatttttatttgttttggcatgtttcaatttttatttattgtttctttctctcttttattttttagaagttattctctttctctctttcctagctcttttttcacaaattttaaaaattatttctgaccacgttgttactcggatgaacttaaaaatcctattgcgatctattttctattttttagtgtgaatatattaaaatgtaggaaacatgttttttttttgttattttcaaaaaagaaactatttgattattaatatattgattatttattatttttatgggtgttcatccaattcaatccgcactgttttgctcatagtaaatctgattcacattaagtgagaaatttaattttttggatccaatttaatctgcacaatagctcaaatctaattcaatctgcaaaagtgcaaattggattgattactttttaatattaaattatttaatatttataaaaaatatatatttt

SEQ ID NO: 319229 - DNA, 1697 bp, Cannabis indica
ctaatgccgctaaaaaaactaggatttactagagctaagagtggaaattaaactttaaaacgaatacagaataaaaagaaataacttgtaattattaaacttcacaaacatccaaaagattacatttttgtttcgagatctcataaaaactttttcaaaatattacaagttatcaatacacgccgacctaagcggcaaaagtagagattacaacattttcccctagtagacccaacccttgtagtctagcttggcctgaacatgtacaatacaccccaaaagccctcgacctcatggctgatcaataacagattcaccctttcctacacaatagagcacatgtaagccaaggcccaacaagacaataaaaacaacaatatgaatatcaattttaaaatcacttagcattgatgccactacatctattgtctatttgatatacacctacgtgttacgctcacacatctatttacaataaggtcttagaataatttatctcggttctgattaccgattctaacctaattatgcctaatgtgcataactctttatatcaacatattcaacacattattgcattcataataactttaaattctaggataataaccctaaattacataaccgctaaatttaggctaataaccctaacctcggtttctcacataaaatatacctaataacgtacatgagtgccactgtgctaaactctatgtgctagtttttagtcttaagtggtaatccaagtatgtggagattccaaatctccgggtgttcctaagcaagcgtacgtaatcctaatcacacattttggagatttcacaaataggattaatctcaaattcattttcacatatacacataattttaattccatttacaggttaacacatagagctcgaagcaagattttcaacgatgccaagaacatcgaaaatggagttcagagtcaaaagttatggtcaaaataagttttaacactttttgccctaaaaaacccctagtgagccgcgacactcaaaggccatgttgtggcttctgggttaaaaaccaagaaaaactcacctttaggcacccaaaaatgcaccaaactcaacccaaaaataccataacttgccaacaagctttccaaaaaatttaaggtgttttccaagcatttatacaccaaaatacatccaatactcatgcattaactaagattataatcaacattatactaatctaacattaacaacaactttaagcctagaaaaaagctcaaaattaaagccaaacatatctaaagcatgttatacaaccacccacaatcaccatttcacatatgtcatcaagcttgaaattccaaccttcaaacattcaaagcccaactcaaatattcaaaacaatacccaaaaataaaatctcaagaactcactccaaagctcccaatttaatctaaatgcatcaactacaaccctaataacacaatcaaacaaaaattaccaagatttcccctaaacctcatcagcatgcatccataaacaaggaatatcaggaacacttaaaaactcaattatgaagcttgaaaatcaaaatttaaaacaagtaaaataggttagaaaaagttcccaaaagtcctcaagcaccaagcaagaagaatccacaccaatttgaagcaattttccttcaaaattgtgtttgaactaacaaaatagaga

SEQ ID NO: 319230 - DNA, 593 bp, Cannabis indica
agattaattgtttagttattagttttaggtaataaaagaattatttagtttagattattgttttatatattagttttaggtattagaaaaaaaaattattttacattaaatatttaggtattagttctattttcatttaattttgcaaaataacgaggtccaaccaaacattgagtaagtttaggttaacttttcatacatgacattacaaaatattcaattgcaactgaaatgttaatgctttattgaatgttgaaggaaacatttcaattggatcaagaccactaattcgactaatgcaaggaatcaaaaataatacaagacgaacattattgaaattttagtacatggttacaaaaaaatgtagtatgtatttattgttttattacttatcatattaatatactagtgctcactaattcacttgtgcatgttaggtgtatgcgaaaatgtgtgaatccctaagcaatatatccgacacactacttttcatatcacgaagtccttcgtgtgtgtactcaagtatcaatcgtactgtataaatagtactcaattttgcacttaagactgtgataaatctaaaaaaatacaaa

SEQ ID NO: 319231 - DNA, 588 bp, Cannabis indica
aattttttttaaaaaaataataatttatgtaataatcttttatgaccaattcagttatggtttttcacattctttaaccaaaatttaagtagccaatttggttagaagaaggtgtcgacgtgtcgtgtgcccattttacctcatcaagaaaagtcaaatttcgtaccaaatttaattaaaattagctagggtactacttgaacagcatcatcgctttacaatctgtttaattattggataaaagtatacataaatctaattgggtagtatccatgtatatatgctgacaaaattttggtacaacttaaatttgaaaaagttggataaagttttggaatttactaaactaaccctcccatttgtataatttttttcttttgccaagcatgtgtgcgccgacaatatttttctataatgctttgtttcaatggttaatcacatctcagtagcttaactttaaacacataactaattgtgtcctctaagtaaagtaatcataatatgtgcatatatatatatatatatatggggcttattttaaaaaatatgagaaagattagtaaggttatgataaatatgacataaaaa

SEQ ID NO: 319232 - DNA, 653 bp, Cannabis indica
tttcatgttccaagggcacatagttggtgaaagaatgtgtgttaagcaaatacttttgttataaaagcatcaagcatcaagtatcagtcgactgtcatttgaacaacgaattgaagctggaaaacttcttgttcaaaatcaagcttataaaagcatcaagcatcaatcaatcgattgtcatttaacaaattaatttttcaattaattgttgtgacaaatatgtataggaatttcaatttcggctttttttctaggcggggtctttggcccatgacaattgggctttattcgggtcattgacctgattcggcccaactcgataacagttgtgttggtgattgttagagaattaaaagacaacatcgatttatgagaaatgtcttgatgtactatgaaaattaaaatttatagagatatttaaaattaaaaattctaccattcaaaaaaaatgggggtcgggcttgactcgccaggctgaaagaagtggtcgggccgggccagatcgtgacaaagagatatcgtgccgggccgggtcaatttcgggttgagtccgatctggcccgattgaaattcctatatatatatgtatattttactctttataattatttatttttgttaattttttttataaaattatatgaaaaataata

SEQ ID NO: 319233 - DNA, 987 bp, Cannabis indica
atatatatgattaatcagtaatattgttataattaataaattgattttaattaatatatatttatgtacatatgcagggattgaatatgttgaacgcatctctgcatactaaaacagttcttactcatgtgtttcttggaggagaaggaaggatctagctaaatctaaaactcaagtcaaagtctacgtttttgttcacccatttcttgaatattaatattcgctgaactatatatttttgttttatgtttttaattctgtatgttcttagttataagatatttttgtttaattaactatttaaaatggttgagcttcaacttaatattatatatatatatatatatatatcttaatttaagataatttcttccagtactgttattcaacataattttattttcaacagttttcagtttataatattatttgcactaattataaagatagtaagtacattatcagaaaaacaaatttgcactttatttccacgtcattaaaaaaagaaagaaatagaaaaacagataatacatacaaatttcctaatatgtagacgtcatttcaaagtaatatggaattcgtatttatatatagtgccaacgttacaaaaataatgtaaatttaaattaattatgcatgaatattattatcttaataacaatgaaactacaaaaatattttatctcaaatagactacagataatcttcattacaaacaatcattcatatataagctaaaataaaaaatattcattctttatataaagagccaacaaatgacaacaaacaaaaccagtagactaataaatcaagttacacaagccattgtcatcacaatcgttctaaacaatactaagctaaaaaatgaataaaaacaatgatacagatttgactagagttaatagatcatttccaatatatagtattctatttagaggattgactttattggtgtctagcactttttataggtgatgtcttacgatt

SEQ ID NO: 319234 - DNA, 2516 bp, Cannabis indica
aatatttggaggaatttagacaacactatataatgcgagtattcaagcaaaacaagaacactgactagcagttatgtgagtattcacctagaatagcgagtactcaaagtgtaagctactatatagacaaaaacgaaagcaaaaataaaaagaagacaagagaattatattggttctactttaggtaatagttttagcttagtttatttgctttggatcactcatttatatagaaagtaagtgtcctttaggattacataactggtctgataatactgtttttacaataaatgacaaaattaaatcaagataaacgtttaaagaataaatgaagaatattttggtcgttcttgactttattccagcaacgtatgtgacttgataagtcgcagcttgtccattcatattccaaacacagttcgcgggctctacggtgttgtacttgcaggatgggcctttgggcctatttccttgaatgtttgcgttcacttttgatcacatagtcagacattctatgcgttaacaatttagaacatgcacgacttgacgagtcatcgaacacattagttatttagaccaaaatttatgtaaagaaataatctttacttatcgcacgagagatatacttagtcatcacatataatcgcgcgaccaatattaacttctcttggtcctgcttatctgtttattatgcgaagcatagtatacaactagaccctgtcctagtcacatcttctcgcaagttcacatcatgcgaggtgaaccgatcattctttatctgatcgtacttgtttgtgtccacacttcttctttctaaatttagtaacactttttgcagttaacaacactttctgtgattaacagcactttctgcagttaatagcacaagaatggagacgagcatacatttgcgaaaaatcatcttttcttgtaaagacttgctccatgtgacaacttttcacgagactgtactcgtattttttaagcgaaaaaatttgcactataacactcatattgtgatacaagcttcttaattatgtgaggtggagcttgttgtttcttttgatagccaaggaacagaataacaataatgagtaaataaaaaataaaaaataaaaattgatcaaacatttaatgaaacaaaacagatgtaaaaatgtcacttctttccttttcatctcttcatcaatcggcttacgaagatcaatatagagagaatcctagatgcattgattcttaattaaaagcttaagatgcttagagtattattgcaaggcttagcttgaagcacaatataacactccttatgtctatctttcttgttgatcatcaatttcaactatcttttgctatatatgatacatgagataatataatttttatagctatataaaagaggaaaatatctttatactacttctcttgaaaaaaaaaaagtaagtcaagggacaagggcctagagcctagaagaacatcattttcttcataaagtagaccctacaagatcattggccatggaagaacagaatcttatattgctttatgctatatgtaggccattaaattaaatttctacttaaaaaaacatatcatattttcacttcaaaactaatataaatacctataccatcatgcatagagagcctcaaccaaactcatatatacatatgccttactatgagatcttttcattgatcttttcttcttcatagtagagttcttattatattttgtataatattgtggtgaggattggataatctgcttcctgaggtttagaagatcatcatcactttattctttataattttatataaaatatatatatatatatattgctgagtcatctagtccttgggatatgcagattgtctcttcctttctggtcgatatttggaagattggatagtatattatgttaggatcgggtaatctgcatcctgaggtttagatcacaattttttgttgtgtaattagaccttaggttgcagattacctcatccttgcaacgtttgtttttgctaaacaatagcataattgcatggtaagtaaattactaatctattatttatattatataaatatatatatgtgcataaatttctaagttaacatgctatgagtatatgagtatgagtatgagtgtgattgaaatttataaaaatatgtgtgtatatatattctatataagctaacgctattgaaagtttttattattatttttaacttcatatatataagccctcaaaaaattaataatatgcttttgtttttgaaatttgcactactagtcttaaaactcataatagtaaacttgttcagctatatatatagttgttttatatattggcaacatgcttgtgttagctcattaattagtaaaaagaatataaaataatttgtccatatagtttatttctcgttttgtttatgcagatctacacgaaaaaacaattaaaaaaaaaaaaaaaaaagaaaaaaaaactaaaataataattaatagtagaaatacttag

SEQ ID NO: 319235 - DNA, 1019 bp, Cannabis indica
agaaaatgataataagtttttttacatatattttgtaattaattaaaataatatatacaaaattgtaaaatacccttttaattttacttttataagtaaataaaatatatcataaaaatattaaacaattagtaagcactaaaacttataaatctcacatttaactaagcagcattcataactaaatttttaagctattttaatttatctaatgaatataattttttaacattttttataattcttagctaaacttttacctttccattttacattagttgggagtgcatttatatattttaatttaataattgttaaaaaaaaaaacaattgaccattaaagagtattaggtatcttgaggtacccaacactatactgatgtgacacattagaagtggttaacaattttttatgttatttatataataaaaatatgttaaattcaatattaaattaaactaataaaaatatgccacttcttatgtttgactttaaggtaactttagcatttctcattattaaagtaacaccgagaaccaaatgcactttcacttagagcattgttagttagaatattttaaaatgtctaacaccacgatgtatcgctctataattagttaataatttatattatttattaaattaaaatatgtagagctcgaactttcaaaaaaatatatttaaaacccgatattaacatgtaccaacaaagttggcccaagaatttcagagcttgagccattacacaataggccaatttttattattattattattatacatacataaattgaatatttagaatatatcttaaaataattggtaaaaagaatgtggtataatgcacatttttttagggaaatttatatggtatactgatttttactattttttttcaaaaatattgtccggcggtatttttactgttttattgtgtatttttataagtttcatactgcagtataccgtgtttattcttttgttttttttatttgttttagtgttgttttacgattgt

SEQ ID NO: 319236 - DNA, 1040 bp, Cannabis indica
tatagtatcatatctatatggtattagtataccttaaaatagtcaaatgatgctcattatatatatatatatagtaaattttgttatcacataattattataattagatgagtcctaattacaacctcatcatattacttcttagtcaaattttacgtttaaaatcacatgccaaaatattttttttcatagcggtattcgttatagttacagtatcattcttataaatttttgaataattttgaatagtttacagtaccgaaaatagaatttctgatattttaatttaccacgtgtgtttaaaaaacttgaaacatattttcggcactgtaaactatttgaaaattttcaaaaatttacaagaatgatgttataagcataacaaagacctccgtgaaaaaaattaaaaaaaaatatttcgacatatattttcgggcagggggttaactaaaaggttgtaacacaagaggttgacggtaacactcctcaattaattattggatcaacattaaattgatctaatggttgaaaatcaaagtatatcaaatcaaatttaaagcatactacatcatatttaaattacgtcaaacaaaatttatatttcatcagataatagttccacattaaaattataaaatagagtactagttacacccttttattacaatttttgtactattttggatcctatattaaaggttatttattggaccgtctgttttgttaaatgacaaaataaacactgtattttttaaaatagtacaaataaaaccttaagctcaatttctgatttttttttttaaatataaccaacttgaagataatttctagtacgaacagatgtaaaaaaacgtaatcaattttatcataacacttctatatcgggttattattaagttttattttataaaaaaaaaaattttaagggttctatttaatattattttactaataatacagggtcctgttttttctattaaaaaaaaaaaaataaagaaaactcaagttagaaacttctacaaaaaacaaggtccaaaatg

SEQ ID NO: 319237 - DNA, 592 bp, Cannabis indica
ctctaacatttatttctaaatattggggtccacaaataaattaattcacaaataataataaaataataaaaattagtgctaattgccttttctaatccacattactagagcggtcattacagaagtggtggtggccactgacactttgtgtactgcgttgggtaagtgaaaaaattctccacataagggctcaccactagcctctgaaccaactcatttaggttatctaactgaatcctctcatatttgttcactataggttgcttggccttttatgactttgaacgaaatagggttgtttcttggtcttcttctttctccttttcactctttgaccatcatccaccacattgaatctacaacaagtggaaatattagttgttgtaaaacattaaatgtttcctctttgttttgcactcgtggcttcaattttcccttttgtacatcaatcatcgctctccatgtggataagaatggcctccttagtataggtgggatatatctgttggactttgtgccctaaataaaactcatttcaatacaatcagatttactaattaataaagatcagaaattgttttatgttgcatgg

SEQ ID NO: 319238 - DNA, 1442 bp, Cannabis indica
atatatatatatatgatcaatttgatctttaatatactttatttatatataatattatatatatatatgtgatcaatttgatctttaatatcctttatttatttatatatatagggtaaattgtacgtaaaatatacctaacctttgagtttaattacttgttaaaatattacatatgattaagaaatttgtgatttactataaaaaaatcttaattttagtcatattaacaaatcttgtgattaaaagtaaaaaattgtaattaattataaaattatttttatgttattactaaaagatttatgactaaaattattagttacaaaaattataatttattgtgactaaatgtatttctagttgtaatattttttgtgacttaaattaattaaattaatgacaattacttgtatcaaaataatatgttttagtcacaattaattttttgtaccttgtgactaaaagtcacatttagtaataaaaaatttatgtactgggactaaaaaattgtcactaaatgtacgtagtttttctttgtagtggttgaaatacttaaaatttggtgagctttgatttggaatggtagaatgttatggtaatggtaatgtaagaaaataaaaataataattagaattgattataatattattaatagtttgttagtagaatgaatattagaaaacaaattgttcgaccttaatttatatttatataaaaagtttgtattggtgtcatcattttggttttattttattcaatttttgtgatatagttctcaataatgtaatgagaggattaatttataatgtaatcaattttacagtatcattgtaatctattacattacttcttacattggacagctatttcgaattaagtgtacttatttggagtaattataaggttaggtgcatttgtttaaattaagtatataattaaacgtataattagaggtaattcaggactcttgttattatactttctaattagtctctcatgacaattgtgtataattatataatattactatttttagattattaatattttttcatgtaattaatgatcattttcaaaactttgaaataagaataatttataatattaattaatatttaaacacatcttatattttaaaacactgcaaaaaattttacttttagtcacaacaaaacttgtgattaaagtgaaaaaattgtaactaattataaattatattcctatgttgtgagtaaaaggtccgtggataaaagtattagtcacaaaaattacaatttgttgtgactaaaaaactaaatgtatatttagtcacaatacttgttgtgactaaaactaaatgaattgacaacttgttaactaaatactatgttttagttacaagtaacattttgttgtgactaaaagtcacatttagtcacacaaaattatgttgtgattaaaaa

SEQ ID NO: 319239 - DNA, 974 bp, Cannabis indica
cttgttcaagtcatggtgactcccactattctacactcgaagttgtgagtaagtgatctttttcctcttcatattatatatatgttatataatattgtgtaatctattcatctattctacctttcatatatatgtatggtaacatatatttaattaatctcttttattgtccttgtataatttttacaattgagtggtatatatcttggtgtatcttccattgtaataaaatctctaacaatatttaggttgttaatgaagcatacatattagtaatctaaatcctggtaaaataaatttcaataaaagacaagtgcataaatgtagcaattgtggtgtagcaagtcatattgcaagaaaatgtcaaaaaatagttcatcgggttcattttatccggttttttatttgcacatatgttagtttatgttgttatttggttactaattaagataaattttggtgatttgtaggtcaatgttcaactaaagaaaaaaggagggccaccatccaacaacccaactgatcaaaccaaaaagaggaaagagagattgaggaagcaaagaccgagggagaataatggaagagtggaagatgcaaatatataacaatttagtggaggtgataaaataatttaattaactaaattgttagatattttatatataaataggaactaattggagccaacatccttttgatgaacttaacttttccaactttttgatgcaactagaaattaagttggagatgttatcatttttattaactaaacttttcatacctttttgtaaatgatgcaattaagtggtagatgtttatgtcaaactgtgtattgtagtgactaagtggatcattatatggaatttggacaatataacaactgtattttgtaaaacattttaatgcattttggtatatagctaaaaatatttaattatcaatttcatcactgaagccaacgatacaacttatta

SEQ ID NO: 319240 - DNA, 1713 bp, Cannabis indica
aactctgttgtagattgtcatatgagtaaaacccagtgttttgataaatctgggaatcctttattcacaagtaaactctcttctttaagcattattggaagtttgtgggagatgacttctatgatgccgtttctgacttttttgtcactggtaatatgcataagggcttcaacacaatgaatatagttcttatccctaaggtctagaacccgactagaaccaatcattttcgacccattactctgtgtaatgtgatgtataaagtcatttccaaaatcattgcaaatagaatcaaacctattttaccttctcttatttgcccaacccaagtttgcctttgtgcctgggaggaacatccaagataacaatgtgattgtgcaagagattatccactcattcaacaggatgaaaggcaaagagggtatttttgccataaaaattgacctggttaaagcttatcggctgagctggagatttattgaccatgtgatttcttgttatgggatccctcaaaaatttcacaattgggtctctcattgtatctccaccactactctcaatatctgtcttaatggaggaaaggttggttagattaaacccacttgtggtttacatcagggtgaccctctctccccctatctctttatttaggctgccgaggttctatcaaggcttctagaggatgctctttgcaagggcattattcaaggaataagacttagcagggcgagctagttctctctcatatcttttttgcggatgacctaattcatgttggtagagccaatgtgattgaagaaaaagttatttggcactatcttgagagattctatgcttggtctggtcaacaagtaaatgagctgaaaaccacaattttctttagcaaaaatactcctcctagtatgaaaagagggattaaggatgcgttgggaattggatctgctgttagtttttatcaaatacttgggcctcccgttatttagatcaagacagaaggatgttgacttcaacttcatcctggataacctcacttctatgttacaaggctggaaggcaaaaatcctgtcaaaggcggggcatgctacccttatcaaatatgtgggtctgtctatgcctatgtatgctatgcaaactatcaaactttcaaattgccttgttagtagcattgatggcttggtgtgtgatttttagtggggattataaagagggaaccatggtctgcacttaagagcttgggataagttgtgtcttcctaaatctcttgggggtcttggtttccgaaagactagagaaatgaactaggcttttttggcaaaatgggggtggattatgctgattgggggcaaatctcgctagttaaccaagtcatagaatagaactagctatatatacaaacaattctaatcaacctaacaacatttttaggacaattgttaatacataacagactaatgtggacactaacagaatattcacatgtagttacaacagatgaacaccacagataagactagaatcactagtaatataatttgtcaaaaatatgaaccttacaatctcccccttgacagattatgttcaatgagcacacaagactaataatagctactaaacaaaataaaggcgaagatccaaaaagttatccaatagcaagaaactatagaactataaattgtctttgcaaaaagaaacatagcaatccataatccatat

SEQ ID NO: 319241 - DNA, 519 bp, Cannabis indica
atacctagttcttcgtaaagtcaagcccaatacttgcaatctcggagatggtgtgttcagaaataattaggaatgtccctaccaaattgctgaggtaataagcgcggctacatatcgcttatcgctgaggtaataaggggcacgtgttatattgtgattttttacctagaaatatgagcataatctcgtatatatttaacacgtggacccagttcccagttagaaaaagatgacgtgtcaataacaagctccagtagagttatcctcacgtgatcaaaacttgtgagaaggtgtgaccgagacaaggtctagttgcacactatgcacaacatagtaaagtaaaagcaggaccaagagaaattattataggttgcgcatatatcgattttatgcaatgactaaataattcttctctgcatcccatgtaaagatcgtatctatacaagtgtctggtccaaatgactaatgtgcgtgataactcatcttgaacccctgagttcaatgttgtcagtacatgaa

SEQ ID NO: 319242 - DNA, 544 bp, Cannabis indica
cacaaataaataattctaacaattaactccaacttgattgttactacattcattaatttaaaagaaaaatgaacagagagagaatgaaagaaagagtgtgttactagtttgatattttatgttttatccaaatacaaatttaatatttcatcttaaaaaataattatataataccttatatttttaaatcaaacgctaccatgaactggaatttgattaataaaatattaaatatatatgaataaattattattaattatatgatttttaaatttaattatataaaattgatagtagttatgtcaaattaattaaatttaagttaagaatactaaatatgaacaatttcaaaaaaaaaaaaaaatagaagaacaaataattaagcatcattaaaacaacataatatcaaactttttctatagtaccaattgaatatatttccttaaaaagtaatttggtagttgtcaaccttctctatacatagaaggaatggtgctgagataaaataacttttttttttttttttctttttaattgataatat

SEQ ID NO: 319243 - DNA, 1036 bp, Cannabis indica
tttttttggcaggaatcaagtacagatgacagcacgtttcagctctatgagaagcttagtttttcatatccaaaccttctccagcctcttatacatgaacgagacactgtaagtttttttactgataattagtagagtgtggtcctataatacaaacaaataataatgatacaaacccaaccactcctcttggagagaatgcataatacattcgtcccttgaacttaaaattacaataaaaaacaccataatgaggactcagtcagtgcaccataaccattgataataaagaaagtttccacttgtttctagaagttacagtctgtttcgtcgtgtttttatttttaacatttataaggttctctggctcaaccactaagcgttgtctgcctctggctgtgtatgtcagtatctagcgtggtccctgaaacgtagtaaagctgttaacaaaagcaagagtgttgtgggtgtgatcggtaagggccatatgaatggtgtaatatatgctttagtgtctgatcaaggcaacttacgattcagagatgttgctgggaaaaagtcttcatctgttgctgctgattctaatggctggcttggtaatctcctcaagagcttggttagagacaccgttattggcttcgtattatgggagttatatgaacaattcaaagaccggttttagatttgaaaaatactcaatattgattacattatcaacacttcacttccaagtttcactcaatcacattttgggtggttaatggttagttatcatatagcatataatagtaaaacacaacgattattcgtttggtgaaaaaagagaccttatacatactttttgttatatatttgattgattagctattcgattcgtattatggattcacaatgtgactttcttgtacgctacgaaagacatttcatgatattattgtaccacatagtaacaataaaaatataaaacgcagaaaaataaatcatccattaaaaaaaatatatattacaaagacgcttctctctctctctctctctc

SEQ ID NO: 319244 - DNA, 1389 bp, Cannabis indica
tttatttccttaaatagaaatttatttccttaaatagaaatatatttcctaaaataaaaatattcttatattatatgtatacaaacacattgttgtgtgcaatgtaatgatacttacattatatacaagatggaatatcaatattagtttatttgatgttatcttttgttattgaaaatcattcaatattagaatgtcttattctttgcatgtaaatatgtgtgtatatctgtaatcatattaaattctaggttgctttctataggtaaataaataaacacaatttttatttaagtttctaaaattaatttattgatttggtttcagagtcaagtgaattgaatttacccaaagcaagaattttttttgtttgaaatgatgaatcaatgtgtacattttccttattctctctctagagcaaaagccctaattaacctcgaacccaactcgtactaatttatcaattgttcgtatagatggagaaccatagccatggttttatagcagagcgacttcgatcgttttctcttgttcgagcaccttcataagactgatcatagccttggtgatgttcatatttctctttgttatattctattcttattcattcttctttgtattttgaaattttattttttcaatgaaatttttcatttgcaataaagatagatttacagttcatggcttctattgttattacgggtgatacatgacatttttcacttttttttggattgcaaaacctgtttatgtgggctcaactctcaagctcttttcattcttcctattttattaagtagacatgtgttgctttctttggtttattgtaagtattaaaaatgtaattcaagtgatgcaacagaaggttttatttggtttaacaatgtccaaacataaggtatataggttaagcaaggacttgagcgtagttttgcttgttgaatatgtatgtattatatgcatacacacacattgtgtgcaatgtaacattatatacaagatggaagaccaatattagcttattttgatgtggttgggggattggctttggcctaattcctttcaattgcttcttgactgactgcggaaaaagaggcagagaggtttgttattagaaattttttatgccattctaacaagtgcaatctatggaatttggctaaattggactttgtgtgtatttgagggaaaatgtttagctccaatgtatagtagaagcattaaagagaacctcaaaactagattgagtctcgttcaagataagaaactttctagtaattaaatcggattgtgcttagaaatactaagttagcgtttggttgtgaggaatgaaaatatatgaataagaataagaatgagaataggaataagaatagaatagaataaaat

SEQ ID NO: 319245 - DNA, 2749 bp, Cannabis indica
aaaatattttcattaatgtgcatttttattgagtatttagattatttttattacattaacttgtgttctaattacttttttcttctaagaaaatattccttgttagctagtctcttttgatttaggaaacttcttgtaagaaaagaaattctcttataaaaagttgtttaattttgagaaacttgactttttcttttcctaattgatgatttcagttttgtctttattagaacacatcaaataaactttatttggcaggtttgaagtccaaattcatgatcttggtttaatttgaaaaaatttctttctggtcctcatctgttgttgcagctcctgattctaatgctgcaaattaaaaatcttttaagaaagttttgtacaactggaaaattatttttgtagttgtctgtagggttgttatgttctataaataggacctagagagtagtcaaacgattttatctcttctagtctcatattttatatctttttttgtgagaagagtgtttcatttgtaaaaacctagagtattcaactaggttttggttttcttattataatctcatactattcatagaacaggttgaagagaagcttcaaacaagtgtgggtcttcgggagaagacttttttaagtctcatttcgggaggaagtgagcatatgtcttcaggagaagatttatttaagccttacttcaagagaaaataagcacacatcaattgctaaagggagttcactacttggtgtgtttcagagatcagattaacaaggtggattacaaaggattgcggtaaatcactatagggagtctacatttgtttaagtcaattacttttgtaatctttgatactttactaattgaattcattctctaggcgtggctccgtggaatagtagctgataccacgtacaattctcttgtgtcaagtttttaaattctgcactgttattttttttctttattgttattaaagaaaattattggcatttgtaaaaatacagtttttcaattgatatcagagcgggacacataactcttggtgtgattctttaacgttttcttgtattttctgtgcaatatgtcgttctttgcaaaaagtggctctatatctcattcttcaaaggttggcaacaagaaaggcatgtctaagtcctcgagagatagtatatattagaaaccttttacatccaacaataaaaaaaaaaggtgtacaatgtagaaaatgtcgtggttttggacacatacaatcgggatgtgtaaatactttaaaaagaaccaaaaaggttatgaattacttactctgaaagtagtgatgaagagtaattaaataatattgcactaaaatctgtgtttcctagtgttccatgtcatttgtagaaaaataagaactttatttgtcttgacaacactgttttggtaaataatgatgttgacgatgttttttagggactgattgtgatgaatcagatttggatgaggattccttgaaagaagcatataaaagtatgtatggtgagtggttgaaattatgttcgaagtatcatttattgacaaaaggtattaaatctctttcttaacgaaatgtaaagcttgaactaaatgttaaaaaatttgaaattgagattgttgagaaaaataaagaaattagattgtccaataaacttgagcatattgagaagaatgctacaatgctaaattcaagttcttcaatttttgaagaggttcaagatttatgtcgcaaacaaatcatgttgggttgggatgtgttgaatatcaatctaaattgaacactaaatttgttaaatctaaaaatatgccttctggttcttctgatctaacactgcaggaatctatttctacagctaaaccttatgttcctaaagaaagggagcaatcaagtaagaatgaaaattttcataaaagaaggaaaaaattcattcccacatgtcacttctgtggcgttaaatgtcacatttgacctaagtaatttaccgtgataaatctcttgaaaaataaagattgcaatcattatggaaaacaacctgttaggaaaaagagatcaaaattcaagaagatttgggttaagaaacataaatctaaacgtcctactaattttacttgtcatacagcatgtgataatactagtactatacatactttcaaaaatcatgttcaacattcttgtacaaaatacattgatacgagacatcattttattaaggaacttgttgataatcaaactttgcaattggagtatgttgacactgaaaagaaattggcagatattttcactaaggccctggattcaagtcattttgactcccttaaaaaatctttgggggtttgcattgtctatttttttttaaaaaaaaaattctctattttgtacaaaaattttgagtagttcttattttgcatctatccttttttcattcttggttgacaaaacatgtttatacttttggataataattagcttagtgtcttgtactcttcaaacttttgaggttgggttaaaatattcaagttacttgcacatgtgtgatcatgataaattaaagtattaacgaacaaagttgagcgattttatttcagtttcttgtcaggccccttgctggaatagagctacccatactgaggtgtgaaagtcatcttttgagtgagctagaactttataattaagagttataaagaggatgcactactatagaaaagggctaccttcagtatggtgtgatagcatccagt

SEQ ID NO: 319246 - DNA, 877 bp, Cannabis indica
aaatattttcacttttctacttttaaaaacagaaaactgattaaaaaagtgttaccaaacgccacctaaataagtgacagtttgaatgaggtatgaccagtaaacaagaggtaagtgagattgaaaaccaatgatcttgctatgttgagtagatgttgatgtttccttttcagaactgagttttgttgtgggcattctacacaaaaatggtagaggacaatgcccttagatgcataaaaagattgcatgcttagttctttggcaatattgtcagatcgaatggccttaataggcttagagtattgtgtgcataccaggctgtaaaacatgggaatgactgtctggacttctgctttgtttttaagcatgaaagtccaagtaaatcgagacttgtcattgataattgtaaagaaatatttatattctttgatgcttatgacattgaaaggtccccaaatgtccatatggattatatcaaatacattttcagcaaagttatcgttggatatgaatggtatttttttttgtttggcaagatagcaaacatgacaaaatctaatttttttattaaatgtatttgaaatgtatattaagggatggccaaggcgtttatgccattagtctacattattttgagaaaataaagagcaactagaactagctataggaggagactcttgaaaaagaatgtaaagttttccaagtcttttagctgtccaaatcaccacatttggagaatgaacctgtatgacacaagaatcatgttgaaaaaaaaccaaattagtggtgctgtcaagaaaagcagtaatggaaaaaagttgatgttgaatgtgggaacaaagagcacattattgagagtgatgtgcttgtttatctt

SEQ ID NO: 319247 - DNA, 889 bp, Cannabis indica
tggatcagattcccaatttctttctaaaaagtttgtaaatatgtctgaatacttgttcttgactcttgccctttattcctccaatcaataaaatgtaaaaagttttcatcttgagcttaagtcaggcacaagtttcacatgagatattgaaggagccatggattaatattcaaaccaccatactaaaaataaatggaaaaaatattacatttttcatggttttcttctaggacaaattttgaaatttacgaagctagctagctagtgacataatattttttagtcttgcttatgtgcttttgttaatgtttatattttcatgtgtttattttccccacatatatataatgtgtttgtttaatatcataatctttaattctttacatattttaatcatctatctttttatttgatatttatttaattgtagaaagtattaattttcataaatggtttggccattgtccatacatttaggtggttctatcttggttttttactctactacaatattttcgttggactttatagactgtatgagacttatatgtcaaaatcaatttgcatcaatttatctttgaagaactcacagaagccacaaattgattcaatgaagagttacactacaaaaattgctgcttttagtcacaactttttagtcacaacatataattttttttgtgactaaatgtgacttttacacaacaaaatgttacttgtgactaaaacataatatttagttgtaagttgtcactaatttagttttagtcacaataagtattgtgactaaaaatacatttagtcataacaaattgtaatttttgtgactaatacttttagccacggacttttcagtcacaatttttcacttttaatcacaaattttatt

SEQ ID NO: 319248 - DNA, 1428 bp, Cannabis indica
aatagctgttaattttgcattattgtcaatctggtaataatgctgcatttgataaaaaaaaattgtaataacatactaataataatatttattcattttgatttaaatttcaaaaaatttacccgaagtttggttaagatgagatgtttgtactgctccgggacatttgcccaactgtcaaaatgtccaggaacatgcaatgcaatctctctccctaccaaacgagggaaagctttactctccaagcctactattttgttagaggcattgtccagtactaatggcaacgggaccccaactttttttcttctatcttccaaatttaccagaacatttatcccacgacctttctttaattcactagctattttgccattgaaaatgtatatgtaagtgtatttgagttaacaaattaaacactttacttaaaaaaataaaaaaaaaattaccagaagactcgcacgaagcaggtaccctagtaggacctaatgggtcatccccaccaccatctccaccatgataactagtaacatctgcagacattttatgctaaaaaggaatcataaaatcatatgagcccttagtttaagagaataaaaataactaatcaacttagattaaacaataataatagaataatcattccttaaaataaaataaaataagaacaatcagtcatcaatacaaacaatactaaatacgttaatcaccatgatgtaatatctaaatgatataatttagtattcttgcatctaacacaagaatagaaaattctcccgttacaatttttgtgtttagacgcgagtgccataaagactggagaccttcctagaaaactatatccttacgatttttcatggtcacccaagtcttataattaaatttgtttgtgtgacaaaaaatttatgatttatatacaagttgaactaagagtgtttttatgtcatttaatgatttttttttaacttttgttttaaatattattttgataattctaaaagaaactcaactaattaaacataatattttttatatattttaataataattatacattaaaataattacttattaaatattaaattaaaaatctaattataaaaaatattaaacttttttataatcattttttaataattagatattaaatcatttaaaatattttattaaattagttatctaatttttttttttgagcttagttatctaattatttattaattattaaattaattactaattatttaatttttttattattttttcatgaaatatgcaaaaatattttcttaatcaaattacttaaaattaatttcatcaatttttttatatagttaattatttaaataaaaattcattttaatattaaacctttcaataatttttgaaaaaattactaacttattataaattattaaattaacataa

SEQ ID NO: 319249 - DNA, 364 bp, Cannabis indica
taagagccattcattccgtgggtgtaaggactcaatggaggcttgaagcggggatgttacagtcttgattagttcaatgtgtttgtgaaggaattcaagatcgaattccagaataaagtaattttgcatttttcttttctttcatttttatagtttatataaaagagttaagtgtttggtgtcataaatgatttctaatgtatataattaatattaaagaaaatataatttgaaaaatcaacatacattcattcaaacctcatattttattttgtgatgattaaatattcttctttatttggcaaatataggcactttggatgagtattattaagaaaattaggtttttatatttaatttgtct

SEQ ID NO: 319250 - DNA, 810 bp, Cannabis indica
aaatttctcatggaagccaagacacaagtgaacccctgataaagttctaagacatacggtcatacactttctctatatgaaggtttataagcatatttccaaccttacttttcctcttacccatagaatgaaggatctgtttagtgatcatggaattgtctcgaatgatctattctgaacaaaggtcaattgggtgggaggcatcactttactaaaaatggttctaagtgcaaaacaatgattttcaaaattataggacacattacacaaagagatcgcgcagaagtcattgactgtagttggtccttcctttttaaaaatgagcacaacattagttctgttgaggacctttggtaactcaaaaaattgaaaaaaatgtatgatcatccctactaaattgtacttcataatattccaatgatgtagatagaatgagagtggaaatttgtctggcctagataccttatttgcatccatcatatgaatacatttaatgatttcttcttttcttggtatttcagcgagcatgtcattggtgggctcattaacttgcgggggatgcaatgttatatcctgataagtctaatggtaaataattagggtgtatatttatattatggttaatcaggtaataagtgagattatataagtgagtaaataagcgtaatttataaattatagagatttatatagcatgtgtgaatgtactatgagctatatgtggaataaaaatatttttcaagttcggcgaccctgaagactcaataagtggataaataagcgtaatttgttaattatgaagatttattt

SEQ ID NO: 319251 - DNA, 666 bp, Cannabis indica
aactagcaatacgtggctcggcacgtacattcacctagtatatataaatatatatatagttcgaggtaactaattaatttatataattaaatacgtatataatattattacatctatatattcataacgattatttatgtggaaaacatagctacgccaaaacttaaaatttaaaaatataatttgtttctgatcactgtcaaattttaataacatatagtacgtagtagtatttgcttaatgtaaacacaataagtactatacctaggcagtactttacctatagtacgttttaataatttctatcataaatatacgttataaattagtataatctaaatatatatatttatataaaatattcattgtgccttcgtctttgtgctatacctataaacatagtatataaaatttataagatgctctcacacacaatatatatatatatatagacactacaacaaataaaatataatcatgaaccaccaattgctttgggttattatatagtggtgctatgctggacaaccttagctttgttaaggttccatacttcgattcgatgattccaactaaatcaaaattaagttgtacaatattgtatatatatatattacctttttttttttgttgggtaaccgagaaaggttaagataacaacagtaa

SEQ ID NO: 319252 - DNA, 625 bp, Cannabis indica
agtggtaaatgtgtaataaaaataactttgtaagtagaaatgtagtaataggcgtgtgagggtaattttgtaataaagtgtgtaaaaaggatttttcatgtaaaaatttctttttttaattgatagattataaccatatttatataagcactacttatataaatatatatatataaatatataaatatatttacgattgcatggtatatgccacacagttgtcggccaataatcaatcttctcgaactacaatatttacgattgtggctactggcttaatttggatcaatggtaatccatataagtggagatttatttaattataatgaatatgacacaataaattataaaggtcatgttttgatttgaaatcaccgaacggagaaacaaaaacaaaactaaaccaagtttggcggaaaaattaaggaacaaatgaactttattgattgaattgaagtgtaaactatacaaactaatagcaagaatatgtggaaggtttcttggagaaattatagagggggagaaagagaattataacttaggtcgcggttagttgaaggtaatgaaataaaatggaatggaaataaaataattttcattccatctttttgtttagttttttttt

SEQ ID NO: 319253 - DNA, 659 bp, Cannabis indica
aaaatatatataattagtgcggattggattggatcggttacttttgaggtcaaacaacatccaatccgcacaagtgcggattttagattttgcaatccaatccaatccgcacaagtgcggatatccgcattttgcggattggattggattggatcgtgcggattggattggatcggataatctgtgaacacccctactgccacttgtagagattcaatcaattatattcaactagaatttcaacccaaatactcgaacaattaatttgaagaacagtgtataaatgcacgttaaaattctttaataaaattctactctttccaactttccacaactcaatgatcaatatgcttgcatgactgacctctctctactaatgtaaacaattcttgcttgaaatcaaaaggattttcatcgttgtaatataatagcttaggtaataggtagatggaaagtcattttaggctataatataacataagcacacgataactctgcaagcactcacaattaggggtgttcgcggtgcgggtggtgcagttttgaccatttattcaaaccaacccgcacatacagtttttcttatttcccaaattgcaccggcaccacgaaactaaaaaactacagaaaccgcagtgcaaaaaatggtgcggtgcggt

SEQ ID NO: 319254 - DNA, 1376 bp, Cannabis indica
gtccatggtactattgttccacaacgaggtcttagacaaggatatccattatctccttatctcttccttatttgtgcacaaggtctatcaagattactacaaaaggaagagcacaatggtgctttacaaggcttgaaattatcacgaagtggtccatcagtttcacacttattttttgcggacgatagcctcattctatgtcgtgccactagggactcagcaagagctattcaacattcaataacaacctactgtaatgcttcaggtcagcaattaaacacggacaaatcagtgctgtcattctcacctaatacaatgcaatcggctaaggaattttttcaacaactactgaatatgtcttctcagccttgtcacgtaaagattatttaggattaccttcatattcaggatgtgataaaagtattttgtttggtgaaatcaaagataagttatggaagcttctctcatcatggcaagaaaaattattttctgttggtgggaaagaagtgcttctcaaagcagtcgctcaatctattcctacatatgcaatgagttgttttagactctctaaaaaactcattaatcaaattgagaagatgatgaacaaattttggtggggtttgaatgcatctggatctggaattcattggaaaccatggaatgctctatgtaaatcaaagggtgaaggtggtatgggttttaaaagttttgttcattataaccaagcacttctagcaaaacaagcatggcgaatcttttataatccttcttcactcctaagtcgtttgctcaagcatcgttactttaagaatggatcttttttagaagctggacttggatcttatccttctctcacttggagaggaatagtatggggcaaagagctacttcaacaaggcctttgatggaaagtgagaaatggatttcaaatcaattgtgcctctaacccgtggctaccaaatcacactattttcaagcctctatttttcaaagggactgacttgaatctcaaagttcatagtttgattaccaacgacaagcattggcatattcctactcttaaggaatttttcctagatattgatgttgagaagatcttagatattcccttgtcgattattccagatgtagatcggttgatttagaatcatgaaatgtctggaaaatttactgtcaaatctagttacaaaatagctgctgatattgcagatcagcatctctcttcgggctcatctcaggagttaaaagtgtggaagaagttttggaaactcaagctgtcatccaaagtcagaatttttttgtggaaggctatcaataattgtctcccagtagcagcagccttacatcataggcacatagtgttgggttttatgccc

SEQ ID NO: 319255 - DNA, 1753 bp, Cannabis indica
gatcaaagaaactgattttaccatatgtccattatgcgtcaacacaaagaacaacaacacaacaatcgttgcaataccaatgttcatatcaaaaacaacacaagatcaacaaaatgtgggaatgcttgagaacaacgcgccaataacctaatcatatacattggaagaaggagaaactaaaacatttgaaggtaacaaaaaccaattcgacatagttgactatgaaaatctcattgatgaagaaatgatagaaaaactggaaaataacaataaaaaaatagattcagaggttgacatcaacaacacaaagttcataacagataaattccaccctgaaattgaaaaaggacatgcatacaaagataaaaaaacactcaagagggtactgagctactatgcaatcaaaaataacttccaattcatggtatggagctcgtgctctcaagaatacggtctgaagtgtgtttttgaaagctgtaattggtctctacaagcatcaataaatgggccaacaaatactttcataatcaagagtttctaaaaaatccatacctgcctaataaatgttagatatgaagactaaaggcaagcaacaacaaaattcataggcgaatgcatcaaacccatgtttctgaacataaagacaataaaaaacaccactagatataaaaggagaattgaaacacaggtacagaatcaagatgaactacatgaaagcttagagaagtagagtgcatgctacaaatgacctaggaggaaatgctaaggaatcatacagcctgatactaagtttcttgcacatggtgcaaaaaagcaaccctagatcaattgtgcatttgaaaatagtagaagataacattgtgctgtttgtttttattgctttggaagcttcgataaaaatgtggaaaacatgcaggccaacaatagtggtcgacggtacattcctgaaagcaacttacagaggaacattgttgtcttcatgcacacaagatgcattaggtcacatatttctacttatattctatgttgtcaattccgaaaatgattgggaatggtttttcaaaaattaaaaagaagcatatggtgtgagagaaaaatagtgtctaatttcatatagaaacgagagcgtgatcaaagtagcaagagaaatattcacaaaaatcacacgcgcatacagtggatatcacctagtaaacaaccttaaaaaaactttaaaacacatgctgctaagtacaacctaccattctttggagcagtgaaagcatacacaaaaagacaatttgagtaccacatgacagaactagatggcttggacaaacgcataagaccgtacttgaaaaaagtcggttatgagaaatggtcaaggattcatagtaaaaattagagatattccaccatgacctcaaacatagtagaatcactaaacttggaaaatttaatagtaagggagcttccaattacaacactaatggaatgcttgagagcattagtgcaacaatggacatatagtaataggacaaaagcacaaaacacatttactacattggcaccacctagagaacagatgatactggaaagctaaacatactcattgaacctggaggtgagatctagattatgcagtttaaattgttaaaccaaaatcatttgggggctattaaggtttttctagcatttttgtaggggtgtcccactattgttctctatgtataataaatgttggtttcaaataacacaggtaaaatcaaccact

SEQ ID NO: 319256 - DNA, 1762 bp, Cannabis indica
tatgagaactgatttttttttttaaacaagtagcatttagtttttgatattaagaatattaagtttaaaataaaaaaaatacatataatgcatctggaccctccgcgtgtccatatttatgagtttaacagaagtggtagtaacggatgtaaaagaattgtaacatggggtatttttacctccaaaaataaagataaagtatttaagtgtataaaatctaaaacattaggtatttatgccgcaatttaccctattgaaaaatacaagatctaatttgttattttacaaaataaaaatccaatcggtaatttttgtaaaatacatagtctaaaatagtgttattttttttatgaatcgactttacacgaaaactgacgcagttgtatacttataatcatggggaattatcaaaatactttttaattatgttttatttacaattttacggcccaaaattttttacttacaaaaatacgcttgtaaagttttgattaactctgttctgattgcaatacaagcttattggagtcagattttaatccttccaaagaagataatcaggggtatagaagcaatatgtagagctttcttatggaaaggtcaagcaatgtaccatggggttggatcaattaattggagtaccatctgcacaccaaaaatagctggaggattaggtattaagaggctagaagaatggaacaaagaagctatgtgtaagtacatttgggcaattacaaataactaagaaagtttatggatgaagtggattcatagtgtatacttaaagaagggagattggtgaagtcaatctacttccatccattctagttggcattggaagaagctagtggactttaaagactaggtcaagggcctaattgatgtacatgaatctgctatacataaatactctattacagcaggttataaactcttcagtccttcaatgaacaagctacattggagtaatgaggtttgtgctcgtttaaatgctccaaaatattattttatcattttggtgggctatgcattgcaggttgaaaacaaaagataggctgctgaaatttagaatccaaattgaagagaaacattgtctatgtcaagaagagaaagaaacggcaaagcacctgttttttaaatacaaattctcagaggagtgccttcaaaggatcaaagattggttgttttggaaagcaagaagtaattgattgcctcagctgatcaagtggattggtaaatcaaaaatcagtaagtttaaaaaacaattataggcagcagcttgtgcctcccaagtatacaatatttggagagcaagaaatgttataatttagaaggaagagcagctaacaccgagtagacttgttaaggagataaaagaaagcctaaaactaagaattacaatgttcctaccaaagaaattcaatcatgaagacaagaagtggtgtcgatcattgtaaataaatatactttgaatgtaaaaagatgtaattagttgctgatatgttgctttgggcttctaattgaggtgcctctaggttgtacaaaatttgtcatgagcaatacaattcctgatttatcaaaaaaaaaattaaattacaaaaatacattttgcttagcaaaaagtaagaaaagaacaaaaaaacaataaaacttcacgacaactataaataaattataaaccaactagaaaaataaccttatgacaattataatacatctataaataaactataaaacaaccaacaaaacaatttattgtttt

SEQ ID NO: 319257 - DNA, 1330 bp, Cannabis indica
aacaatttgcataatccaaacattgtgttgggtattatgtaattatatatatgtattatgatatatatattataatggatagttgaatgtatgcaaatatgcaaatcattaattatatggtattttaggttagatattttattttatttatttgttagacaaaatatgtaaacaattattttgatattgtataggtttttccattgtaattttaaattttttattgtaaattattgtatatacaatgtaaaaaattctcaaatacacaaaacctacattgatgagtgaactcgagtttaaggaataaaccttaacctcatcaagattatgattcaagacattcacaacgagccacaattccaaaggttgtggcttcaagccatgagaatcgacaacacacgagatggacgtgtgcatgacctttcatgggccatgcatgcatatcgtgcaaccagtaagaccaaaaccgtgagacacgattgggcttaggctgttttacagccaccatggcgactttagagtctcagtgctccgtccaagacagtcgaccagaccaccatggtcccgtggtcaaaggagcaacacgggttgggaccaaatggtctcgtgtatttttccagcctagttcatggccttatgggtcatttgacccaatctctcacactaggagctttgctccgtcccaccctactccacttgaaagtcatgacccagacaactattaagccaccgatcacgcaagtctccattctcgatcacgatggcctgacctccaccctgtccgaatgtatatatatgtatatatattatattataatataatataattttttttcattattattaaataatatgtttaattttttaatagattatatttaaaatcttaaaaagtgcattatcatatgttaaaagttaaaatatttatttcaaaactaatattggatttattattatatatattatataattttaaaaatatatgatatttattttccttttatatggtatattaataataaaatgttatatgtatatatattaattaaacttatttttaaaaattggttggttatttataattttaaattatggttaagtgatatttaaatttttaaaattattataagcctataattatattatattttatatatttaataaataattggttattttatttttccaaaatttaaaatatagttataggtggttataattattagaaatattttaccaggatctagatttactaacatgtatatttgattataaatctataatcatcttaaatatgaatttcctaaaaataatgaattaaacacataaa

SEQ ID NO: 319258 - DNA, 1415 bp, Cannabis indica
acgcttcctcccatgcggcatttaatgcgacttgattgctcaagagaaccctgacacctcacggagatgccttggcgttgtgtgagcttccgggagcatattgagttccatgtgccttctccgggacctacgtccgggatgttatcttatggcctaaagacttagcaaatattgtgaattgcttgatccacgtgtccctgtctgattggtccacatatattgggcaaaattaggggcaacactatgattaacgcttctactcaattcagctaccaagttcccaagatgtaagtattggactaatacgactggtcagttgtaacgaacaagtcaaagaacttgtatagtacaattaagctagaactcaatcatctcaagattggcatcaattgacctaagatcaacaaagtgacattaacttagaaaagacataacaataagtagtttactttcaatatcggtccagtccaatgtatagccgatacatccgatactagtttacttcgtaaatacattggaaaggacattccacttatacaagtgtaagtaaaccgtacgctaatcatcacgtcagtgtaaatccagtttactgataaattgtaggactagaatcatatactcataattatttttcactgtgtagacgatactataatcatgaataattatatgttagggatttaatagagtttatacattaaacatgcaatcatgaaattaatcatgtcaacatccaatataaaatgatttctgatattttattaattagtaaatttgattttattaaaatgagttttatttatggcataaaatctcaataatttctttaccaagattacatccccataatatgcctcacattcttcaataatattggagatgactaggcgtattttgcgagacgctagtcgaggtgtttcctggcttttattgtttaagacaagtcttaagatagcccttaggaatgtattttctttgctccttaagttcaattctctcacgtcgtttatgagcattccgagatgaatagtcttttgctcatatcccatagtctttcaatatacttatgagtatgtgggtcaatgagctgcaagctcttaaagaactcgttatccaccctttccaacgactcatccctttgtattctatacatgtcttgcttatcttgatcaagctcgagatgcacttatgatgttgttgcctcactaattattgtattcataattgatgagaatcatggggttccatcttaaaatcaattggtgatgagtggagtagcccatgttcttatatatggctcaatacttttacatttaatccatgtgggacaatattgtccaatattccctctcaagtatggtggctattttgctcaccaatcttgaatcaccttatcataagtagtgtcatttgct

SEQ ID NO: 319259 - DNA, 1062 bp, Cannabis indica
aaataattaattcataaataattataaaatgataaaaattagtgctaattgtctttactaatccaaattactaaagcggtcattacaaccttggtctttcttccaggaagcatacgtctcatccagaagcgttacttcttgtactgacgtggagacactgttacgaggagtttgttaagcttgttatgtcgtgctaacttaacaacttagcatgtgcagctaccgattttaggatacatatcctagatctataaataccaccaacacttatcatttcaaggaggtgattcatcaaacgagttacgagaggtgatcttgtgagagaaagatggagaggtagagagagtggtacggagaaaagagagagattgggttttggttttgtatgaagaatcttctgtagatgaagatttttcttgggtaagagtgtgagagtaaacactttgagagaatccaacagagaatcgatatctattgtattttaccctattcttgctcaatcaataataaagaggatatggtggtgttccagaactagagtagagtcatagatcacatcgatctataggacttgaactagtatatatcttggtgttgattctattgttttattgctttatcgattctgctcttttaatactctattcatccatgttttctcttattgcagtttgcgtctcattaatcatatcattgctaattgtttggtgattgaagttttagttatttcgattctggactttattcctaatttttccacaaataaaaaattaattatttttcatacatattaaatttatttctatttatatttttattttcattctaatgcttatattttcattcttctctatcaattgtgccctaatagttgtcaaaattgttatattctttaatataataatatgtagattaaaatatggtaatatatgttattatgtaaatagtgcttgataaataaattgtgtaacatatgatttatttaacctaaaattataatctacactttgtaatatggagaggagttacaaaattcattgcttttgtaactttttttagttg

SEQ ID NO: 319260 - DNA, 576 bp, Cannabis indica
cgcctaagatagttagggtgttacaattcctgtctaaaaaattggtattgtgtatataaattctcacattactttattcaatgttctctatgtccctaatttccacataaacttgttgtctataactgagtatgttgataccacttccaatcttgtgttttttagctaaaaatcttgtactattcaggatcattctcagaatgtggtgattgggacaactaagagacatggaaaattgtacctacttcctcaggttacacttccaattgcctcggccaaccattctttttttattatgttcaaaataatgtagaccaatggcacaatcatcttggtcacccatcaatgtacatttcagatttgtttaataaaatagaataacatttcttctattgattcttgtcagttttgtcatatatgtcaccttgcaaaacaaaaaagattaccatttgtctctaatcataattttgctatgaatatctttgatttagttcatatggatatatggggcccttttcatattaaaagtgtggaaggctacaaatatttcctaacaattgttgatgacaaatcaag

SEQ ID NO: 319261 - DNA, 1567 bp, Cannabis indica
caactctacacaagtgtaaagttaacttagggggaaaattttaacccaaaaactttccttggtgacgtggaaattaatgtttgacatgtgccaaaaaagatgacatctcaaagttgagtaatcatgagtcatagcagtacctaggaggggtccctagccgtgcgcctaagttgacttcggaaactctaaaatagaagttcaaacttcgataactcatttccaatgcactatcttttagtattttgtaccatgaagacatggagcaaccaaatctagcccctgtgagctgaaaatacacgaaccaaaacctcagaagtcaacctgggtacctacggtttcaccttacgcccaagttgacatcctcaactagggtttcagtttctgggattgtctaatgaaaatgggtcaaaatttgcattggaacatgaactagacataccatagacatatttgaggcatcacaatcaaatttgagaaagtttatttttgagcacccacagcactcaatgcctgggcacccagcgcccaggttgacaatttgtctagttgggccccttataagtatcaaatcaaaaatttgactcgtgcatcttatttttcttcatcaaaaataagggaagtaagtgcttttagggaataaacaacacttcttgggtaccaaaatcacagcccaactcgcaagttgacatttggggctgacccaatgcctaggttgatgtttggtcaacctgggcaaattatgaggattctttccaagaactattttgagcatattctccattcttagcaaggattgagatttaactatttctagggaccaaatagaacttccagatggccttaagttggacctaacacccaagttgacatttgacactaggccatctcgagtcagtttctcgaaaaagtgttctaggcattttttccatcatcaaaaataatgaagatagagaaaacttagggagaaaaccacaaactatgggagaaaaccacaaattcggggcctggaaattgagcccagcgcccaagttgacttggtgcaaggcccaacacccaggttgacaatcaacctgatgcgctggtttcgatcactcaaatgacaattatgctccaaaaattctctccataacagttaaaaatagggtaggagaccttgtgctcttgttctagaaccttggaagtattaaaactacatctcaaaagctccgaaataagcaactagcggccaagttgacaaatagtctagtgcgttaggttctgcttatctgatttgatttagtctcgacccttcatctagtttttcacaataattgagaggcatgtgttggactttgtgccctaaataaaactctatttcaatgtaatcttttctattcaattatcaataaagaaacagaattaatttcattacttgtttatgtgttatttggttcatgtgatcatttatttatttatttgatttataaattcatccaaatccttatcacattgatattcttgtttattgtgttgtgaacacagtggaaaagtaatcaagagtgtgtgattaaatgtattcctatgattt

SEQ ID NO: 319262 - DNA, 1762 bp, Cannabis indica
ttaaaagttatttttaattaaaaaaaggtttttaatgattacaaagggtatttctgtcatgttcctcttttttgaaaagacgcatattctctgattttggcggttctgcggtttcgaggtacatcagaattaaatgaccatcttttccacttccgctttgaatcatgtccataggattaaatctttctccgatctaacgaaaccactatcatgggcataaaataagaaaaaatgaaccacctttgcaccatttcagaaagtttgagaaaaacccttaaacttcttcgtcaaggatcaccattaaatccgtttgaagacttgcatgacatccttgtccttgacctttttcctgagagtttcctccgacttcatcttctcaaagcgatctttgcttcgtttgaaggtttgcagatggaattaccaagcattgccccaagccctaacttcaaacggtaagttgctttcttctttctcatgtttgttacataatgtggatcagttacttgatttgtttgtatcgttatcatctcctctggttttggtaggtttttttagggttaaaactgttcatactaggattaaggcagtacgtaggttgttttaagatctccaactcattactcggtggtgagctcagtacaccaccggcaccaccctcatttctcggtgccaatcaatcgacatttgttttctagaactggtttgtcgattctctcttttaattgattaaaatgtattatttattagacattgtttttataaatatagatatacagtattgttcggtaaccattaaaaaatctatgtttggataaattaatcaaaaaccatgaagaacttgcaagattttgttaagtaaaatttaaaaaagcaaaaaacaaaatggttcccgaacaggccatataatgtatacatttattgtttgattttgttttcaaaatcctttatatatacatataaatgtagctagattaggttttaatagtgtttcctaaattaacattgttcttgtgaaatctattacacttttgagtctcttgatctcatactattttcttacaagttatattatatctgaataataaaatgtaataaagaagaaactaataaggtgaggacgttataatggaatgttggggtgtagtcggtgcaatatcattaacaaattattctatgcaagttattttataaatttttaatatagagaaaactgtaacaattattatgcaagaattacaagaaatgggagcaaacttagctattctcgttatttgagctactcttctcttctttgaataagcaaatattatataacaaatgagttagtctacttgaatatcccaaattcatatcttaaaaaaaaaacataggcctcgtggagggttagcttttggtgttggtggactctttatatggctagagaatgatcaacatcagctttgcatttaattagaactccccttcagctgctgcttctaggagattatagtttctattagtagacactactaatgagtttgacattattgtttgcttcccacctgccattgccaagacatatcaatgttatttgaattgattcattagttgtgtaaatataaaaatataatgttttaaagttttattgacatttttagtcgttgttaaacttatatatttatgtaattttgtattttggtaattttttttatatatgatatgataatagttataaagattaaaattttatccacttttattttaatttgatgaatttataaat

SEQ ID NO: 319263 - DNA, 1412 bp, Cannabis indica
ggcatgttttaactctgttttggcgggtttggcttgcaaaattctttcacacttttaaaggtctattgtttgaatcgtaaaacatatttacagtaattggttctcccgttttattccaattattgataaagatttcaaatttcagctttaaggggttcaaaaaagtattcttgaactcaatcttatcttttgttttgactcatatagtttaaacatatgaatatattgcactaaaataatcaactctatgttttaagaatatgatatatggggtttaattttaaaattttatatgttatttaaacttttcttcaacgacttgatttttggtttaaaaatgaattatttacttttgattctaaaatagtatatatacctctgtttctatcttttttttctttcttttttaaatggaaaatttgagtttctatccgtagattggtgttgatgcacatgtaccttttttttattggattttcatttttctaatttagatttaatagaaactattgacatattaaaattagggtaagtgcttctaggttgtgccttggacaaacgaaagaacacttaaaagattttactttctgagtcaaaattatatgaaaaaaattgatgtaatcatgttattctaacaatcacatgattaatatacttttataatagtaacaagtaaaatcttgtgtatttgtgcattgaaataaaaaaaaaatcataaaatttctctaaatgatcctttcttgttgtgatattaagttttttttgttactctttatatttgtactacagcttgaaggactagcagtaatactcaaaatctcacactgttattgttaatttatttattttgttagtttgctctgctgtcatccaactaactctataattaattgacttctttaatctgttgttcataaatactgacttatttttcagtgtatgtaataattcattcaaatcaataatacagaaacacactcttctctttcattctctctctctcaaactcaacatgtgtaaactgaacatagaaaaagggaaatggaaatgagcttcaaaattatgaaacaaataacaaagactcagaacttcaccaatttttgcacatagaaaaactattagaaattgatacacatttctacaatactcaaattaagtctagaattttctacacatttatcgaaaaacatactctaaacttttagataattgtagaataatttagaattttctagacatgtaaaaatacaatagaacataggcatttctagaaaactttagtctagaggtttctagttatgcatgcttaagaaatatgtagaaattattagaattttttaattatagaaatgaattttctatttatggaaataattttttatttatggaaatgattttctatttaaggaaat

SEQ ID NO: 319264 - DNA, 807 bp, Cannabis indica
gaacatcgaaagctcattatctctttttttttttggcatagttttctttcttttgcactagtggattctaatattttagcacataaacttataaggtgttagataatgaggtggtatggaatatttgtattatattcactctcaatattatgtgattctgtgcttattgttctttaattaaaagttatatatttttttattaagaaaaaaaaataaggaaaggaaagaaaagaaaatgtgagtgcgagtcaccaaatttgctatctatactgaaaatgtgatgaaagtacctaaacctaacgagcatatttcttgattacaaatgtattattaatattattttagaaattaatgttattattaatataatcctatgaacattatatatgaacattatgaactcgatgggtattagaggttaaatttcttgagataaaacataaatgattcagatttaagtttaccaaattgttattttaatctaaacacaataattcgaagggaaatttagtaaccacttaaatataaagcatggtctctaagtataccaccccttaaagaacatacgtgagaatgtttattttgttctaattatacttcttaaataatagggtaaatggcggcaaaactcccaatactttcgttttagtttcattaaacccccaaaacctaaatttctgcgggtaaacccccaaaactagtaaactgttagcaatttaacacttccgtccaaatttagctgttaactggcacgttggattgtccacgtggacacaatatacacgtggcacaattttattggtccac

SEQ ID NO: 319265 - DNA, 625 bp, Cannabis indica
ttggttagggacatattcaatgaaagggatgttgagattatctcaggcatcccattaggttcatctcaggaggacgatagttttgggagaaagaagctaatggcttttattctattcagagtgcttatatgtagcttcagtctttgaaagtaagaaaccatgttgatgatagcttgggtttttggaagatgtgaaaagtctttaaaaaaatatttatttttttggcctaagctacagtggtcgcgatcacaaaccttctactcgtgattaattatatggtcgtgacgaggctattatatagttgtgactatgaattttacaaagaggcctttggttttcaactttgttgtagtcgtggtgagggcttagatattcgcggcaagggtccccaatcacctttaaagccctacttcaaaaaaaaaaaaaacttggtagtatcctgatccggttctatctgtatgatcagccaccgccaccgaaccccttctgatgggagtctaaggtaagtatctcttttgttttaagaactttgtatcttaattgtatacaaaaataagaaaaattattgggagacttctctaaaaagtgtaccaaagtactcctgattgacatatgtcaacctggg

SEQ ID NO: 319266 - DNA, 528 bp, Cannabis indica
tatataaatggctatttcaatagctgggaaaaagtagaatggctactaattaaccataaacaaaattcacacataaatctcattatacattatgaaattcaaacccataaacaattcagaattatttcaaagcttcttgttcattaaacaattagaaagagcaaaaaaatttattttgatattccaagtcaagaaaaaaaaaccaagttcaatcataaatatcaataactctagctttaataaacttgaaacaaatcatgactgtaattaaactctatcgaaattaaagggtcaaaatcctaaagttaagagatccaatgatagtgatctatatgagagagtgagagagaagagaggttaacctaagtaataaaaatttgaaaagaacaaaagaaaaaagtacacattgaagtgagcagaatactaagtaaaaccaaaatttccagcaaatttaggcaaaagtttgaaattgaatgcgtgcctgctagttagaagtacaatgagataacattagtatgataattttaa

SEQ ID NO: 319267 - DNA, 2569 bp, Cannabis indica
tttagggcacaaacccaacaatttgcccttaagttcgcgtggaaacttcttgcttgtgggtggacttattcgaccactaagctagttggatgggtgacacatgttctctctacagtatctgcggtatttaatgttaccgtgagatctagacctcaattggcgcactgacagttactgtatatatgcatgttgtcgtatgtacttcccaacatatgtgatgattatactttattgggagaaacctaaattttatatctttggattaccatattagccatctaactattggtttttatggtccatatcaaagttataaaagcggaagcaaaattttgataaaataatttttatctaatatgaaccataagtccaatgaccacaacataatgaatatagattaaatctaatctagtgaaagaaatttaattacatcttgatgtctatcaggttatccttattcttttttgtcataacaaattgcacatccaatccaagaacttgattaaaaaatccacaccttgatcttccgatcccgtccttaataattaggaatagagtgggttattagatcttataggatgaacagattaggtattacagtttgaactcaactcatgagacactataatgagattaggatttagtatctcacacacacttagaatagtgtgtacacgtgtgagactagagagagagagagagtaggcgtgacagaaagagaggagtgagaaatatatcaatcctattttctctttaattgcctctatttattttctctattttttagtttttaaaattgttgctatttacgatactatacatccttatatatagtgttataaagaaaatatttcatcctttatttaaaataaaagataaatatctaatttgattggaattcaaaattcaaattcaaatatcaatatctaataaccgaatatcaaaatatctttattttaataattattcttttaattaaaaaaatatctaataatgtatttaattaataattaaaaggtaattaatcttaatttaatttaaattattttcagttataaaataatttaaccaaattaatcatggacatttatatgtcaccctacacatgttgaataggcatacacgtgtgagccatattttaaggtctaaaattgatttctcaattttgctacaaataagatttgttattcattttaccaataaataataatttttaccaataaataataattgattaattctcattaatctcttattatcacaaggattaaaataaataaataaatattattttctctaaaataatatctttctctctttaatattcattatttaataataatattatatttaagtaattaatatagttttatccaataaaattaaatagttaaatactattaattacacaattcataattttcataatttgtaatatcccagaaacctaattatgaataatttgggcttgttatatattatggattaactaggtagtaaagagtagcattacgatcctgctaacctaatttagtataaattataaattttgctataagtagataaataggcataatttttttaattacagagatttatttgaaatatgtggatataatgtaagttatttgtgaaataaaaatattttcaatttcggcgaccctggagacccgatcgcaggccaaaaatatgataatagttttacttagtaatgttgatggaattattgaaataagttgattttagatataccgtagtattttggggtacttggagttgaacaaataccctaaaattaaagacttcttagtggctaagaaataataagacaactattcataacaaagttttattaatattaagttattattactattattattatttacatttatcagtttaatatatattatatatattaagtttaaaaatatatcaaaaagaccgatgaatgaaaccctccgttggttcgacgatacccttatccccctctaattattttctttgattttcaacccgaaaatctagtgattcaagctccggtagtagtggaatagaaaatacttgaagagggaaggcttgaggtaaggattggtatcatgttaagcttaaaacgattggttttatatagtgattttttgaattagaatagttatggaggttctgacctcataaaagtattctcgggtagctataggactagttccaatatttacttgttgaatttgaggtgattttgagttagaaattaagtttgggactttttaaggcttaagtcagaacgttaatggatttttctatttaagggcttgattttaatttttgttacgtaagaatagttgtacttattgtatatctgtgccttgtaaagtttggagtgattacgataggtttcgatagcgtttcgatgagtgtaaaatttagaatttttgactttcacccctaccaaaccgatccactagttggtgaaccggttcatggggaagcggttaactgtttcccatacggtttactgtttctgggaagtctcaagaaattgagaatcgtatttttgccgtaacttttcact

SEQ ID NO: 319268 - DNA, 426 bp, Cannabis indica
actaaaaattataataaaaccaaaaatatgagaagaattgttaagggtaaccagttacctcctgaataaccaattaccttttcttccccataattaaatttgatgaagaaaaatactcatatttttgcaaacttgtgcatttaaaaccataaaaataaaaaaattccccttataattatgcctattttttctttccaaaaaaaataaataaataaatattgtgcctatttttataatttttttcctaatgttaagcattttctcaaattcctccaaaatttactattcaattcctcgtgagccaagataatcaaaaaactggagttcctttcgagcttcaaacattttagattcattttcaaagatgccgtaataaatcaacctttgttataaatattattaattatgtggatgtccaaatctttt

SEQ ID NO: 319269 - DNA, 582 bp, Cannabis indica
aaaataagtaataaataataaaactttatatgtttcaactcattcatttcctttacaaaaatcatctttatatgaggataaatattgataatgaaaaattagaacaaaatttgtatgaatatgatatatgaattgaaaaaataattatatttttattgtttgactcactattcttgcaccaattaattgttaaatttatattagtattacaccatatctcattagtaaatcaaaatacacaccaaactcttaggttttatagacttataatttatttgcacaaattttctctctaaatggtaagagcagtctttaacatacatattcttttatttagagagaaattatttattaaaatcattgatctcctatatttatttgcagcatacaatacaatttaaattgaatatattgtattttaccgtaattaaaatagaaaaagtataatatatatgtgacagtcagtagtcccgtgatccgtaaggggaaataccgggtaagctgtgcaatcccacatcgcctggggaaggtcaagtgggatgattctgagattgtataggtatgagactacacagttgaaga

SEQ ID NO: 319270 - DNA, 2185 bp, Cannabis indica
ttaggatttttacctcctgaactttgacatataccaaaccatgtcccctgaacttttaaggtcaatgaaatgctcattgaactatttaagattgttagatttaaggactttttcaaaacagggtgtatttatacttatagggggtgtaaatataacttccctaagatttatttgcatcccaataagtacacccacatatttaagaaaaaataagcttaaaataattttaaaaaatctttcatattatttttaattttttttaatattattttgcgttaatttcaacactttattttttaattttattttcataatttttttttaaatcatgtataatttttttatttttctaataaaatttcacataattttttgttataatatttgaaatataatttatttttatttgataggtatatttttttaagaatatgaattagaagaaaacaaattaaaaagataaacgaatatagttaaagatatatattttacataaaataaaaattattaaaatagagtgcatttataaatttttagagtgcaaataaaactcccctacaccattttatacttctgtattttactttatagtttataccatgtataaacaaagatttagataaaatttattgcaaagggccggcctcactataaatgggcccaagatttttcttttctttttgtattgtatctaaagttgtttttagtattattgggcttaatctacaaatttaccattttatactacatataaatttataaggaaattacattgtatactcactttattttacttgttttaatttttacctctatttttatattctttaagatatacccacttttatagatggtgttctattagaccatttaagttaatgtaaattatatgctagatttaagtagagagtaggggtatattgggcaacccactcataaaagtgattatattttaataaaggataattaagatttttacccccaaactttgacgtgtatcaaatcatacccctaaacttttaaggtcgttaaaaatgctccctgaactattgagatgattggatttgaggacttttgtccaattttagtaaaaaaaaagtctaacatggataaaagtttaggagacatgatttagtacatgtaaaagatcgaggggcatgatttggtagatttcaaaatatggggagcatggtttagtacataaataatcactgaattagtaaaattgaatgaaattagacaaaagtccttaaatctaacaatctcagtagttcagggaaaatttttaacggccaaaaatgttcaggggatataatttagtacatgttaaagtatagggggtaaagatcctaattagcctttaataaaatataatatgagcgaattttgaatagtggatataaaaaagaaatattttcaatttattccattttttcaagatttcttaaaaatgggccacaaggcaatgtagcagcccaataaagcaaggagtcccataatcgcaactttgctagctttttgggcttatatcgattgtttggatcattcggttgggcctctcttctctctaccctttcaaaaatttaaacaatacacttaaaataattttttttaaacatttttacaaacttttttcatttacatttgtacagttttgtgctatttcaacattgattttatatcgtcgcaatgttacactatatttccgcagaaaacaatgtgtaaacaacgacggtctgtaagaaaaaaattctgtaaaaatataaaaaaaaaaaaaaaaactcgaaattccgtaaaaacgtaattttttaacctttttccaaaaaggcctcattttgttttttaagttaagattttatatgtaaaagatgcttttaaaacatatatatttataaaaggtagttcaccagttcttgcatattatatcaaaacttttattcagtatgtgacctcttaaaactttgattcataaaaatgagaacaaaatttgaagatcctaagacaagatttataaggggctatttatttatattatttttaaaagaaggtacttctcatatttttatttttggtttacatatgatggtgtatagtatagttatatagtagttgtttgaaattttgatttaaattcttttagggtttcgtttggtatgtctttattactactgtattgtattatatt

SEQ ID NO: 319271 - DNA, 739 bp, Cannabis indica
attaaaaaaaaaaaagagagaacaattaatattatttagagtgattgtagagtacaatgtcaccctcttatatctttaattaaatatctaatacattgaaacttattgattggaatgttcactatttcttcttctagtctctccactaaacttgtaatgaaaaataaattttatagtcatttgaaagtggtctatattcacctatggttgccacaatttttaaattttacgcagtacaaaaatatttcactaaataacttcttaaacttagaaactaaattttttcgtattgtcttatgcattagattttcttgcaggataaataaaagacacattgactatttaataattgataaattcataaaaaataaattaatagagaaaaaatatgactaaaaaaaatttacctactcatcaataaaaatcatatggagacttatgagttctccattcttcttctcgtattgagagagttctacattctacaaactctaacttttatattcccagtgtatatatgagtatttaagtctgtgagaaaagaatattccatcattaaaaaagaagaatgaacttgtaaagtctttttttggcaagttagttgacaaaataattcttccatttatggtaagattgttgtgcattcatattcgatttcttaccttataaattcggattgtagttgcccttttccttgtttggaaagttgcactttcagctgaactttcctttgttgaaa

SEQ ID NO: 319272 - DNA, 542 bp, Cannabis indica
ccgtataaatgatattttagagaagaataatgcatgaattcgacaaaaactcaaatcaaggtttgggaaaaaaaaatcaattccaatcaaattttaatatctaagataccaaaacatgtttaaggtcctcagagcatatacaaaaaaaaaaaaagtttataaaagatatttcctctatttataaagacatatatacttttcattataactaattacatggactatatatatataatcactaactatataaatatttataaactagatattaactatataaatatatataaacttttatttacccttgatcgtttcttttacaattaaatccttcttcctttcttttataattaatatgacttgaaaatgtaatgttctcaccttcttatagattttatcacgtataattaagtaatcaggaattagatagatttagttagtgtatttttttttttaaagaaaaaataataaaataattaactaaaatattaaaacataaagttcaatatattttatactgttataaatattaataattatgt

SEQ ID NO: 319273 - DNA, 805 bp, Cannabis indica
atgatcatgcaattaattaagttcatcacacattttagtttaaaaaattattataaaatattgttcactatttacaataaagtacaaaaaaaaaaacatttataatatcaatctcctgatcgatattaaacaaagaaaaaaaaaacatttatatttataatttcaatctcatttttgtgtagggatttacatatcatgtcaagaaaatttgcgtatagatcactttgtgatataaaatagtgaggcacgtatataactaatattaatactagaaaaggacaaccccaaccaaactacaaacatatgaattcttgacttttctcgatccttgatggatgtataatacataatacataatgtaatttaaatatgtatataataataatctgatcaatcgaagtatgtatatatcgagtacaagttattacatatatgcacgcatgaaattaagaagctgattcattatataagcttaaccaaacaatataaaagcttgtataattagctgtcaagtgagtatttagaaatgaaattaataaagaattttctttttctttttctcattttaatatatattaaagtacaaagtatattgcatcttaaaagataatattgaaattaattattactaattaccattatgtgatccaagtcatttttggttcagacttggtacgaggatcagcgtcaaggacaccatctttcgcattttcaatctctaactgtgctatataaatatatatatatatatataggctttggatgtgatcacgcattgtatcaaatgcgtaactagtgactcaca

SEQ ID NO: 319274 - DNA, 1140 bp, Cannabis indica
tcatcccagtgaattggagatcagcactttctgtcatataacatctcatagggagctatcccctccatatggtactctgataactgttgttgtatgagaactctatcagtggtagatacctgcactaggagccttcaaaatctaacacacaggcacataactgtccatcagtctgaggattgaacgttgtactgaactttagtttggtacccatggctagttggagactctgtcaaaattttgaggtgaacttcggatctctatacgatataatagactttgaagtcccatgtaacctcactattttttttcacgtataactctgcatactgatccactataaaggttgtttttactagtagaaaatgggcagagtttgtaaatcaatctaccacaacctaaatagaatcatacatccccgtagttttaggtaacccaatcacgaaatctatagtgacatcttcccacttccacacaggaagtgtctgtggctgcaataatcctgtaggtctcagatgttcagccttaatctgctggcaagttaaacatcaaaatacaaactctaccacatctttcttcatcctgcaccaccactagaaagattttaaatcctgatacattttggtagtgccaggatgtaatgaataagtagtggtatgagcttacttgagaatttattgtctatgtcccgcactacctggaacataaactctagttctaaacaatagcatcccattacccgacaatgtataacctcttctcgaatcttcactagttctggatgagctaattgagcagctttaatcctgtctaatagatctcattgcaatgtcaaagtattaagttttcccacaataaacacaatacctttcctgaccatatcatctactacgtgaggtgaaaactcgattatactagtcacttgcccgggaccctttctactaagggcatcttccactacattggccttcctaggatggtaaaggatttcatagtcgcaatccttagccaactccaaccaacttctttgcctcatatgttggaaattattttagaagaagagagagagagagagtgggcgcccaggtatagagagagaaggcttaggtttttctgaatgaaaagtgtaatttttctgaa

SEQ ID NO: 319275 - DNA, 563 bp, Cannabis indica
ttcttcttttttttttcttgatgtaggtgttcctggagctcttggagcagccgctgccgtctccttcaattcaagccacgcctgcttctcatatatataatgagatgcatgtatgatatatcatatgccttgccatttctttttcacattggccccttgtagctttctttttattttatctttttttttttttgtattttaattgataagacccattgcaatagtaattcattggtaaatttaggcatgtttcataagatttggacttcacaagtaacaaaacatgacccaatacactaaatgccaactttgcattttaaactcctaaaacaccccacatgattgtatttaattcactgggagactaaataaataaaaatttgacataaaaaatactaaaattaatatttattcaaatctaaataaaaagtgtgatgctccgctcctcctcccatggtgaagaagaggaaaggtgtctcgaagcctggtgctgtcagcaaaagcgtcgtgagagcgagccctaagctgccctcaatccaagatgatgttggaattattttacc

SEQ ID NO: 319276 - DNA, 607 bp, Cannabis indica
attattattattattattctttgagaaactctattaacacataattattacagatatcaccttattaaaaaaaagtctttggttacaattttgtttcgccagtattatttttgagcgtaatttatgatcaaattctttgcacttttaagtttgttatggtttaactctcctagaaatattatagctaaactttctaatttcaacaattgctttattaatcagtatttcttccgttaatttttaagtgtttagtgctaagagaaaagttaaaggaccagtagtgcttagtaccaatctatatatcaatatcgctatttgtccaactaagtatcgcgtcccatataatttaatatgatagcttttagggagtatcgctagccaatcgcaatgcaacatgtcgagaaggtactaatcaccactgatgcctaatagcaatactcgagtgctaaatatatttgttactgtgtacacaaatatacacatagtaaaattttaatagaccacctaatattaattattaaaaaaaaaataaaatattaaaagaactaaaatcagaaaataaaataaaaatttctacttttttctctctctttttttttttcctttt

SEQ ID NO: 319277 - DNA, 1968 bp, Cannabis indica
cttgaactttcatccatgttagaccttttttttactaaaattggacaaaagttcttaaattcaacaatctcaatagttcagagacattttcattggattatgtttaactagtctactcctatcctaagccctaactatataataattgagatttgtttaataatagttttggttatattaaacctactcatttgtcttgtacttatcttgtttaattgttatccccataattattttcatttttatttttatttgcacatccttccaaaactaattaaaaatctttattagtttcctttaaaattaaatttatggtaataataagtaataattattagttgtcattatatattaaagagtaatttatattgtaaatatttaagtttaattttcggttgtaaataaatatttaaatttatttttaattgtaataataactaagttatgtttttagaatttctgtaagtaattgactgttaagtgtcaaatcattatccacgtgtcattttcttattagtatatttaaattaatttttaaataaataataaatatttaataacttaaacaatcatgaactgtcacgtggccgttgatttcacacttaacgaccgagtactgataaaagttccaaaattataacttatgtattattatagtaaaaaattaaacttaaatatttatctacaatcaaaagttaaatattagtatttatacaataaattattttatattaaattaaactatttaatgcaaccatcaagttctttactaacaaataataatagagaaaaaatgtactattgttgtgggtgggtagaatttttaattatttttataaataattaaacataatgtgttaaaatttgaaactatcaatcatataatctattggctattgtaataactagccatattcttcaaaactatattaagaattaagataacacaataacatggaccactctagcaagtttttattttctcaaagtttctaaattagggacaagaagtaattatttattaatttaattgttggtttgtatatttatataatccatcatttgattccaatattgtccaaaatgagtagggtttgtttggttggtaacagggccggccctaggcgcgggctaagggcccactcattttaagagcctaaataaaaaaaaattcttttaaaagatatacatatttttttaataatttttaaaaatatcatttatttttatagtaaaagcctaattttttttcctgtagtccatttcaactcaagaccgaccctaattagcaacatagataaacataataatgctcctccttcaatatgaaatgaacaaaacatcttgagcttctcaaactatttttatatatatacatatacattataaggatattggctacttcaattatataatttgtgacatttaattctataaatcatttttttttattattattatgttgacatttaatttgtgacatttatcaatttgtgtcgaaatctgttttgccacccttagttacaggtaatttattaatcatttttatttaatttttaaattaatcacaaccgttttacaatgatgcaacaaccaaaataaatgtaaccaccatagttacatatttaatataactatttaaacctcctctatatatataagtatatgtgtattcaaattatgcactaaaatattacacctaataacatagtagtttttgactcaaaaataaaataaaataaataacatagtagttttcttccggattctactattaaaaatcagtgtcatatatacactatttccacccaatgcactaaagtattatacccactaaccgttaaccaatcacaaatactattttagactttgtattttgtaaaagttactaattagatcctctgttttgttaaatgataaaatgaactctgtattttctaaaatcataaaaataggaccctaaactta

SEQ ID NO: 319278 - DNA, 800 bp, Cannabis indica
ccttcttgaggtaagggacctccagcttgggccgaatttaaatgtgttagcctatttttgatccactcgcacaagtggcccaatcggattatgtttttaatttcatccttcagatttttacactcgtttgtggtgtgaccgatgtcgttgtgatagtcgtatcttttgttggggtccctttaggagctatccctaagggtggaggcttccgataatgcgtattttgtcggatggcaaagtacacacgttcttgagaatctgtgagctcaatgtactacgtgtattggggagtatacccccttcgttgccttttctcctcagtccgcgtgctacctttagaagatctcttgctctaggaactttgctgagctcgtgccatactagtggctggtgtggatagggacgaaagttggacgctcacccaagagggattgcttacaggcgccccaaagtgcgacagtgctggggttaaggcaaggttctggttgtatcttagagtagcagagaactgtattctgcttgtttggggagcattaggggtggagcttcttgaagttgtgctcctagtgtatatcccgacactcccgttgagtaataccctccgtaagcaactatttggacttcttccagattaatgtatttctaaactctcttttgaaagtcctggaggctagccgctccttcctgtggcaactcattccaaaaaggggatcttgtacagatcccggcttggagcagggtcagctgttgtccgtcgtccaccttcttgattttcgaggcctcctccttgaatctcttta

SEQ ID NO: 319279 - DNA, 1085 bp, Cannabis indica
ttaattttcaagcttttgttaataaatattccttagttccaatcaattttgttggcaataaatttacttggaaacatggatccacctatgagcgtttggattgggggattgctaatgataaatggtttcaccattatcctcaagctctccttcatcttcttagtttttatgtttcggatcatagggtattaaaattagttctttttgatgataatatgtttaaagttagaaataaaaggtttcttttcgaaaatcactggcttactgaaccctctttcttcaccactgttaataattcctggtcttcctctaactctggttctaatcctaatccgttgtcgaactttcttaataaacaaagtaattgtattcatgccattcagacttggaatcaatccttcaatagtttatcatataggattaatgaaattgacaggcagcttaatgacatctcttcctttcttcctgcatcacctgagcagttgtttgaagcttctaaccttcaatctcagcttgatagccttctttataaacatgagattttttggaaacaaagatctaaagtccattggcttcgggctggtgacaaaaataccaaattcttccatcataaagcttcatctcgtaaaaaaactaattttattagaaagctcacccttgatgatggtagcattatttccagtaatgttgccattgaagctgaaatctgccgttttttctccactctattccattctcaaggtagtagcagggatgctattaacttgcttctctctgctgttactcccaggctaactattcaacagtttgcctttcttgatgcccctttcactgctgaggaagttaagtcggctttgtttcagctttctagggataaagctccgggttctaatggacttaatgcctatttttatcaaaaaaactggagcactttaggagatgatttgtgcactgcgattcttgatatccttaataataatgccagcatggcttctattaataaaacgctcattgtgcttatccctaaaaaatcgaatgcttcttctctgaaagatttcagacctattagctgttgggttttatgc

SEQ ID NO: 319280 - DNA, 1530 bp, Cannabis indica
tctctgtgattatatctctttctttctctcttgttgcaacaaacgggagcgctttctttgattcctgtatgttccccgttccactttcacacctctgtgatcacacactactgcaccttaacgtggaccctacactaacctaccccacccttccatatatatttccattatatttatatatatgtgaagagactacgatgtatcatggataagatggtattggtatgtatatatagattaaatcaaatattcataattgtcacaattataaacagaaatatctgtatcaaattactattatactatagccataaggcgcatgcccaataatagacttaacatcttttcattgtaattaacattcattttcagggacgtcttagtaaaaaaaaaaatggggggctctttgttgacttgtcaaaaaatataacaatatgtgtacaaaatataagatgtctttaaatgtgttcttgtgtttattccatataagtatcttcttttttattttgttttttttttttattgcagcaggatagttaattgtctaagtctaaataaaggatatgtttagccaaatcaaaaattacattcaaaacgttgagaaccctcacttgactaactatatattcccaataaatgtagacaatacaattataagaacaatttaaccagcacgttcaatgcaataacatattatgaatagtcaataaatatctacaaaacaaaataagataataataaaaaaaaattaacaccttaataatatattaataaaatgattaaagactattctccttatttaaaagaaaaaacatccctccaacatattgtatttaaaattgaacttgtcgagaaattttttataatcataggctcacaacaaaaccaaacccaataatgaataaaattttactatcacacaatttaataattaaaatagataatgtgaaagaatgatagtaaaataatttaaattataatatatgaaaataataaataaaagacttaaaatatttatttgccaaaactaaaaattcattaagaatgaagctatgagcatataatggaccacttttcttggctatggcttttggggatcatcacatgtttgcatggatcgcagcagaaaattaccctaaacaagtaagagccataattattgtcacaaaatcctttttttttttttaacaatgaacaaatttttattgaaaaagatcagcgttgagtacatcgaaaagaaaatatagaaaattctccatccaaaatagcttaccatctaccctgagtgcatgcacagttaattcataagcagctttattgacggaccaacgaacatgaatcaggctagatcttttctccattctccatcagaaaattagacagtaaactagaaagatcattgcaaagagaagatctcttagcaaaagcaaagattacagctaaacattcaaattcaatagagaaggagctcgaggaactcagcaaggccaaggagaaggagctcgaagaactcagcaaggcgaaggaaca

SEQ ID NO: 319281 - DNA, 2060 bp, Cannabis indica
tggtgctttctccttttgatctttttaggcaaagtctaagcttgaatttttatgaaattttatccttcctttgccgaagctgaagctggcctcataaaaattcgacttgactctctcatgcacgatgtttttcttgcaagaaagatcactgggggtatggcacgtcttcaatccttcttctggaatgtaaggactgcttgaaatatgtcttactctacttgaaatatgtcttgcaagcggagtctaagcttgagtttttatgcaacttttgccttcctttatggaagccgaagcttgcctcataaaaattcaacatgactctcctgcaccgtgtaatgttttacccctctatattttgcaagcgaagtcagtgtccagatctctcgtgcactttagcctttcctaggtgagagctgaaagttttccatcacgaaatttagcacgacttttgcttacaaacacggacctcagtgtgtgagaattgactgtggaaaggtgcaggcccagcttttcttccgggaaaccagaagcctgccatgccacaaaagcctatgcattcccttatgggatctgtatcatggagggatcaattggggccagctatacaattgggttctcgcccaccaacccacgattttttctcaaggaaactaaaaagtggccaattacgctttttaagagactcccctccaagtaatcattgaaagggagggcatggcttgtaaaaacagtatgcttccttgagaaagagagaaccacactcaaacctcctccataagaactagaaaaggacacaagttaggctccaagaaaatgaccaagaatttgactccgaaattcccaactcatttacggggtaaatgttatccgcatttttgtaagcatgacacttggattttaatcaagaaaagccaaggattcattagctgccaaactatcccgactgatgcttcgggaagacaaaggcaccaaatttgcgagaaaagtctccgtaaaggtgagttccccgacttccagctacacggagggtatctttgagccaaggtgtccccctattccaggaactaaatccatcgactcccacaacaagcatgggttttcacagaagggccaatacatttcaagacacactaaatcaggctacccctttggcctatggaagcctcacctaaacgtgtcagcctatagatctagtgagattatctcgcacgatatgctattatacatagcatgcgtgtccttgtgtacttgagcaaatgatccaacgactagggataaagggaaattcaattaggagaagccctgaggtgacacgcatttgaggcccaactcgtatgatatgccgcccttaaatgccatatgggaaatatgccacctaccaatccaacggtcaaattttaccccaacgatgatccatccaaggtagaacatgcaaagaagttggcctataaataccctaaaaaagcataatacgatgaccttctcctttgaaaaaaagacccattcttgatcatcccaaacaaacacatttttgtaaccctactatgaactccagaatattcctactaagcttcctcttctccaagaggaacacgggggaaaggaattctagtccattatatctttatttgtataaacagtttccagccaaagagcctactaaatggactcgtggactaagaataattaacacctgaaccacataaaatctcttatttattattttgctatgtacttcattattactttcttaagctctaaaaatatttagttgttgaattactcggtaaacacaagagattggacatactaaagcagatttaactccatgtcctatctagttgcaaggtttcaacattgatgccctaatgcccatgggtaaaatccaagtgccaatcatcctcaagggagataacaaagggagtgcattcaaacattcaaccttcatggtagttgactatcttacagcttataatgccatactatgctgactaactctagttgactttggcaccgtgacttccattcaacatttatgtatgaagtgttggaaattattt

SEQ ID NO: 319282 - DNA, 1221 bp, Cannabis indica
aacttttacagaacacacttttgttttctgtttttaaaattgaaatacaaaagtggttacagaacgcagttttgtttttcaaaagcaaaatttttaaaaacaaaaattttaatttcattttgtaattaaaaaattagaaaatataagtgttaccaaacggcacctaacttatgggatttaattcgttaaaaaaaacatatagtatataaatatataaaattaaaaacataaaatatatttatactgcaaatatcctattttacatgtgagcaatatttatttggtctatatttacaaagttttaaattaagatcatcatttgattcttaaatcctccaaccctttgttttactaaacataaattgtgaatgttaatgttattaaagctaagagaagacttcaaaaatatattatataagtttattaccattagggttgggtttgaatcaagacggactaagcccgtacttaaggcccactcaatccagagactcaaaaaaattcattatttttaaataaaataacctaatatagtttttattttgctaagactcacccaatctgagaatcagaatgagtcttttaacatattatatatagaaccatgtcattcacaatacaaaaacgtaaatgaaaagtttaacaactaattccatacgctactatataatatgtattatatatatatatatacttgagactatatatataataatttcactaattcaaataactaaattaacgtgtgcatgctgttacagtgtcacacatataaatttgtatacgtaattcaatattcttattccccaagtataaatatattaattatcacacccacacaaagtcaaaaggtcaaatacacccttattatactttgatatatacatgataaattgatcaaaataatattaattcttttattttaatgtaaaatgaattaaaatcgataaaatatatatataaattgaatatatatgcatgtacacggccaattcattaattacatgatcgaaagaggttctttgtaattagttagagtaattcaaatggtaaaatatgcatgcaacacgcatatatatatatactaggtgaatgtacgtgccgagccacgtattgctagtttcatttaagattttggtatttttaagattttgaatgtattttatttttaaagattacaaatttttttgttaaaaaaaaattaaatatttatatttgaaa

SEQ ID NO: 319283 - DNA, 1866 bp, Cannabis indica
agtgcttttattccgggtcatctcatctcggataacattatggtgtcttttgaagtcttgaattacttgaagcggaagcgaaaaggaagggatggtttcatggctctcaagcttgatatgagtaaagcgtatgaccgtattgagtggaacttcttgaaggcagtactttcaaagcttgggtttgtaaccaactggatgaatttaatgcttaagtgtgtctcgtcttctagttacaaggtggttcaatgggggtcgagaaatggggcctatagtaccaagccaaggaattcgccaaggggattcgttaactccttatatctttatcctttgtgtagaaggtctatcaactttgcttcagaagtatgaatcgaaagggaggatccatggttgcaaggtggaaaatagagcaccgagaatctcgcatatgctcttcgctaatgataactatctgtattgtaaagcaactaagaagccatgagagtttgagagctgctccaaagatttgaagttgcttcgggtcaaaaggtcaatctcaacaagtcctccatcttttacagtaccaatacccaagcagctatgaaacaacaaatcaacactctcttaaagatgagacaagcagatgagaatagtttgtatttagggctgccgagtcgtaggggaggaacaagtcaacagttttgggatatctcaagggttaggaagaagcttcaagggtgggatgcaaaaatcctttctcgtgctgggaaagaggtccttattaaacagtggctcaatcattaccaaacattgccatgagtgtttttcttatgcctcttgagattagtcgagacattgaaagccagatggcgcacttctagtggaacacttcacctggtgataaaaaaaggcatacactggatgtcatgggagcgtatgtgccagcagaaatcagtgggtggaatgggttttcgcaaccttcgagacttcaatctagctctttgggtaaccaagggtggcgcctctcacaaaccattatctttggctggccgtgtctataaagctaggtattttccaaatgaaaagctttctcactactcaattgggaaataacccaagttttgtgtggagaagtatttgggaggctcaatccattgtcaggaaggggggttcgatggagggtgggtgatggtctttctatctccgttttgggcgaaccatggttgccggatgaagaaaatcctatggtgatgtcgtctcacccaggattagaaggggctatagtcaacaatctttttagagaagagggtggtggatgggatatggagattttggaggatatgtttgatgagcgagataggaatttgatcacaaagtgcctttacaagtgactcatgaaactgatcaaattatctggtatttggagacttcagggctctacactgttaaaagtgcttacacgttagtacaacaagaaaaaggtgtgactaatgaagagtctatcacgaggttttggaagcggctttgggctttgaagattccaccaaaggttaaaaatatgatatggcgagcaggtactaactgtcttcctaccatgtgtcaacttttaaccaaaagggtggttgtaaatgtcgtgtcctatctgcaatgtggaggaggagactatattccattgtttagtcacttgtcagtagattaaatgttgttgggacagagtgggcacatgcacacatctgctacatggtcacaactttctagtttggttgaaggatatatttgagcggttggagcctgataaaagaggtttaatagccactctctgcagggctatttggaacgtcagaaatgagaccgtttggaagaagaaaaaggttagtgctttggatattg

SEQ ID NO: 319284 - DNA, 1040 bp, Cannabis indica
cacttgtggagcctaaccccttttgcctttaccatacaaactctaattacctcttaccacacataacacatatatatatatatacacatgttattacccttataaccctaaggggttattaactaatagggcttttgaggtctttttacggtatattataatttaatgggccaactatagtattaagggtgctctcatgtgcctctaacatataattaagttgctaaccatcccattatggttatgagtaacattaggcacataattaatgattgtgtattatggaattaaacctatgattgtattagtccattataataattctaacataaataccaaaaatatttgttgacacttgacaatacttgaatgttagtttttatttaatttcttaggttaccaacccttgcatgtgatacttttttaagcatgaaatgtacaatacatgaatgttagtttttattccattctatcatgtacttctattttggtagaattattactaattaagtgcaagaagttgttagatggtatgaaagattgttttgtttctttaaagtttgttaattaaacggtctgcaaacaatagagttcactatttagcgagatttacttgttataatactttggtaacatttaacaatgtggaattctataacaagcacatcaaaattttgccaattatatacgtacgaagaataaaacttaataaaatccttaaaatttttaaaaataatttagaagaaatttttgatgaatgaaaaaaagagagagaggtagtacaatttggtaaaagttatatttcagagacaaaattccaaataaagtattaaaaaaaatcgcggttaaactctctcaattattatttcacttgcacttaattctccaagctcaaatattagcagtaaactcttccaaactactgaattattagcaaatttaaggtgtcatttatttttcatagttaactgccaacatgaactgcttatgtgtatactcgtgatatatttatattgatacacctaatattgttattttaa

SEQ ID NO: 319285 - DNA, 754 bp, Cannabis indica
cactttgtcaaaaaaaaaatatgaacaattcactacaacaaaaaataatttaatgattcatttaagagtataggttttgaacatgtctcccacataaaagatatcacgctgtgtagatatctatagtgttaacatgtttctttttaataaaataataatacattaagtgtttacgtattattatttgacatccagacacatcacgtcgaagaagacatcattttggtggtgacaagaggagaaaggaggacggggaattagaaagatcacaagagttaaatatgtgaggatagaaataagagttgggaaatttaagaggaaattttagttttggccgaagaatgatgataagacgccatctccgccgtgtgtaaggacagcgttttgaccgttaatgttcgaaaaattccgccccggtgacgaaaaggccacagacaatttgaggtgaatgtgccaaagtccatttgaggtcaatgttgcctatagattgctaaaatatagtgtatgtgtagggaatctttatcacatgtttactagtttaaaaaagggtaaatggcggcaaaaccccaatactttggttttggttttgctaaaccccacaacccaaatttctacgggtaaatccccagaaccactattctattatcaaaaacacacttctgttcccctgaccccgttatgtgcctacgtggctcaatccaagtaagcagcagctcgacacgtcataaattattatgacgtggaaataaaaaaa

SEQ ID NO: 319286 - DNA, 1249 bp, Cannabis indica
aaatggtatttaccctaatttatccaacgtaacaataaacttgacagcatatatgtcgtgtggttacagtacacagcatatatgcagtggcaccagcatttatttttaattattattattattattattattattattattattattattatttaatttacatttatagatattgatattattattatttataagattaaaaatattatttttacaatgcattctcttaaaatttgatttaaaaattctcttatatgctaaaatagataggaggtgcatcagtagacccctaatacattataaaattttagtctatttttcttcatagtcatatgtatattatagttatttaagatatcctgcaaaattttaaaaaaaaaaattgaaaaaatttaacatgccaaaaatgaaatgtaaattgtttgttgcacgattgattcttttatttggagggatacattataaaagtacctttttaatttattgtgtgtaaatttaaatgtaaatactataattatttttattttattacaaaattaatatactaataagtaatttttttagtgtaatttttggtattgtggttggagtaaaaataatttttgacactaaatttggtgatagtgtgacaccaaatttggtgtgctcctttgagatgctcttagttttatttttttattattaaataaataatataaaaaataggaaatatataataaaaagatacaaaattttaagttgacatatttaggatagttagaatctgtgcgacaccctaccataagaattgtgttctctcttttaaaaccaataagcatcattttattagtggagcactaagataaatttaagtatttatatcgcaaatcagtttttttctatataaaaaattagatttcggttagcaatctggattggtccaatccaaaaatccacagaccaatttagaaactttcttgaaactgaccaaagtaaaccacaatttaatcggttcaaactgtccaaaccaaacttcttttttgctctttgcaaaattaaagacttctttttttttacaatttcttctcctgaatctcctcaagttgagttgattggagagagaatatttattttatttctttaacatcattaaaataataacaaatttatatatcaaaacataatttaaatttaaattgataatatatataatataaaggaagaggtttcaatggttacatttttatgtaaccatcatggttatattttt

SEQ ID NO: 319287 - DNA, 863 bp, Cannabis indica
aaaaaaaaaaaaaactaaacactatactgactttgtgccttttatcattttttattatatatataatacaatacaggtcaacatcaatgaatagagtttgcattcaaatttctgttttgtatagtaaaagaaacaatggcaatacagtaaagtgatccccactaattaattcccaacttaacacaattttccaggcaatacgtcctcaatatgtgtcttattatgttattaaattgcatatgcatgttttttctattctttttcctccaccaataaacatgatcccatatctttatgtttacctaaataagaaattaatagacacatttgttttacattatcccatatattttgtttaatatatatagattaattctttccttaacatattaattttattattattttatgttaattttttttttttgatcctaatatgttaggacttttgttcctcttaagctttttattgatatattacatgcttagtttaagttcttgtatgatggaaccttttttggtttaatttcaagctttgcttttattataatttttgacctaaaagtttcaaaatttttatatattttgtttctttccttaaattagtcaccttagatatattgtagaaattaagtcacaatcaaaatccctcaaattccattcgaaatcacgcattttgggtcggaaaaccaccttagatccgactaggtctaaccgggttgcgcctggcccgttttatagcaactagtagggctgaacattttgaacgggtttgacccgaacccgagcaacccgcccgaacccgaattagtgaacccgcaaaattttttttaaaaaaaagtttcgggcgggttgggttcaac

SEQ ID NO: 319288 - DNA, 1393 bp, Cannabis indica
atcagttgattgtagtgcagcaacttcagggagcgtaaggatagaactttcctcatcagtgagggataatgtagagtggagattgtccattacaatattcataaaagtgaaaaaagagtgatttagtacaggaggaagaagccggcgatggaggatgatgaaggaaatattggaaggaacagttatcttcaaagatgattttgaataaggaagaataaaacagttgaaaagaggaaaaaaccgttaagaaaccttaacttccacagacccaaaaaagggcacactatcgaaaattacctcagtttttgattttttagagaaacactcaaatggcgtgtttaactaattggtctcttatcaatagtattagtaaaaaaacttactttcgagaaaaaaaggaaaataaaaaagaaatatagaaaatgtcatgtttggctgacatggcacatcaataatattagtaacattattattgtaaatttaatgtaaaaaatatgaggaaaatacaaaatttatgggttttttatggttttttgttccaaaaaaaatatgttttcaaaattttgaggtgttgccgaatacagatgtgaacaatgagtgaaagtagcggcattcgtaggcccataaaatattattgggccgcgtttccattgtcaaagcatgttcgctgccacgtgcgaatggcgtttaactgcgtgggtgggacatagtccgcatttttggactctttcacccattatttagaccagccgaccatcctctttcctactttgatgataattactcctttttcatttggaatcattatcacattttaaataaactcagttttcatatttcaccttaattccttttcttttcaactttgataaaaaaataaagtaaaaatagaaataaataaaaaaaaagtttacgatcttaagaaatttgaatcatgttaaatctctatataatttcttgtttgtcgttagggtcatcatatatatatatatataaagtgggctacaggaaaaaaatttatttttgagcccttatattagaaaaatgtggtatttttcaaagttagtaaaaaaaatacataactttaaaagggaaaaaagattttttaggctcctgagttaggtgagccctaggcacaggcctaacccgcttatgtccaaggccgggcgtgtatactagcttattgttatggggtatattgaaaaatacctcttttatttatcaattaactaaatctacctctaatttatatttagttgaaacatacctctttttatatgtattgtacctaaaatacactaacataaaggaatcacatagagagtatattgaagtgacaggggcagaattgacaaagtattttaaaaaaaaaggtaaaaatgatagattttaa

SEQ ID NO: 319289 - DNA, 2474 bp, Cannabis indica
gtcttgatggtggttgagctagtagaccatatacaaaccaccatataatatatcaaaatttattttaattctaccgaaattttgacagcataacaattgtaatcgaacgtctccaaaaattttaaacatgcctaataacaaacaaaatagataaaacaatttaaaataaacaaaataacattaacactacaaaaattatccacccatccaaccactaacatgtattcgcagaacctatttcactatggttgaatatttaagatattcaaactccaataagcattgataattaattaataaaaaaagttacctcgaatgttaaaatttggtatataggctaaggaaggaacatgtttgctacttccctaacatatctacacccctcaattgatattgtgatttcagcatcctcttgtcgcatttctgaaataagaactcgggcatgtgaatcatcatagggcaaagtgtgaactgtgattggaccctcatgttcgtatagataagcttgggccactatgttgtcaatactatttgagcagagaaatattgtcttattagttgccctctgttcagtgaaattgtacatgataggtggctcatataggagaacaaactccaaagcataattttgtgaaccctcatcctcattagcgtgttcttgtggaacatacgactgatgagccacttgtccttcttcctcatcctcatccttattctactcttgtttggcaatatttttcttctgtttaagggatttgatttctacttttaatttctcaatctccctctaattttgagccacaacatcaaaaaatttccttttcttcctgtcaaatagtttagacgctttggcaaggaacctacaaattaataaataaagttaacaaatatttatttgtctaactaataaaatgatatttttcaagtactagcatacccagcaatccttacacgtccacgatgctttggtgtcccgagcgcctgcgtcagaatgtcattttggcaatggacttgaacttgtctctgactaacttgctcctccagttgagcctagtgcacgtattcaagcaattatattcaagcaattaatatatgatttatatatatatatatatattaactcattattactttatcagggattaatatatacttactatcttatcgataatttctatgtcgtaattagtgacaagttttgttttcttggtctaagatttgatccaaacacggtggcgtggcggatcctgaatctcaaggtcctttttctgcattgttttacaaaacttaaatgagtactattacattttgatgcacattgctaaaaattcattatattaattacttaccacatcttcttttacattcaccattctgctccgaccacttcgatgtctagattagttttttgccgatctttccctttgtactttactcaattcctaccatgcaaaaaaaaatacattagctaccagtttttgtatttaaaagtttatcatagtacgaatataattagtacctgaaattcaggagttaggcgacttgtaacaaatttaaaccagtcatttttgtcgatttcaagatgcttttcaaggatgtctgccaaccgttgcagatcattttcttctaatgttggcataatgatgtccttggtcattcttgttggaatatatgttaccaggatctagatatactaacaagtatgttggattatattctataatctaacaccctaaacatgaatttttaaacatgaaaattttttaaaacaatgaaataaacacatataaagttctagaaaaccttatattggtggcaatagaatgttatggctccttctgtttagatctctaactattgctcctttctgtcgcagagtaataacaagatctgaacctggatctccttcaagtgttagaattcttcacaatattccgcactataattgagtacttgacttgatatgagtgggcatgtactctttcactagtggcttgaaattcaatgaagaagaagagggattaagatttcaaaatacaaagaaggaggctctcaatttctagttgtttgacaaggaatgaaaactaggttatcaggttatgagaatgagagtcatcttattctttttatagtatttcatctagggtttaggatttaaattatatggaataaaaaagataaactaatggctaaaaataacttaagtggctggccatacatagtggactccactagttatacttttgtcattttattcagtcatttatctgttctttcactaatgccatattttcaattcttatcctataaatgtcaaatctatttaataattataattaattatcaaataaaattttcatttaacttatttattaattagaccatacaaagtctcttcattaacaaataacccctaaaacctcttttctttacaattaagcccttgcttagtgaaaattcataaataagacata

SEQ ID NO: 319290 - DNA, 2241 bp, Cannabis indica
tggtaaaactttaatctctttgctagtgcagtttgcaaaatacgctggtaaaagctgtgctggtaaaagtgacatttcttgtagtgagaaaaactccactaagaatcaacacattgaaatacaagaaccccaattaaaaaataaaaaaagaaagaaagaaaaaaggcaaatcattaattaaaaacaaaatctaacaattaatatatatgtaaacgaaaaaaaaaaagaatttgtatctttaattatcatatcacaaaatctagaacatggggttggaaaattttgtgattggactcttcgttggaaaattctgcggctttactttgctattttcaccctcataatgtttttctaaaaaatttctcattgccatcaacaatcgccatcaaacttgcaatttttcaaggaaattggtttaggataggagtgttcataaaatagtcgatcaaatctaatctgcacgatacaatccaattaatctaatgcggatatccgcatgctgattaaattagattggaaaattcaaaatctacatctgtgcggattgcatgttgattgacatgtaaaaataaacgatcaaatccaatccacacatatttatagaaaaaaattaaaaaattatgtatacaataataacatttttatgtaaagaaaataataatttaaaagtctaacacatataatacaattatatttcaaaacttaataaatcaaatgtatattttgttcttatatataatttttttctacgtacaatttttttttcttccttttgttatttactattttgtttattttaatgtgttgttgaatatataaaataactataatttattttattttgttgttagttatgtgatttttttttaaaatattaaataatttaatattaaaaagtaatcaatctaaaataaccgatccaatccgcacttttgcggattggatttgagctattgtgcagattggattggatcaaaaaaataaaattcacatttagtgcggatctgatgcactatgagcaaaataatgcggattagattggataaacacccctagtttacgattataataatttatttatatgtatatatttgagagttaacgggggagagttagtcgttaaatttaacaaaaacaaaaaaaaacaaaacaaaacgttaaataaggaaaatgaaaattataatagtagttaggaattatggcaacatgatttgtggttatataaattttattatttttgtcgtattagttatacataatttagaaagttgttataaataatctaaaagtcaagtaatttataaataatatatataaatagagtatattatgttttatatgagattcttatatattattttacaaataatgtgtagttatgtttaatctgttttaaataaatacgttaaaaatgtaagattacaattgctaagatatttatataattaagatatctaatacgtattaaaaggaagtttttctaatatcatatttacacaaagggctgcatgaaatttcgtagacatcaaagaagactataacagtactactgttcttgtttgtagtagcacatataggcatgagtggctgcgctaatctgacctctctttttctcactgcacaatatatattacactatatagctctataaacattatatacagacaaaaaatatatttgtatattttctggagaggtatgctttgttaagttataataggcaactttataattaactgttcaaaacaaactttgacaattagtataataagggcaaatccaacactaagctaccttctaggtactttggtgcatctcattttttattttttaatataatatctttaaactgactaattagaataaaaaagaagaaaagaaaagtaacattaggagcgatgctcgacagtacagcacttcaagtatttacatttgaaaagtcattttttttgtttttaagaatggatcttattttactgacagccacattcgatagcaacccattgaagttgctctaaaaatgtagcacgtagttagtagtttttatattatttattaagatttcatttggtaacacttttacttttaggtaatatatgattaggaggaataaaaatataaggataagattaaaaatggaaattagaataggaataaaatgaaataaaatttaaaatgcataaaaaaaattgataaaaaaaaattattaaattttttcaatcttgcattggaatggtcttt

SEQ ID NO: 319291 - DNA, 839 bp, Cannabis indica
atatgggatgggaaagttttctttcatccggctcaaataattacactaactaaagttaaaaagaaactcaatcatcgttagtatttagaggtctatcaattaataaaaaacttggtaattttttttattcgtcaagaataggaaaatcttgttggttctccactccattttgttaactaacttaaggtaaatttgatgcagcattggagctatgaaggtcaagaatgaatgcaatcaatttaaagaattttgtttggcaggaaacgctgaagggtatataattgttatacaaatatttataatctaattaacgataaaccatacttaattatttgcatattgtacttttgtagatgcataagggcttttcaaagagtgaaacaagagcatgagactctaaggatgcagctcgaaacttattttaaggtactaattatttataatttttagatgttatataagaattccatgtaatctgtttttttttttatatatgtgtctattaatatatatatttgtgcataactatacaatttttatttttaatatatatttttatcataacaatataataattttttatatacacatatttttattttttatttttatttatagtgtttatccaatctaatcaatttttgctcagtggattaagtgggacttttatatttttgatccaatttaatcgacacaatagtttaaattcaatctttttcataaaacgcagattggatcaattattttacattaattatatttattattaaattatttaatatttactaaaaatatatttttttttacatgactagcaataaaataaaatattttttttt

SEQ ID NO: 319292 - DNA, 675 bp, Cannabis indica
ataattgcgtgttaaaaaaattacggatataaatttgattgacaactaccatagtggcgtagtaagtgaaattaaacatgcaatgaagttagaagttggcatttactgattggccatttaatataaggatcgaaataaaataaagaaggccactagaggagccatactggtgtttacattaattttcattggcaaattaatgtaggctttattaacttatccctaaaaaaaaagggagattcaaactttatgaccttataaaagtacgtattttgaaaaaaatatagtgttttatttagaaaagtatcaaatttagtatatgttatattaattttgtagataattattattgttcattgattattataaagctctttatttaccatgacaatatatgtattttgtttaaattatatgttgtgtataacacaattttatttttgtgctaaatgcactcaaaatggtttaaggaaattatatttaaaataggtaggcatttttagtttttttaacaaataaaaatcaagttttccttttataaaatgaataaataaataaatctcatgtgcttaattactttgaattgacatacaaattaatgtatataatgccaaaccatcttaaaatattgagtgtataattttgaaaaaatttgaagagtgattcatgttgtgt

SEQ ID NO: 319293 - DNA, 1272 bp, Cannabis indica
atatttggtagaagaaaaaagggagaggaaagaaaaatggggagaagcgaaatgcggatagaaccaccaaaattttctcctctaattgggagagaaaattgaagagaattttcttacaaaacaacattgatgtaaaatgagaaatgctaaaaaaacactagtggtacttagccggcgttatatcgctgttggtacaattaagtttcgggtctcataatttcatgtaataacttttataaaatatcgctaaccacttgtaaggtgccatttttaagtagtgtctagtaccactggtgtctaatagtaatgttcatgtaaaattactaatttattttattaaaagaacaattttgttaataatttaagggtaatatagtaattttgtaacaagttaattttctttcttcgtaccaaacatagtgtaaatcttgatgatgcaggtaaatactacctattggacaacaagtatgtgaatctacctggtttcatggctccatatccagatgttccatatcatttgaaagagtttcctgatggttaccatccacaaaacgcgaaagagctatttaatcaacgccattcattgttacgaaacgcagctgatcgaatttttgggtccttaaaagctcgattccctatactaatgacagctccaccgtacccgttacaaacacaagtgaagttggtagttgcagcatgtgccatacacaactacatccgaaaggaggaaccgagtgactggctatttaaactgttcgaagacgatgatttaccacaagaggagtcttctccaccgccgccacctttggtggaattggatcagcaaccgatgaagaatgtcgagaattctactggtttggacattcattttgatgaagaacagatagaattgtctctgcaattgagggattctattgcaactgaaatgtggaatgattatatcaatgacatatcttctctgtagattctttgtttgtgatcatagtttcaggctgggtttaaaaaaattggacataaacatgtgtcttcttttttttttgttcttttcaatttcttgggggtgtaaatttggaacaaaaaatgtttatagaaatgaaatatactattagaaggtctgaaacggagattcgttgaattgaatgacgaatataacggatgtcgactcaatcaaaaggaaattatgcaaaagttttacagaattattatgaagttatgtgattagaaattaatatgtatacctatgatcgaagttatatactctataacataggc

SEQ ID NO: 319294 - DNA, 1651 bp, Cannabis indica
ctacattgtagattatcctatcagttaaacctggtgtactgataaatcataggaatatatttaatcacataatcttgattactttccactgtggtgacgacacaataaataagaatatcaatgtgataaggatttggatgaatttataaatcaaataaacatataaatgatcgcatgaaccaaatgacatactaaataagtaatgagaataaatctgtttctttattgataattgaatagaaaagattacattgaaatatagttttatttagggtacaaagtccaacacatgcacacatcaaaatgttcaactctttatttaataataaaaatatatttacaggctttcagggcataaaccctaacatccaaggccattattgtttaaccctattactcccagggtacatgatgtaagtttggtgagtaattccatttcacaatagagaatacgagatgcagaaagctacatcactcatttttggctatggatgtggatgttattttgtcgattttattgtttatgggggtaaggtgtgatcactggtgttggcatttcgagaggaatgtggtgtataatgttaagaatggctacacccttgcgtggtcacttaaatttgagcagggtgtggctgattcttaggggatggtggagtgatggaatggtttgtggaatatcaccatcccaccaagagtgaaggtgtttatttgacagttgtttcactcgaagttaacaatgacttctcagtttgctgaaatatttatgaaccattgagctgcttcaagtgttgtgaggaaacaaaaactactgaacatgctctgtttttctattctcagttaacaccggtgtggtctcgattgagtgtttggtctcttctacgacattattattttagtctagttctagagctactgagggtcttgtttgaagagttggacagtgatgtattggaagtttttgtcatggtcttgtggtagatttggttcgatcgtaaacaatgttgtttggtggtgctcatcgagattggaggtgattccggagttggcacataaagggttgtgtgagtttaaggagcatcgccagactgattcttttccagtggctttggggttggtgagatatggaaagtggtgttgtctggtaggggagaaaagcttcttgttgtgtactgatgcttaagttgttcctggcaggagttttatcaggatgaggggtgtgattcgtgatgaaaagggggttgtgtggtcatgctggcagttggtgcgacaggtgagttccaagtctttgtggtcgagttattggctttgcagatgggtcttctattatcttaaagactcgggtttgctatctcaacggttgagtgtgattttgctatagtggttggctaggtttatagtccccaatgtttttcaacacattatttatgatgtaatttctttattaacaactattggtgatgattcttgtagtagggctgagcatcgatcggtttggtcggttttttttttttttttttattttttttttttatatatataaaaatccaaaattcagttttcggtctagattggtgcaattcgaaaactgaccgactaatccagaacctatcttaaaactgaccgttttgaacctcggtttggtcggtttaaa

SEQ ID NO: 319295 - DNA, 989 bp, Cannabis indica
tatgcaaatcatttataaatcaattttgactaaactacaaaacatctgaaagaatactacttttactaatcatgtaagagagagaaagatataggaatagtgctttttttgtaaaggagagaaaaagagtgttaaaaaaatatgagaaaaagtgtgctcagaaaagaatctttctattgttaactttaacggaaatgataatcactttaagtatatgtatcctcatacaaactataaaacttaaacacaacacacaaataaactaaaaaaaacttaaaaacaactacaaaattattatccgtgttcctgaacaggtgacacgtggtacaaaaaggaagagagaatttcataatctcactaattcaaatatctcattgaaactcagtcacgaagaagcttcatcaaactgggaacaagtcaagactgagagataagcggaagtctacctcgccttatcttagcttcctagacacgggagacatatttccactctaggacccagagtggtttgagctcaaagcctgcccaagcaatacttagatgggtacttgaagggcttatcgcagatgctaaccgccctagagtatcgcaaaaatctaccttggaagcaacccagatcagccagagacggttatgctctttctgacacaaaattagatcttgtcccctgtgccagaacatgggagtgcgcgcacctcacacacctttttgtcagacaattattccagacatatacttttaaaggttaaaccttttggtgacacgtgtccactacgtacaatgattccctattgtctatatcttgcaatgcacgagcacaattttttctaaggggcccagtagtcagctctatttttgcatgtattttaccccattagttggctttttacagaaaccctaggcaggtgggcatgtctataccctcccttagcttataaatatccttttatttccatacaaaggggggatcgtgttgggctttgtgccct

SEQ ID NO: 319296 - DNA, 749 bp, Cannabis indica
aattcgtaagatgcattaatcttcatttatttataattatagctaaaatttttacatgtgattgtagtcatgtttgtttgttttaatggatttacaccaaacataatatttatataattgttaaaatcgggttatttatttgttaattagtcaaatgatgtactatttctgtctatttttaacttaattttttattttgttttctcttaaattgtgcagccaaactgaattaaaatttcagattgaagtgagtgttggggacagaccttctagatgtggtgtggaaagaataatgataatattgcaataaacttgtggatgtttttatttttaatttttttataaatatataataatatttttcttcttcatttataacttttgtacgatgggctgaatatatatttggtattaactgtatttggcttagccgcttaggcgtctgaatgaatatttattgatcatgatttgagttaataactttgccaaaattattattatatcaaaaatgttattatcattatcgatctgtagttgcattttttgtgaatattaatttattaaaattacaacaattattgtatctgattactgatttaaataaaattattaattaatttcaaaacaataatattataaaattggtaaaacttgacaaatttaaacattatattacatataataatatcaatattatattattaaagacaaaatattatattcatgaaaaataaagggaaacttacaaa

SEQ ID NO: 319297 - DNA, 1267 bp, Cannabis indica
aattaaaaaaaactaaaaactaaaataaaattaaaagtcaggtaacatctatctagtatatatatataatatttaattgataggtgttacttcatcatttatgaacatttaacttgatattaatggtatatattattatttttttactacttttataagtggttaataattattgcatttaaatataagtggttatccatatttttttttcatttatacaaatagacattagattagtttataaagataatttggtttggttatctaattgtgaattcttgtaaataagtctaaaaacagaaagaataacattatgtacttttcaactcaacaattctcctctcacaaaaatcttcactatattaatagtatgtttactacacaatattcagaatcaaaaataaagtaataaaaaaatgtaacgaaataaataaaaaatattcggattcaatatttataatatgttatttatcaaattaattggaaataaaatgatagtgatttattttgtttactttattaggaaacataatcagaatgtttaaattgattaaattacccttttaagttaaactataatatatggtggttattttgtaagacatattttaaataataaaattgtcattatattaaaaaaataaaataaaaataaataaaattgattaccttgaatagcattttttaaaaaattagtgagggaagtttttcttttttttttttcttataaagaaatgattctctttttattcattttcattatttattagtaaacatatcattagaaatttaaatttgttcataatcaaatttgaattgagagtactatttcataaatttataaaacgaaaaatcttgtaattatttaagctttttctataattttattggaaaaagatatgccataaatatataaatatattatatttaaaagaaaacaaaaaaaagtaggtggataaggtggttggggccaaaaatagaaaagccaatggttttgagttttgagtttttagatgatggagtatcaataaggatttggaaatgggccctacccgaccgaacaacaaatacccaaaaccaaaatcttcttatttttagtgggtcccacgtatttattttagggaaacttacaacaatactgaattttgacttaatttttacaaaaatattaccacacggcaaaattaacttttatactgtcatgggactttttttttcctttatattgtaaacaccgaaaacaaaaacgaggtctccatcttctaca

SEQ ID NO: 319298 - DNA, 706 bp, Cannabis indica
acttctacttctgtatcatcaactgctggagacttcttaatatcaaacaagtaaaacaatacatattaattccccacataactttttggcgcttcttttagcataagtttactcgatcgaacctgattgtaagaggtggagatttaacaatttctacttatgtatcatcaaaggtgggagacttcctgaaatcaaacaagtaaaataatgacttcctgtctaagtgccacaccaaaattataatatactgattatataggaaaagaaaaatctaaccaattacaattaaagaaaaatacaaactcgaagaatgaacacatgaacgaaaaatcatatataaaaatcacatacacccataatttactaacaatatttggcccattacaagttgtccccattcgtcccgcaataaatttatttatctcatcgttgctgtaaggatcgtcattatggaactgtaaaataaaaaagaaaaacatcaattacttacgttaatatatttgtaataaaaacttttcaaatgaaatctatgcaagtttacccgagttcttaagaaatctatgggatctcgcttatttattaaactttggataaacttcatcacgtagtaactgttgggttttatgccctaaataatactcatttcaatataatcagatttacttattaatatagatcagaaaaaacatttaatgttgcatggttc

SEQ ID NO: 319299 - DNA, 525 bp, Cannabis indica
ttttcctgaagctttcttccacttcttcttctccattccatccatgacaatcgttaaccgcccactttaccactctcatcctaccttgtaccttgttcttaccaattccatgatctccctgttgtgtcctaaacccatatatatcatcgtagtctttacgatttattcctgcgttttcttttttccttttcgttttcttggtctcgtatggaatccattattaacgacatgaattcaacacttagcttgtcgaagaaagagagaacagtgcatactctctccgaatctgatctccatgatcttaaccactcctttaattttttttttttgtggccagatgttttcaaattctgttaatcctaagaccttcataaaaaaaaaatgggagaattttggagtaacaagtgtcgttttgaagtaattgtttcagagatgcattctgacatttttcttctaaccatgtcatgtgcaggtgatcaacaaagggtgctctctggtgaaccatgtgttggatatattttacca

SEQ ID NO: 319300 - DNA, 733 bp, Cannabis indica
agaaaaaagggtcctcgtgggcgccattgacgatgctagctgatactttgagtccttgttgtctaacaccttcaagctcctcgtcatccaaatcgtagtcattggggactctatttttggcatcaccctcattggcgcaaacgacataggaattgttgtttggcgacgggaattatgggcaacagagaatggaagaagtatgttgcggtaaggagtttgagagaaaatagtggccgagaaaggagcagagttactgctccatgatatgggctccatgtttaataactaggcaacagagaatgccattgatatttactaagtgatcaaaataccaaattaaattagctagacctattgtagtttccctaaagtatatatgttactatgatgacacataattaaaacatttatgaaattagagaatcttcatacaaaagaaaaaatcagagaactctaaaagtaaagaggatacaggataccttaccaccattgatgcctgcttcagagaatggtcttaaagtaactgcataaggtgtccaatggctagtaagtaaatcacttctaaatcatcttaatacctccttaataatagtattgtttaaaacattattgtacccgaactcattaaattcgtggcaagattttatgaaaaagagaagagtaaaccaaagaagcaatagatattaggttctcttaattactaggtttagaatgataaggagaaaaaatagtt

SEQ ID NO: 319301 - DNA, 2220 bp, Cannabis indica
ttaagacatgtaggaagacatgagatggcacgtcataaaaaattaatgactttgggtgggatcttcaagtgccataatttttgccaaaaactagtgttgttggggcctagatttttcggttttgctattacagcagcaagtaagcactatggacagtaaaaagtcccgatcgttcctctacccaagaccagcagtcagcttttgcaaaatcacataatggtatccctaaaatcatactaatatctcgtaccaagaataggtcattaacagcaacaagattccatctttgatcatcaacttaaaacagagagctaactgtgttattgtacagaccaggatgtgtggaggcaacgaatctgttgtctgaatttggtaaccatggttgtccaagaatattagtagtagcaccattgccaatgatacatacaacacctaaacaaaccatgtcttgagcaccccaaatgctaagccaaacaaagcttgggttatgtcaaatgtcagctgaaaggaaatcagaattaggaatatacttaactttaaatactcttcccacaagagaattaggtttacacaacaagcgccaaccttgctttgcaagcatagcaagattaaaatcatgtaagtgtctaaagcccatgccaccctcttcctttagggcagccagtcgatcccaagacatccaaataacatgatctttactagagtttatcttccaccaaaagcttgccattaacttttcaatttcattacatgtcccaatgggaaggaggaaaacacttatgacatatgtaggcaaagattggagaatagttttgatggggatttctttacctgcacgagaaagaaacttcccttcctagctatattaatacgagagatgaccttgttcttgataaaattaagtattgtatttatattacgaacaataatattaggaagaccaagataaaggctaccttcagtaacttcaagcatgccaaagattgaacaaatctaagaacgagtgaaagtatattggggcagaaaaaaatagaggatttggagctattaaccttctagctagatgcagtttcaaacagataagaaatgtgtgaataccatcagcaatgctcctagttgcttgacaaaagagaaaactgtctttgataaaaaaaaaaacatatgcgtaatcgacgagacgcattgagccacacgacaaccttgaataaccatattggcctcgaatttctaaattaaagaagacaaaccttcagcacagattatgaaaatacatatgcatagagggttccgaataccatgagaaggacaaatagggcccagcacatggccccatgaacgaccttatatcgtactgaagatacacaagtcataataagctcaatccatttctcagcaaagctcaatccatttctcagcaaagcccatatggtccataacagctcatcaaagaaaatcccactcaacacagtcgtaagctttgctcatataaagtttaagacaatgaagtccttcgtctttccaatccttttatgcttgaggtattgcatgacctcgaaggcaactattatattatccgagataagacaacacgggataaaagcactttgagtgtctgaaataatctgatcaatgagtcccttattgttattattattcttacacttgaagtttttttggtcttttaacttttttttttactaatgtatctctatttagttatagcttttcaattataatataattagtttgtcaagcatattcttagatagagattttactatattgagaaatttatcgtacactccctagatttcggtacattcttcatctattttggcatctaatagaactttttagtctattttttttcatgatcggttatttagaattacttataatttttttagaaaattttaaatagtaatagtgctaaaataaaatttaaatattttattgcacgtgtgactattttatgatatatatacgtaaaaataattaagtgtttgaattttattttcagtattctaagctatttgaaattttcaaaaaaatttacaatgatcttagaaaaccataacatatgcaattataataaaaattgattgaaaaactcttctgaataccgaaatatttaccaaaatgtattttcagaggctgcagtatacattttgtcatatatctattctatataaagtgtgcctatataatagaattcttggt

SEQ ID NO: 319302 - DNA, 817 bp, Cannabis indica
gaaaaaaaaaaaaagaaaaaaagattaaaaaaattaaaaaaaaaaaaattcacatgcggcctaatatacctcatatgcctcgatacattaaccaaactaaaaaataggagtagtagaaacttaattttaatgtcgagggatggccaagaagtgcatattaaattcctttaaagcaaacgcaaaagaaaaaatgattaaaaaaaattggataaaaattcaacaatgaccttacatacctcaaatgccattaagcattaattaaagttaaaaatgggataagttaaaacttaattttatttgcgaaggatgggtgtgaagtactcattggatcaatttaaaaaaaaaaaaacattaaatttatttaaaaaaataaaaaagggtctaatataccctaaaaaaataagaaaagttaaaacataatttcaattacgaaagatggttggacagtacttattagattcatttgaagcaaaaataaaagaaaaaaagatattgaaaaaaaatattcacaaacggcctaatatggatggtcgagaagtacatattaaatccctttaaagcaaaaacaaaagaaaaaatgattaaaaaattttgaaaaaaaaatcacaaacggcctaaaatacctcaaatgcacttgagcaaaactaaagttaaaaatagagtgagttatttgcggcataacctctttaagtggtcagatttttgcaactaacctccaatttaaaaattttggtaaaaaaatcttctaaacccaagttttgttagcacttagccatttccatccatttttggtcattaactgccatggtggaatgtc

SEQ ID NO: 319303 - DNA, 983 bp, Cannabis indica
atttgaaaaaatttaataatttttcttatcaatttttttaaggcattttaaattttattctattccattcatatttcaattcccgttcctatattttcatttctcccaaccaaacaccactttagttacatgcacgccacttttactttataaatatgtgaaataaattgttcaaacaaaagctgttttctaatttgtatattgtaaattattctaatttgggtaaatattaagttggaccatgtattttgtaaaagttatcgattagacattttgttttgttaaatgacataatgaaccatgtatcttctaaaattgtcaaaataaaacttaataataactaatctagaggtggtaataaaactgattatatatatacatatatattattttttttttttgcatctattcgtgttagaaattgtcttcaagttgattatatttaaaaaaaaattatcgaaatttaagcttagaattctatttgtactatttaaaaaaatacaagatctatttttgctacttaataaaacaaagaaatcaattaataatttttacaacatacaacatacaaaatgatatttaccctcttaaattctcacaatgttacaaaatataaggtgaattgttggaactaggaagctattatatttgcatattgtataagaggaaattacacttagtatgagattttaaaagttcttatgataaatacgacacatttaagtttgaccaatttctatggtatttttttatggtatttgatatgccatatatatgtaattaggtttctaaatcccatatttaatgtttttatttgtttaggaagttttatttgtaattgatgccggaagtcaccggagtttactgtcggtgccggaaaagtcgccggagtagcagtcggtaccggaaaagtcgtcggagttgctgccggcgccggaaaattcgtcagaattggcattgtcgccggaaaaatcactaaaaaa

SEQ ID NO: 319304 - DNA, 1328 bp, Cannabis indica
gtattatttatgtcatatgtgaaatctataatatttatgcttttttctcggtaatgatgggaatatgagggatggctaatagagtcacatgggtaaatttagaatctttcatttaacaaggtattcatatgatgatatttagattatcatggatacgtggagttttagtattggactattttacacctaacccatttaattatttaagcttaagatagaaggataattttggtattttgcttgatgagccaagtggcttactccagttttgctagctggccattaaagagtaaaagataattagtaattatctttaaataagaaaaatgaacgaataaacaaagaaaagacaaaattagaaaaaaaaaaaaccctaattcttgttctctttctctctcatgctttggctcaaccagaaaccatgggagaacctagacatcttcatcttgttccaattattctagtagaattctagaagtaaatcaaatgtataactctagtccatcatctctttaagtttggaagcttctttgttggtttgttatgcttttgttggagttaggttctatttagtgagggttttgattaagaatgttttctacagattattaatgttgttttatgcgagtttaagttgtttttttgttgtttgattttggagttgagcaagtttgagttcaagaactcaaacatagctcaacaattgtaattttcaaatttctgtatgttctgaggttttattgcttggaacttattcattttgatactattaggtcttttggaacttagattagagtttgggattgttttgagcatgtttggaggatttttgttgtttttcagtgaaaaattgcaagcaatttctaaaaaaatggcctaccatttttattagtgcagaaccagaaaaatggctcatcatttttatagaaacggcctaacaattttcaggcagttttcctgtttagtcatttttctcgtgtttccttgatatttagggttttgccatgctatttatggatagggaaacttctagttttgagtttagatcctcggaaaggtcttagaaagttgtttacctgttttacgtgattatgacatagggcctccgtgcagcgcataattttcaattaagtcgaccagcacacttgaatttagaaacgaggtaagactattatagaatatatatgcatgtgtatatctgtattatatgcatgttatatgtgtgatatatatatatgtatatgtatatctgtattatatgcatgttatatatttgattcatatgctaccaacactagtacggtagcggtactgagtgcattggtaca

SEQ ID NO: 319305 - DNA, 3427 bp, Cannabis indica
tttttttttttagttttttttttagaaaataagcgtgcatatattagttaaaataaagttagaccttagggtaattataaataaattgtttagggatagaatgaataggaagatatccaaaacttctggtgggtaaatatccacttagccacattatggacgctaaaattacaatttctactagtatgtacaaaatgagacatagttctcaagctcccacctggactcagtcctgttgagagcgttgatgactatcctcgaatcactctccaccataataaatttaaaagcatggttcttcgctatatccaacgcaaagcaacacgccgccgcctcaccgcataaagcattcgcaaaatccactctaacagtataaacccagattaccttgctcagatgatccattgcaactactgcgatacacattgagtcaaacccatttttacgtcacgtcacagttcagcttgatccaatcttgcgggggaggactccagacaaccgctaagcagggaggagagcaagggaacaccgaagcatggtgaactacataagaagagcgaatattgtcaatgcactgaaaaatatcaaacagagtattattatgtgccttttcgtttctgatccgccaaatggtgtcaaccgttaaagaggcatagaggaacacctcatctgaattgaggcctttatttttgagatcccatatgaacttgacccaatcccacatccggataccagaaccacaaataggatagatgccccaaggagaggatctccagagatgcatagtcacatcacaagataagaacagatgctcaattgattctgtctctaaaccacacagagagcacacatcctcttcaatagaaaatttcttactgatctcagcccgaacatgaagagcctttgctaaaatgcaccaccaaagggtctttagcctttcagaaattctactattccacaatttgttccacatagacggggctacttcacagtgaggcgctctgtcaagagcttggacgagataggtcgatttgcaagagaaccgcccattactttccagtgtccaaatccatttatccttaccctgactagaagggttgccccctttcaagatggctgaaatagtgtctttgtcaaaaaggttgtttagcttggggacattccaggttcaattttccaacaaaagctcagctactttgttcacctcacccctgttgttttataattggttaataatcttttataatattattaaaataaaataaataaaacttaatattgagttgcactaattacatcaacgatattacattatacaaagatactacgcactaaaaatgtcttttaacatttctctttttaaatcctcaggtggtcttttttgaacaacttgttgagtttttagtatattatttatatattaaataaataattagggttgggccctaaataataatggacctaagaattttatatactaaataaataaagtgtgagtattattatttttcataaaattttataaaaatactattttttttttcagtgcataaaagtataccatataaattttgaattctggatttagataggctctaagtacgaaattagcatgccttagcccaaagccgaacttataaataatataatattgagattaaaatagtaataaaatatatattattaagtgaataacatatgtaaattatatattttataacaaagatgttacatgtcatataatgtaataaacacatagttataacattaaaggaattgcattttgaaatgaattgtaataaataaatcaaattttgataatatgtaattaaataacataattacatttagagacacttgaaggaaatttctagccatgagaaacagttaaaataacgatttatttcacatgtgcgttgaattaggaaacaccttagaaaggagattcaaagctccaaattggagctgaatatacaaaccagtatggaaatctgttcatcgtgtttcgatgtatttttggggttcgtatattttgctctaggccatttttataagaaacgtgatgaaatcggaagtagctaataagagacgttttcacctttccctttaacattcttcttatcctaaaatctctcttacacgattggtaacaacttgggtaagtgagttttgaattttaaagtttggctataaagttttttaaaacaccactcttctatcttatggttcactcatttagacaccattcttctatcttcaaacactaagttagagagttttttgagacttgataattcttaaaagcatttccataaaatcctaagtgtaatagatgagaaaataatttttttgaacaaaggtgttgaaaccttattcaaactatattttggtgatcctccttcaatcactttgggttattcttatatactcctatatacactgtattgcttctacatcatttatgtatttactttattataaattatcattcttatgttatgactaaaaagtttgtggttaaaggtattagtcacaaaatttataatttagtatgactaagtgtatttttagtcacaatacttgttgtgactgaaactaaattagttacaatttatatttaaatactatgttttagtcacaagtaatattttgttgtgactaaaaattacatttagtcacaaaaaaattatatcgtgcatgactgaaaaattatcataatattttttttatagtgcatattaatttacatttatttttatggtcatgctttgagttgtaattttcatcttctacttttttatattatcttctttatttgtaacacttattttatatttttttagtccttctaaattttttgcagttgtaatcttctgtctcattattattttctctatatttcctaacagttttcatatacacaattgagcatttattataaataataattatcacaaacatttatgataactattaaaaaataattgaagaataaaatataaactataatatttatacatataataataaaaaaagatatttttgaaataaaatattaaaattttaaaatatggtatttttcaaaaaatacattgaaactttttccttttttaattttaccaatttatgtttttttggaccaaagtggaaagtcttgtacaacgggccagctcgctcaccatatttgggccgggtttgggccaatagggtaccttgtagcaataacccaaaacaagtttgagtcaagcttaagccatataacgccagaaaatttggttggagagttattaactcgagaaaattgcattgtatacccactttgctttatttattttaatttttaccttcattttccatattcattgagatatatccactttgatatatgatgttcctctggcccggccctgggcataggcgggctagg

SEQ ID NO: 319306 - DNA, 2166 bp, Cannabis indica
atataattatataatttaaatatataatttatttagtggttctaagttaaaaaaatttaaattttattttctttaacatgaaattaaattttttttttaatttttttatatatataacaaactatatatacataaatgtatataatttttctaatggaacttaaatctattatttttctctacaattccagcttcaataatagcaaaacgggtcacagtgggtcgacacgaacacgatatgagtttttacaggtcgggttagagttgagataattagacacgagtcaaaaaacggatcgacatgcttgacacgaaatataaaagcgggtcacataaaatataacatgaacacgatacggtgacacattttgccacccctattcttttctctcccaccaaatgtagatattttttcttattatctcactttctctccaaatttttctttccttccacttttcttctttaccaatcaaagggttacttgggcttggcttgctttacaaaacaaaattaatttttaatcaattaatcaaaagttcaagaatggctactttactactagctactagtgactgacttggtcaattcaattgcaatttagtcaacaatggataaaatgttgaaaacacgtgtcatcaaataatgtagagggagagagagagagagagagagagagagagtaagagaaggggtcaataggaaaaataagaaagaaagtgaatgacaaagatgaggacaagagggtagcagtactataaagttgtttaaattaaatatcaaaactcgtaatggtgtgtgagtgtgagtgtacggtaaaatggatacgaaaccctatcttcttccatggttcaaaaaaatatgtgcagtgtgagttgtacgtaggtagatgcagagatcaacagtactgtattgagtgttgagtactgtaccatacacgcatgccttccacggccatactctaacccattgctttaccatcacttttttttttttcctttttggaattttcagcccaaatgctcttcaaattttattctccttttagaatcatatctatgattttaaattagagaataattagtatttctcatcccaagtataatttttgaatataaagacgtttcattagatcaaagattattacaaaataaatttgttggaattgactttatgggtaaagactcactttaccatgagcaacaaaattacaaaaacgagaaatataagagaaaacacaacctacaaaattagtggaaagcttaaggcaaaaagatgaatagttttcaaactcccaatacatttccttgcgattgagagagttgattactatcctagaattgttctccacaatgatgaacttgtaacttttgagctttgccaaatcaattgccaagaaacaagttgttgcctctccacaaagggcatctgaaaaatccaagtccgttgttctcacccagatgacctcacccaagtgatttctagaaacaactgctatacacgagcgttgtgatcccactttgacatcacagttcaatttgatccaataaggaagagaaggatgccaatcctccacccggataggagaaggattggggattatagagtagctcataattcagcataagaacattgaatagagtcaaagcactaattcaagttaaccatcttatgattatgcaccttttcatttcgagctcgtcatatagtgtcaacaacaacagaagcatagataaagacctcatcaacgtttatgcccctgttattgagactccaaataaatttgacccagtcccacatacggattcctaaattgaccactggaaagataccccacagcgaagacttccatgaatggaaagctagatcgcatttaagaaataagtgctttagagattcttcttccaccccataaaaagggcaggtaacatcttcaacctttaatctcttaccaagaatagccatgatcggaaggaccttggacaaaatacaccaccaaaggagcttatgcctctctaagattttactatcttagagcttattccacatagaaggagcaacctcacactgtggagctctatgtaatgcttgagtaagataggctgactgttggaaatattttaccaggatctagatttactaccaagtatgtttgattaacatcct

SEQ ID NO: 319307 - DNA, 1557 bp, Cannabis indica
gaatagtataactcatgcactagttaagtcggtttctcgttcgataggagtccatacatgtttaaattgatatttctcttaaatttttaattgctcttgtaacagttaattttgatttaatatattttatacttgttttcaaaaaaaataaataaatattttagaaagatacacgtgaaaatgaaactatatttttattatgctctttctcaaaaaaaaaaaaaaaaaccgtgcatttttattaactcaaatattataagttaattctcaaaattatatattactttttttagaaaacaaaagtgattttttagaggaaaaattcatggtgattttttagggaaaactcaaaggtgattcatgatccttatcttgaatagttcattcctaatagtcacatcatattaagatgactttatacaaagtcaaaaatataaaataataaataaactttgattaattttagaattttttaaactcttatatatgtgtcatgtgatatggttattatcttttacattttactatttcctaaaaataaataaaagaaaaaccttataagttggaattggaataaataattaaataagaaaacaatgctctttactttttctaaattcttgtaaaataaaaaaattatagtgaaaaaaaagactattaactttaagtaattattaatacaactttttttgtgaaattcatttttcctttttcacttaaggcttaatctatacctaatgatacattaaacaattagtattggtaatactaaaatatataaaaagatcttcttatcattatgaaggaagaagaagattctttattttatttatttaattagttttttttgaggaaatttatttaattagttttttacattatctttatcatgaagaaaaggatataataaaaaagaatattctatgaggtttgttattgaatatcagtgatgtctagtattactagacatgtcgttttatgattgactaacgataccctctaaaaattatacattaaaatactttaatataataatttttaggcacaagtagtgcccaacaccttctataggtagcgcgattagttagcgatattttttaaaaaaatattttcttaagttatataagatctgatacttaattacaccaataacaatttgacactgaggagagtgctaggcatcagtggtaccttttagcaattcttttaaactacataaaactcgatacttagtttgaccaatagtgatattgacatgtaggaaggtattgggcaccactactggtgccttttaacatttcacatttctattctaccattttaactcattttttttttagaaagaatacaattttagaccttgtagttttttataaaaattatagattggactatctattttgtcaaacaaccaaaaaaaaatcttgtatttctaaaatggtacaataggattctaagctcaattttcgataatttttttaaatacaactaacttgaaaataattttaataagaataataatgaaaaacataagcaatttattataacacctcaata

SEQ ID NO: 319308 - DNA, 1449 bp, Cannabis indica
tgaaatggaaccccatgattctcaacacactgtatattattattattaataaaagtaacatataaaaatttattatttacatattttttattttgatcctatttataatataatatccttaattatagataattttaaaaatacatatatgcttcatgaattttgcctcttactacctccaaagcgattattaccaaaattttgagtagactcgaactttcttttctttgactattgcttttctcaataaatcttaagatacttaacttaattaaatttgacttagttagttcaaattcttaaaaaacatatttaacataatttttattttttatattctttttttttttttttttgtaaacggaaatattatataaaaagcacaaacattacacaggattcggctcatcaaacaaaactgcttgacgagcacaaggaggaataaccccaatccacatggcactagctttgtgaaccaaagcataattggctaaagcatgagcaactcgattggcctctcggaatacaaaagagataccaacaaaattatcataagaaatcaaagctctaatctgatttagcaaaccatcgatgtcacggcagccattctccttattttggattagatgaacagcttgaagacaatccgtttgaacactaaatctctgtaaccgttgctgaattccaacttgaattcctttctttatagccattagttccagctgcaagggtgggagttcttgctgcagcaccgtagcagcagccgacagcactacaccagccgcatctcgcaccacataccccagacccgaaagcatcccaccctgtttaaccccagcatcgacattgacagtcacctggtcccttacaggaggaacccatcgtcgatcttcagaagaacgctggttacgttctctgcctgaatcaccccggacatcagcaagataattgccacaccactcaatcatctcctccggctttggatgataaccaccatgtaccacattgttcctcacattccaaatattccaagatactaacagaaaaaattccaacttctccctatcccattcaacagctattctcatcagcatagaaagattatcctcccccaatatcagtttcaagtcatcatataaaccactcacccgccagtaccctttacttgccttgcattcccatagagcatgggcaacagattcctcaacatggctggagcatctactacaaacaacacttgaggcaattccacgcttggccaaattgacatttgctggcagccaattatgcgccactttccaaacaaaatgcttgaccttcggagggattttcaatcgccaaagcttcttccaccactgcacaatcgaatggtcatttgattgatgttgttcagtagtgagcgaagcagccatacggtatccactcttcacagaatactctccatttttg

SEQ ID NO: 319309 - DNA, 1696 bp, Cannabis indica
ctatatatttatgcataatcactccattcttttaccttatttcttctctttaaattatttcagctccaactttttatttaaattttcatggatgaatatttcctttcttttcctttatagtttatcatatttttcttttgataattcactgtatttttatttcctttcctttaactttaatattttttttttcttttattcttatcgatgatgaaagtatattattcattcacatacttcttttttttttttgcaggttagtttaatctaagaacttgacactttatgttgataatgaatcttaattacttttctttttctttttaatattaactaattctcttaaaaaaaaattctaaactcttttattattcaaaatatatatctctcagtatctaaattgttttattattgatctacattaaatatggtgtatttgtgtgttgcttcaaagtattctttccaataatatatatatattttttttgaagataaagtcttgtaaacaaaaacaccataatacaagactaactgaaaggcaaagagccattccaaaggaactcactatcaagcccaataccccactttgcaaccctatgagcaatagtattaaactccctattaacatgagccagccgtaaagatgggcgaagagataataagttcttaatacaaacagttaaatcatcaacagaactataaccctgagtgctggagtgaactttatcaacaatagatttgcaatctgttttccaaaaacatccacaggcaggaagatagaatagacccattgcaaagcatgcaccattgctttagcctcagctaccatcggtgaaacacatcctaaaaaaggcttagccaatcctgctaccacctgaccggaatgattaataacaacagccccaatgctatacttatgtctattcagatcaatggctgcatcagtgaaaatctggaaatctccttcagatggaagctgctgcaaagttgtctgatccaaatttgaagcacaaggaagcacctgaacctgctgtgaatctaaatacttgaagaaaaaagtgacactccaatcataaacatccaaagtttgattaatcagcttatgatgaaaaatgttattcctttgattccaaagagcccataaaaacaacacaaaatacagaaataatctctatccaaaacctgagatatactacaaaagaaatcatacatactaaggtgtttatattttaataataggagacaaaccttgaagacttccaagctttccttgatctggaacaatctagtaaagcatgcttaaccgtctcaggatgaattttacataaaggacataaaggagaatcaataacacatcttttattcatagagaaagaaacaggaagagcactagaaaatattctccaaataaaaactttgacttttgggggaattttagaattccaaacttttgaccaaaacttttttgaagaagagaaagaagaggaagagggaagatcttgagaggaaaaagcaagatgataagcaaacttaaccgtaaactccccagaactatgatgaccccatataatatcatctttgccaaactcacctaacacaggaacactaagaatctcatcaaccaaaggagcagaaaaacaactggcaagtttagcaatatcccaatccccagaatcagtataaataagacaaaaaa

SEQ ID NO: 319310 - DNA, 606 bp, Cannabis indica
tcagttctagaagtacaaattctgttagtattttaaatttgtaactagacttaatttctaaatttattgttagaagatttgaaagtattttatacttcacgttgtggccaaaccaatgattgaaaatataagtttattactacaagaaatgtcatttttgtcagcacatttttgtgctggcaaaaagtttgctattgcgctggtaaaatggaattgacttctgatgtgtttggcaaaagaggttggcaaatcaacgttggtattagaatatttgtcagcacaaaatgaaaagcgctggcaaaaatgacttttcccagcgcgtaaatgcgctggtaaaaattaggttttaaccactgcaaatgtgcgctcgaaaaaatttgacctttttgccagcgcaatttgtaaaatgcgctaaaatttacttttaccagcgcattagcaacgaactatgctagtaaaagtaatactaggtacttatatgtcgcttaaaaaaatcaataaatcgagatctttgtatgcttataaataccgcaataaatatctcttgtaatcaataaaatgtgtgtcaatttatttatacataaatattgtagggaataattgaag

SEQ ID NO: 319311 - DNA, 1616 bp, Cannabis indica
ttgaggaccaacttgccaaaacatgtatagtttagggacttgcggtacaaataagccaaataataaatgtcttattaatatgttaatctaaaaccagctaattaataatgtaaagaattgaaagtagatcaagacaattttgagagaaaactaatacgattagctcaaagaaagcttaacccaatattagtgagggaccatattatttctagataaataaaattaagactacaaatgtaacagtacttgacagaataactacctctaaacaaactaattaactaaactaactaactttagttagtaatacttagtgctaacattcttactcaaacgaaaaaggatttgagccatttttaatttggatttgaggcagctaaaacgattggtagacagaggtttaataagaatattgaccacctgatcaagggaaggagcataacaaacaaactgtcttttgtctaggatctggtcccttacaaagtgtaagtcaatctcactttgctttgatcgagaatggacgactttattgctagtgtaatattactctagttgtcaacccaaataatagaatagtgaggcaatgtgatctgaagctcactaagcaaagagacaatccacttgagttcaccaactgtattggccaaagctctaaactcaattttagttctagaacgaaccacaagtacttgtttctttgctgaccacgagatgagattatcacctaagaagataacctaaacctcttgtagatcgtctgtcatcaacacaacttgcccaatccgcatcagagtagcttttcaatgtcattacagcaacatgtcttattatcaggccatctgaaactaatagttcctttgacatacctcaataatctcttacaggcttcccagtgcagaacagttggagctttaatgaattgacttagtttgttaataacaaaggaaacatatggccttgttagactatgatattagagtgctccgattgtactcctatatagtgtaggatcatcaaattgttctccatcttgtaaggacaattttgtagcagcagtagtaggatttgtatagcttttggcaccgtccatatgaagtttaacaaaaatatctttaataaattgtgtttgagatagattcatgccagtggaatctctagaaatttcaactcctaaaaagtagtgaacatctactaagtcctagagagaaaaatgatagtttggatccttcaccaaagtggaaatgagagtgttgcttaggcctgtcacaagaatatcaacaatataaactaggagaatgatgagattactaccaattccatggaaaaatagagaaatgttagatttagaaggtgtgaatccccattgaagcaagctggttctgaggttgtcattccaagctcttgaagcttgtttgggccataaaggactttatacagatgacatacatggtctggtaattggatcaaaaaaacatgaaggttgttgcataaaaatagcctcacttaacaaactactgaggaatgcattgctaagatcaagttgtgtcactgtccaatttgttaggttttatgccctaaataaaattccatttcaatgtaatccattttattcaaca

SEQ ID NO: 319312 - DNA, 1095 bp, Cannabis indica
aattatagtctatttgtattttcttttgtcattattttggaccccaatcccaacccagattcggactgtggcccccagcatcaacacagaccccgaactcaactccgaccttggacctagacccaaacccagtcccgaccaaggactcaaaccttgaatcaagctcccgaaccctagccccagccccagatctggacccaaacccaagacctcggcccttgctcccagccctcgagccattttctctcacctcaatttcttattccttacttaaataaaagcaaaaaataaaaataaaatttagagaacacttttatttttgttattatttttaaaattaaaaaaacacacaaaatagttacagaacacatttttattttacataaacaaaaagtttcacttttacttttgtgatttaaaaaattagaaaacaaagagtttgtttttgcttcacaacttaaaaattgtttctagtttttaaatatagaaaatagctttaaaaactaataggggttatttggtcacattttttaaaaataattttttgaaaactgagttttaaaaagctaaaagacaaattacattaagaagttattttgtattttcaaaaatatttttttgtctaacaatacatattatattttatatttttactagcacagtcggtctttagacttactcagattcgaattcgaacccaaattccgacttggacctaaactcaattaggttttctgctttttcctctatgtgttttacttgctatgtataatgatatttgccaacaattgggccagtaggattatgtattctgaaatgaattaggtttggtgcttatttttatgttttgtatgacactcagggtcggcccaagcattgagcagcttgggccactgcacaaggcccccatgttttttaaggtccaatttatttttatttttttgaaaaaggtctatttttttctattatatatacataaataaaaaatttataattgaaaatttatgaacaaatcttaaaaaaaaaaaactagtaataaaattataattttaatgtatacggtttttttatataaaaaaaaacacaattttaaaa

SEQ ID NO: 319313 - DNA, 2671 bp, Cannabis indica
gagctgaacaattaagttaaaaatcacattaacacgcctaagctagtaaggtgttataatttggtatcagagccgccaggttgtctttcgaagattgtcacgacatgtataatcatcatcagtgatcagctcaactcacagttcagtaagcttttattgctttagtagtttattttgatagtatgttttaagaaaagcctgataggaagcatgttagtagcctgatagctgaataggtgcatattttaaattttcaaaataagcggtaattagtaagtaattcttgatcgcgatctgacaaagctagctcttggtttcgcagactgttctaatagattggatgccaagcaaaatactaggagttagggtaagtcagtcggatctattggcggtaagggagctcagattcccccaaatgtttatggccgatgaagaggccctagaggtagggcacgtggttggagagatgttaacccgccgtaggttgcccaagaatgtgaaaataattttgcagtaatgcaagccagaattaacgaacaagaagaagaaatcagacgcttgaggtaacacggtgctcctgcaatgcctgctctagaaatgcaagtggctcctgcccccgttgtgtaggtagggccgattgctgcagtgaatctaatggaaccgttgtataaaaggtttcgtaagcatgcacctccagtctttctgggagatcccgatgtaatgaaagtcgagcagtggctgactgttaatataagaattctgaactttatggtcgtcaccggtaatgatagagtggcttgtgccacattccagttccaggaagatgccttggtttggtgggacatggtgtctctaactcgtgatgttacaactgttacttaggaagatttctaggagttgtttagcgcaaagtactacaatgaggcggtcagaagtgcaaaaagaaaaaaatttacctagctgacccaaaaggagaatatgagtgttactgaatacacaatgcagtttgatcgattggctagattggcctcgagaattgtgccgactgattttaacaagaaagaaaagtaccttgatgggttaaacaccaaaataaaacatgaccttatgattgccattgacgacaacaccacatatgctgacatggtaaggaaagcactacgagctgggggtgtagttgagtgcactcaagagtcccgaagcactcaagttgttggtggggcccctactcctcctacccctggttatggaaggggtggtagtggctcgaccaccgatcagaaatgaaaggcaccatttgcgcctagtggctcaagtaaaaataagaggttctgagggaaccagggttgagccaaccatcagggtggtttcaaaactcgataaacttacccgaagtgtcccagttgtaaaaaacatcatttgtgtgagtgtagagggcaaggatgtttccagtgtgggttgctaggatactacaaaagagatttcctgcaacttaagaaagaggaacaaaagacagctgcaaaacccgctccagcgagggtgtttactttaactcagacagatgcagaaggtagcccctcagttgtaacatgtaagttcttgtcaacaactcttacatctctgtattatttgactctcgggccactcactcttatgtggcagccaaaatttttggtaaattggatagaccacatgatagttatgataaagggtttggaaccctactgcttggcaaagaattagttatctccaaaaggtgaattaggtctatgccgatcagaattaaggatagggagttgagtgctgacttgatagaattcagtttagtggatttttatattatacttggaatggattatttatccaagtactcagctattattgactgtaaatggaagatggtgatcatccaacccgagggtgaggaaccgtttatttttgtgggatcgattcaaggatcccagattctagtgatttcagtattaacaactagagatttgttacaagaagggtgtttagggtttctagcagtggtattggatacaacacgacttgagacagtttagccagaggatatcaaggtggttcaggaatttctagatgtttttcctgatgaacttttgggtttaccaccgtagagagaaattgatttcgttattgatttggaacctagagtagaaccagtttctaaggcaccataccgaatgactccgaaggaacttaaagaattcgaaaattcagcttcagggattgcttaacctagggtttttgtggcctagtgtgtcaccctggggagctcccgtattgttttgtaagaagaaagacgtatccttacgcatgtgtataggaattaaataaactaactgtcaagaacaagtatccttaacctaggatcgatgatcttttcaattagctttaggggaagacagtcttctcaaagattgatctccgatcgggctatcatccgttgagaattcgagaggaggacattctaaagactgcttttcacactaggtatgggcaatatgaattctcggttatgtcctttggactaaccaacgctcctgaagcttttatggattttatgaatagggtattcaaggatttcctcaatatctgtgttattatttttattgacgacatccttgtatactctcggtcagaagaggag

SEQ ID NO: 319314 - DNA, 781 bp, Cannabis indica
tttttgtttctcccttcctacgtcgttttggacttcctatatgaaacgagtagctcctagaagttcttgttctagatagtgagtctatttgggacctctccaagaagtttataggggaggacccccaactccatttttatgttaggtagttagggtagctaactgcttggaattccttctttttgtatagaaactatgtctaagaaaacccatcgcgaagaggctgactctaaagaggagatagtggagcaccaagaggctcccaagttggtgctaaataatagtccctgagaattagaccagcatattaacctatttaggaattacaataacttaaggactattctagaacaagctcttcatagccagggagaggcccggcaagtgcgtagaaggaggctttgatgtatggaattggggtcatattgaaatggaggcacacttgcccttgaggtgctacttcgctaaattctgtgccatagtcaaaatagcacctttccaacttatacctcaagtgtactgcttactgtcaggatggtacgtcttttgtgtcaaaaatagcaaatctatgccgaggccaaaggaaatcttgtacttctataagaataagtctcaatcgatgaggggtcacaaggataaggtgggcttctataggttggagcaacataacaagagtattcactgcccaactagttacacgaagcacacacatgacttcagggactattacttcttcacctctggcttcccgttaaggagagtgttggattttgtgccctaa

SEQ ID NO: 319315 - DNA, 799 bp, Cannabis indica
ctaattgcttgattttgagttaaagttttaatttaacgaaattagttcaaatttccaattcacccccctcttggaaacatatcttgggctaacaacctctgctgttggtctatgggcggccaagattgtctggcaggactctatattggcaagattaatgcaggcatccttgtggatccaagtggtacgccatgcctcaaacagtaggcccaccattggcccctccaactaaaggaagaatccttggggggcaccccccaagataagcaactgggtttcacccccagtactatgaaagagagacgagaccaagatttggaaggcctcacctaggcttgggagaagatattgggttggccagacttagggaggttgtaggtcaagtaggcctaattgagaaccacgcactgttgaccgcaatatatttgctcagtagagatgcaaatttcttgaagaaccaagtactactgattgttatatattcgcttagcagagacgtgaataccttgaagaaccacacgctgctgactacggtataaacactcagcagagacaagaattcttatgatagatggaagaccaagagtgtattctttgaactcaccaagcagtgtcaggtcaccgcaacaaagaggccaacgatctaatcaagtggttcaaccagagaactgatagaagagacgaggactgttggaaattattttaccaggatcttagatctactcacaagtatgttgattaacaccttaaatatgaactttctaaaacgatgaaataagcacatataaagtttaggaaa

SEQ ID NO: 319316 - DNA, 1828 bp, Cannabis indica
agggacttagtcttttgaatcatataatcacaatcacattccactgtgttgacaatgctgtaattgtgaataaatatatgatctggacttaacagattttgtgtataaacatatcaaacataagcatgtaacattcatgcaaatataaaacacttcaaatttcttgtattgataactaatcagattgtagtgggttttatttagggcacaaaacccaacatgctcacctatagaaagtcaagtactcaatcatagtgcgaaaggctgtaaagaatcctacacttgaaggagaatcaggctccaatcttaataatactttacgatagagaagaacaatggttagagatctgagtggaaggagatatattattctgctgccaccaatgtaaggttttcttaactttatacgtgtttaattccattgctttagagaatttacatttagagtgttaaacaacaaacatgttagtaaatttagatccatccaaaataatccccaacacatacaagctcaccctggccagcctataggcttctcttggcgaaccagacctgttggtatagctccttcatggctcacttcactcttttcggttgttgcttgatggttttaccatatattgtatggagaccttgacttgctactggaaaagctgtattccacatgtactatgtcttggcttacgtggatatgccacatcaggtggaaaaaaaatgggatatcagtttctttacacaatgattggtccgaatttcaaatcatgttcgatgactcgatagggagtcgcatgtcctatgttgtcaacacacgcgacgtctttctatgtgattcaagatgaatgcatacatccaagcgatatgcccattagccatttaacagatatatatcgcacctaaagcctgcgagcttgtgcgagaatatgaaaagataacttgtgctcgataaattgcatacgttgctacacttaaacacaagaatggattaaaattttcttcatttactcttttacgtttattctgatttaatactattattttttgtaaaaacgattctaaaaccgatcagccatgtaaaactaaaaggacacttgctttctatataaaggagtgatccaaattaaacgattctaaaatcggtagcttattgttcaatactcgctattttaagtgagtatttgcacttttttttgggtgacttatttattttttgcacgaattgtggtgttgtgaaattttttccgactacactatataaataattaattttgtaaattatagaaatttgtacgcttatcaatttcttttgtgatactctcacaaaccataggagctaaagtaacaatgaaaatcataaaaaataataataataataattagtatttttgttaactaaacttttggcattacctgatttgccccctaaaatgtacgacttgttacaaatttcccttaaaatataactgttacatatgtctcttctgttaggttccatttcttttaacgtcaaaaattaacattttcaccccctctgaaatacaaattttgtccccttttattaaaaaattaattttcaaaattataatattctattaattctgggaaaaaaaattaataaaaagtattaaaaaccctaataaaaaattaaatgaattacaaaatattaaatttacttaaaaaattaaattattcctaaaaaaaatattttcaaactttgttttatttatcacgtatcttaaaaaatcaaaccaaaattattcagaacctagtaaataatttaaataaactaaaattttttgaaaaaaaaaaatcaaacttatttatattcata

SEQ ID NO: 319317 - DNA, 881 bp, Cannabis indica
tagcaaagatagcactgtaattttaaaaaaaaaatactatagcatgccttaacattagggcgttacaattatgatcgagatccctatatgtgtttgtagtgactcgattttgatcgaggtaatgttgaggaacgattattatagtttgtgactcgagtatgattgagataatgatatggaacgattattatcgtttgcgactcgattatgatcgagtaaaagatatgatcattaccgttatgagtacttactcgatgaaactacggataggtttcttacttatcgttggctttatcaggcaacaatagtgacatacatatctcgtagataaggagtggtaatagtgctttatgaagcactgagattatgtgattacggtaatgtttgaattagagtgctttatgaagcactgaaattgagtgtttataatgatgtatgattagagtgctttaagatgcactgtgattatgtggctatgaattgaacgaatgtattttttggtgaaagaagaaatcttgattatgaatttctataaatattcttaattatgtaataaatgtgcttgcatagacattgagttatattcatgttgcatatgtaatgacttactagtatgtatattataattgtaatgaaaatttctcgcacttagtatgatttctatctagtagattttcttgctgaatcattgtgactcacgggtgctccgtggtgcaggtaagaaggattgaagctgtgttcggtcatgagtaagaggtctcccagccatgtacatatcagctatgatatcttggcttctctttgtgccctaaataaaacccattttaaaataatcagatttacttattaataaagatccgaaataatattttatgttgcat

SEQ ID NO: 319318 - DNA, 1139 bp, Cannabis indica
aaaaattacaattttattgaaatgagcagcataccccaaaacccaatagtatggaatattattactgttttttctcagaaacatatagttttttttacattcattcgtggcccgtgggttcgatcattaaaaggggaaaaaagagctcaacttttgcaaagttgatagattaagatttgaattttgatttttttgctgatagaatgagaggaattattatttatttatttatttttcatttccttatttattcatttatttatgatacaaactacaaagttgtaagaagagaaagtgtggtgttaattattttgagttaaagtcatctttgctgtacccacatgcatttgaacattttctaactaaaactcgagtgagctcttctattttctttgatctaccaattattatgttggtcattcactttattttatttattgacaaataaatatatggctaaaaaagtttagatacatttgatcttaaacttaattatagagtgataatgtatgtagggtattttgtgactaaattccttacatttttaagtttggtacgatataactttcatgttcgaaaaattatagttaaagttcttaatttttacaattattttagttagcatttcttctattaatttttagttattaagtgccaaataaacttatcagtgtgtacacaaagatacacgtggcgaaattttattaggccacataatattaataattaaaaaaaataatttaaaaatataaaaataaaaaatatttaaaaaataaattaaaattttcctttttcttttcttcttcttcttttgaattgaaaaaataaaaccttcgctcttcatccatcccaagtgcctcccctctctctttgttcctctctctcagtgcaggcggaaggcccggggatggccaagcgcacggccgatcacctaggctgggattcgaccccaataccaataccaaaaccagaaccataattctttctcctctccttcttcttcctccttgttctctccttcttcttcttctttctcctgaaccccaaaaccagtacatcgacccctatttttttttctccctatcaatccatggtctctctctctctctctctctctctctctctctctctctctctct

SEQ ID NO: 319319 - DNA, 932 bp, Cannabis indica
gggatactagattctacccctagtaaccttttaataacctagtaaactagttgtttgtgcgttccctcttctggcactaatgctacactgactgcattctccgagacagccaagtagaggagtaaagtctctccagttactggtttagcgaaaattggaggtgttgataaatgtttctttatgtttctgaaggcttcctcgcactcgtctgtccatcaaactttttgttgcctcgcaacacattgaagaattgtaagcacttgttggttgatttctagatgaatttgtttagagctgccattcttcctattaaggcctagacttccttcagctttacgggtgatggcatttttatcaaaacattaatttttttaggattcgcttgaatgcccctggcgttaactatgaatcccagaaatttctcgaggagactctaaaggaacacttctttgggttaagcttcatgatgtattttttgagtatttcaaagcactccacgaggtcatttgtatgatcttcactctttcccaacttcaccaacatatcatcgacatagacttccatgtttcttcctatatacttttcaaacatttaatttactagtcactgatacgttgccccaacatttttcaaacaaaaaggcatgactttataacaataaagtcccatgttggttacaaaacttgtatgctcttaattagggacacgcatcttgatctggttatatccagaatatgcatccatgaatatcattagctcgtatctagtagttgcatccaccaactggttgatccttggtagtggaaagcaatcctttggacattgctttattaaaatgtaaaaaagtcgatacaagtgctccaagtaccatttggttttgggacagaaaagaattagatatccacgaggggtaaaatggcctcgcgtataaa

SEQ ID NO: 319320 - DNA, 1145 bp, Cannabis indica
ttaccatggctctgataccagttgttagaaagaatattttactaggaccttattttactattcaagtatgttgttgttaacgaactaacatagattctaaaataattaaataaacatataagggtttattgaatccttatagtgattgcagcagaatttagtgtctcatttcgttcaaattctctattccttgattctttttgtcgcagggtattattaagaatttgagtctggatcttcttagaatgtgaaagacttcacagttccacactatcctgagtactcccttaatttgagtgggcaaatctaaatactctcttagcactcaaatttgatgaagaagacaataagaaaatataatataatagaaaaatacaagctcttaatcttttatttttgactaagagagtcagaaatctctctatattatatattatatatgaacatgtatatgaatatatgcatatacatatatgggcatgtaagactgtatatatcctctctttatttggggggcggattccaacacgcatggtacggaggcggattgtgtaccgcttgtagatctgaacggttgaagtattgtataattatattcttacaaattaaaagaaatcttgtggctagcatatgtagttaggtaatgacatagaattgagagagctaatacttgcatactatcaaatagggataaattataaggttaggcagccgattttgtgcccatatgtgcaaaacacggattggaatccgttgtacggcaggggggtcccaccgtacttttaaatgttttttaatttttgaaattttggtggtaaccggttgttgtaggtgtggttaccggttgggagtttatttttttaattaaaaaatagttaggtacgaaaaaagtacaaaatggtactgtttgtgttagttagagtacaaaaaggtacaacagtcttcactgttcctggcagttgatggtacgaaaacactgtaggcagtgggtccatgttgtcggattgaggctattttggtattttccttcattcataagatcatatgtatttgtgggatggtaattaagtacattatatagagtaccgtgtacattacttgtttctgcgtgatgtttagtaaattagtgtacataatatcacgta

SEQ ID NO: 319321 - DNA, 1465 bp, Cannabis indica
aaatgttaaaaaaatagtatatatagagtaaattcccctaaaaaaattaataaagtaaattaatttaaaagataattatagtagaattatatatgtaaacaaattgatggcaaaagtaagtaattaattttgttatagttgattagtagtataaaaaattatagcaaaattctcgtaagtaaaattatgttttaaaaatgaatacttatacaaaaacaatttaaattaacttccaaaaaataataataataatttaattaaaatttaataaatatttcaattatgaatattattttatattttaaaaaatatattattaaatattattataatatgtataaagttttaattgtagacaaacagtcttattgtaagaatatacaccttattacttaatgaccacatgatttaaaattaatggtaaaaaaagcttccgtaccggtaaggaattcattatcctaatttttgcactaggacggtggcacatggctgggtaacctgggcggatagttttactcctagcagtccataaagattggtataatactcaatgtcacaaatacatagcagaatgtttgaataagctcacaagtaggcatccaaccagctctataaggtatgtaactcgcatgcaccgaccaaagagtgcgagttggaaatttaagagatggacatcgttatttctaagcttgcatgtcacaaagacatactctacatttgtgggataaattctgagaacaaaagtaattagcttagatttctcaatcttttcattgtaattatagaaacatgctatattattttaaattttgtccacctaacgtggcatgtccacatggtcaagatcgaggagatgtgggatataatttgacaataacatgacaaagtcatcttacacgacatgtcaattgttaagggttctaaagcaatcgagcaaaattgtcaagcaataagaaaaaggtgtgaagcaggccatcaagaccttggctagccatgtctagctggccaaaggtagcatataggaaaaccagggtaagtttgtagcccggccaagccttaggaataagctggtcggccaaagattaatagtcagaccaaaaagacctgttcagtcaacgaagcctaacatttacaaggaaagttgtacaaagaagctagaaaggctggcaggcatataccaaggaaggcatgcacatgccaaggttggcggacacataccaaggctggcaggcacatactaaggttggcaggcacataccgaggctacataaacaataaatggccgcccataggagatcatagacagaccaggccctaaaaataagtctattcagccaagttatgaacacggtagtgcaattgagtgggagcgctagcataaacatggaatgtataacttctatctggcgaatagtaagcaaaggatgatctcctccgagcttgaccaaatgaacataaatggtgg

SEQ ID NO: 319322 - DNA, 706 bp, Cannabis indica
agttgaagctttgtgctgaaattgagtttgttgtccttgattatttgaccatccattattaaaagtagatgaagaaggatttgttgaattgcctctgaaagttagcaatttcttgcacttgagatggattcattacaacatctttatttgattcacgtttgtcaaaggtgtgtgatcttccacaaatctcacacctagttaaagcttgtacagctttagcagctttagttgtcttctataattgtatagtgagtgtagcaacctgagttgtcaaagtagtaatagcatccaatttatgaatatcggctgtcatcttcttcctagatgctctttcatcaaaccattgatgattgttcatagccatgtcttcgagtaattcataagctatagtttcacttttgctcatgaatgtgccttcagatgcagcatcgataatggttctagtagtaagtcataaaccagtataaaaattttgtaccagcatccactgctctattgttgggttttgtgccctaaataaaacccatttcaatataatcagatttattgattaataataaagatcagaaatcgcattttatattgcatggttcacatgatttatttcatgattatatttaatgtataaattttattaagtctagaacatatgtttagatttattcatgattaaattgtcgtcagcacagtggaatataatcatgat

SEQ ID NO: 319323 - DNA, 559 bp, Cannabis indica
ttttttttctttctctttcttctcgaaccagaaccccataacccaacttcttcttcttcttcttccttctaccattacaaccaccacaccaccagtatcccaccacaacaattgtcacacctcaaccaccattattactatcattgtcccaccattatccccaccataccacaatagtcaccaccacattttcattatacctaaaatattttcaaccaccattatcaccattatcatccaccattatcaccatcagaagcattttctctaaatcaaacaaaaaaaaccaataccgagagagaaagggcaagttcatcgcccaacgtcttcaacgattgatgaccggagataaggccttgtggcccactgccttttttttgcaaagagataaatagatgagagaggagagtgagcgagagagaggccaagaggagagcacggaagcgagagagaatcggggtaagggttttgggtatcggggttttttaggtatgggagttggtcgtcgatctgagtattggggtttgggggattcgttgatggctaacagagaaggaga

SEQ ID NO: 319324 - DNA, 493 bp, Cannabis indica
tttttttaaaaaaaataaatagaaattcattcaatttttcaaataccaaaaagttacaaaaaaaaaacatttttattaagaaaagaaagtgtattgaacaagatcttcctattccacaaagcactaaattttatttttcaaagctataagttaaacaagatcctaatatatattatttataattaaaattattgacgtaatttttcataaactcattctaacaagataataagtagagaattaaagaatgagaatcaaatttatagtggttccacctaagaagcacaatttcacttagttacctttataatgttttaattgaacttaatttaaatttaaatatagggttaaaactattttgaaccatgcatttaataagagttgtcgatttgactatttgttttgttaaataataaattgaaccttgtaattttttacaagaggagtgttaattacaatctttatgtccgaaatcacatatcaaaatattttt

SEQ ID NO: 319325 - DNA, 1120 bp, Cannabis indica
ttgtaaagtgtaataactaatagggtagtgtttagttgattggaatataggtagaattggaatgacttttcctaaagtgaatccattcctttgtttggtttgtcatttataattgaaaagtttatataaatgtgtcatctccctagaatgcactgttgttcagcttttgttttgcatttacctacacatgtaaacaatatttgtgagtcgacagactcagtaagaaaagtataaacataaacatataatcatatcgtaaccaggcgcccatacacctaactccattctcggtactctagcctataatctcggtactctggccgatatactcaataatctagtcaatatatactcggtctctagtcgatattctcggtcctctggctgatgttctcggtactctggcagatagactcggtattctagcagatgttctcggtactctggttgataaactaatatgtatgataaacatgtatgcatgtatatctttatactaatcttaccacgattcttaatttaggtgtgtcggtcaacttaaatggaaactactgctcgacaatttaaggcccttaagctgaaatctcttttactctatgaaattcttatatagctagactcctctgatttcggtatgaaaatgaagaagaaatttggttttagcttgaattttgcttggggccgaaaaagaaagagaaaaaacttggaaaattttaatttttcttttaatcttctaacacaatatatcaatgtttatccaattaccatcataataaacattaggagcaattagtcctcactaatgacaaaaattactaactttggacaaaattacaattttgcagttttctttactatgaagcaacctaaaatgcttagatgtataatggttcaaaaccacaacctcaaaaatcttgagacatttcaaatgtctaactatcttgacccgctaattctaagatacttaatccaccgtatccagataattctaatggccaaatcaccgtattattagaatatttctaattaaggaaataaaataatattattgattctgataaacgaatattttatattcattgaatttggacagaatcaattacgtaatattctatatatg

SEQ ID NO: 319326 - DNA, 1077 bp, Cannabis indica
acccttaaagccagaaaattgaaaaaaaaaagagtttttgagaagggtatttttgaggttttggaaaagtagtcatatattttaaatgtagaaaagtattagtttagggaaaaaatattagatatatgtaagtatagaaaatcaaatttcccatgtgaaaacccccaagtgcatcaattatatatgttattataccaaaaaaaaagatctttcacttttatcaaaacaaaattcaaaccttaaacattctaattgaggaattgtacaagctggattatatgtgtacttacctaaagaagaataattttttgccattaaaatttaaaatctcctctttttataatatataaagtgcacctgatttttagctataacattggaagggttggttagtactttattggctttagtagaagtagtgagactagtgagaatagtgcctatgaaattgccactcttaacaagtatacataacattatctatatttgtatacatataaaaagtgttataatagcttatatctctctcttctcattctatatagccatgtttcattctcaactttgtttgacttatcatcacacccttctacacccaaccactaaccaacccttttcttcttcttcttcttcttcttcttattattattattattaagaagaaaagggaaataatcgaaaatggggttgggaaagaaatggtttttatggtcatcacaagtggtgattggaatgttattggtacaagcattcttaactggaatgcaaattctatcgagagtcattcttggtgaaggaacttttgtgtttgctttgatgacatatcgttatttggttgctgctttttgtgttgctcctttggctttctatttcgaaaggttattcttttacttctttcccctttcaatatcaaaatgtgttttcttttgtatacagggccggtcctaggcataggcgggttaggcccgtgcttagggcccacacttttcgggggcccacacttttcgggggcccacacttttcgggggcccaaaataaaaaaaaaaaatattaggcttttatttaaataaaatttaa

SEQ ID NO: 319327 - DNA, 1056 bp, Cannabis indica
ctggtaaaattatttccaacaacatcaagcttaataatgatacaagaaaacagcttcaaaaccccactcaatacaggagtctcatcgggaaactcatctatttaaccatcaccagacttgacatctcatttgcagtcaacaatttgagccaatatctacacacacctcgagaaccccacctccatgcagttaacagaatcctccagtacttgaaaggcacccctagcccgggtttattcttccatgcctctgcaccagtaccacttcatctccaagcctttgcagacgtagattggggagcctatttggacacttggtgctccatctcaggatattgcatcttccttggcaattctctgatctcttggaaatcaaagaagcaacacactgtctcactttcatcagctgaagccgaatacagagcaatggctaatgccacttgcgaactaacatggctacactccatcatgcacgacttcaacatcaacataaaactcccttcaacactcttctgtgacaatagtgcaactcttcatatttttgaaaatctagtttattacgaacataccaagcacgtggaaataaattttcatctcattcgtgaaaagatccacaatggcaagatcaagaccaatcatgtcttctccaaatctaacatagctgacatctttacaaaatctcttttcccagcacattttcataatttagtctccaagatgagtgtcaaaaatttttacacttcatcttgagggggctattaaaacagttaaaggctgttaattaattcagttagacagttaggttattttctagtctttcctcgtgtactctatgtatatatagtcctatgccattgtatccaattcatttaatcaataatattgttactctgtttttcatttcaatttttctaatacacaattcagtatatgctttacaacctttgtacacaatccataatagctcgagcatgcttggtgattttttttcacatttacaatttaaattctagcatgataatcagcgataggtattcttacaccttggataagtgtt

SEQ ID NO: 319328 - DNA, 645 bp, Cannabis indica
taatagtttttactttttcttcttatttgcgtttatgtgtgtgcttttcaattatgaaatcataacatgctataataatgaataaggattgtgttgttattacactactactattttttaatttatatataatcacatgtataattttcaaccaattttacttgttaaaatctcctcaaatttgaatgtttcacaagaatcacttataaattatcggtttccatattaagtttatcatttacatttttatcaaaagtattatatttttatatattcttgtatagtggtgatcaaaattaatcactatttagtgatttatttataacatttagatcttgatttaatggttaatattatgaataaaaacattaaatataataaataatttattcttctaaaaaatacaaataattagtagagaacttgttgtatggaatctatggatagtaatttttattgaattatatgtttgattctaataatgatttttttttgttgtccaaaaaaataatgattttttgttttctttctaatccaccatggttccaaaattaattattgaatattgtagtgtcttttttataatttttagaaaattattatggagtttatttattccacacaaattgatcatcacatcctatt

SEQ ID NO: 319329 - DNA, 747 bp, Cannabis indica
gagagttgaactcaaggatcgctctttatctcaaatctaattgcaaatacaattgtggtacagactcacagaggcgtggttgactcgacaaagccacaggcggtgaatactgcactgtgtaaccctgggaacacgagggttccgccaacaacgagtcttgaacatccattaagtgtaggtcgcggtgtgacgactcctgtggttgaaatcgtgcctggggtgcaaccagggttttcataacacagccgtttcgcccactaccaatgttcaaacaaccattggagatgacactgaaatccagaacctccgcactgctcttggaatcatgcagggtcataccaacaacctatatcatgatcagaaggcactccacgccgcgataaatcttgcgtttgaagagcagagacgcatgttcgtcgaatggagggacaaggatatggaaacgttcagggcttagcaagtagtcattgacgaccgtagttagcagaccactatgttgatacaaaaagcctattagactagtggacaacagcctgtaaccgtcatctccttaggcgagaccgacgaagattcagcgatgaatgcctctcaaactataaatggtcagccgtccaattccccgtagcaggttccacctgtgggccaagtggtaggtgggcagaccttgtctaataattcatcaggagaagtcatacccaataattccaaccaagttaatggtgccagtcagcaaattggccaaaccaa

SEQ ID NO: 319330 - DNA, 1127 bp, Cannabis indica
atctaagatcttggtaaaataaattccaacagctcaaaggatcactcagctgccgggtgatgcccgaaatatcactttgttgaccttggaggccaactttgtggagtacgggctttacccaaaggatttcattccccagcccatgaaggagaagaagaggaaatccaatgctggctgggctgagggagctcatcaggagaatgaagtcgttcaactgaagcgtgaggctaagttgaagggaggtgcgggagccaaacagtatgctcaggaacattctaagcaggagggcgaggctaaagaggagcaggagataccgctcacaaggaggaagaaacttctgactgggcataggcccattgaacatacgattcggatcagggagcccagtttgcctgctcggccgtccactcctatagtaggaaaggggaaagccgccctggaggagcaggaaaactcgtcgaatgatgatgctccatcaggtcctgttcgggcagatgtttctgccaatgcgtaggatacaccatcttgcatttatctttctggatttttgtgctactatatttctcatgattttccctaaccgtgttgctttcatttcgtgcaaacatgtcttagaaaatgctcgaagctttgaagaagagagtgggaggaagctcgggcttatctcctccggttattgatctagggcagtgagacaactctgtctagagagaaggcatcgactgaagcggttattgatctctccgaagaacaaactgttatggatcctcctatctcgaaaatgactaagtccaaggactctctaggaggtagctcggataggccagagcaatcgaaaggcaggtctgagctaatcaaggcacctaccccacctccggtgctacacccggagaccaaaagaggcaaagacatgctcattcactatgtgaccgatcggtccctgaggtgaacaagaagctggttggagtagacaatgacctttcccttgagttggtgatgggaggagctttgaaggagtttgcaagggtaattctttcttgacagattccttttatccttctttacttagttcaaattttaacactctttctctgtacagactggtctgaagatagcttacgcttatt

SEQ ID NO: 319331 - DNA, 1504 bp, Cannabis indica
ccgttggttcccaagcccccagcaattccaactcaacacattcataattctcggcgagtctgtgaaacagagcgcgccccaaacaagttttttatgttattacccatctcagtgtccatctcgacatctactacattgactggcccatttgggtttatgtcatttttagtaattcccatattttgcacctctaaaggctcatcagcattaactaataacgtgtggtcaatctccacatcagtatcacctatatgttctctcccatgaccttccttatttatcccttcaattgtcttagtggagatttctttcatgtttcttgtagcttgattgatcacatttattgctgaattcgatacctgattttttgtataggatgtcgctaattggccgtcccctgatctcacgctagtctgagttgtcccagttccaaaattcgtgggattggatacagttgtattacaagagctagagtcagcaccggacctgttcatgcttcccaacctcaaccatttcgcaccagtagcatagttcttctatcttggggctgccttcatctccaagccatatggcttttcaatttgatctaaaggggtatcgaaaagcctatcacagaacctcttggagggtcctagaattccacagatgaagcaaaaagtaggaaggtcttcgtatttgaataaagcataacacgacatacctccttgtttaaccaccttcttctttctttttaatggttgatcaatgcttattttgacacggatgcgcagataatctctccatacgcctatgaagttgttaggatcagacttcacatatgttccaatgtaattcccaagtcgttgaatcaccgtttccgacatgaacccagtggtcatgttattaatttgcacccagaattcgatcttattgagaaccactaactggagatttttgccttgcttcaacctctcaaatatcaaagggactcaatcgaacgtccacaggttgccctccattacccttgcaatgtttacttcatgataaaattggaagagatataggttattttccaattctttcacatacaatcctcttcctggctgccataattgtgccattttattttgcattgcttggaaatctattgaacgatgtgtgagaaaacgtccaaccaagcaccacctatcatcgatgccaacagattcatcatttcccccttcaaaaatcaatccgtcttcctcatcttcctcaatattaaacgctgcatactgatcttccagatttggttcattattcatcttcacaacacacgaaatcaaaatagcaccaacacttctcagcaattcagctttgattttagccatttaggtactttaattattgattttttgcttgaccttttgctatttcatattttatcatttatataatcttttaattaataatttttttatatatcttatattaattttatttaataattaaataaataccatttatatatatatttttgttaaaataa

SEQ ID NO: 319332 - DNA, 1774 bp, Cannabis indica
ggaagtaatctaaatattttaattggacaaaattgtcattattagaacatgtaactttttttatttgtaaatttttgaagaccatatttatcttttttatttttaattaattaaaatacaataaatttggaaaaggggaagaaaagtattccctataaaaactttatagggaaataaatctttttttttcctacatttatgtggggctcactaatttctctctttctagggcaaatccagtgctaacagttaaatttaatataaaatcaacactaaaagagtataattttaattagcactaaatttttttctaatccaaccacaacactaaaaatattctttattattatattattttattaaactatctcacattataatttatatataaatataagggataaactatcggagatataatttattttattagtatcggggtgttattgttgggtattagaggtgttgtgaattggtcgggatttgtaaaatgactaaactacccttgggtgaatttgaatatttgaattatgttgagggcaaaaaggtctttgggtaagactttatttgtcttatttgaatttgtttctattgctgaagatgaggttatagattttaaaagaaaaaagaaaagaaattcatttatttgcttaagttagaagaaatcaagaaaatcttaaggaaaagcattcaacccttctcttcaaactctttctctttttcgattctcttgggcagcagctggggttggtgtattaaatttgaaaataaggaattttagtggtaatagagagctttggtcaaggtaaccctttattctttatttcttcttgagtttttgtagcttaggttaggttttaatgtgagtttttgtgattcttgatggttgtgtctattggattaatatgttgtttaattctggagttggaagttattattcttgttattttgagctgagattgaagttggtgttgagattcattcaagttttaagttagagaacctaagttaggtctctaatggtgattttgttttatggtcgttttgttgagttcttttggttggtttgagtttatttaggtatatacaggtatactggagagtttcataaagtttgggatggatttgaggtcaaggggttgtgtttttggttcccagctcagaccggttctgggggaccattagaaccggttggtacccaggaaccgggcttccggttgggaaccggcctgccagttagggctttttctcgaatcctagttttccccatttttgcgtagtttaaggtgtttgcatcctagttatcgatagggttacccttagtttcaattttatatcctcgatagatattttagaacgtctctcatcgagtttaaatattatggtttagggccctgtaaagcgtcgagctgcacttccactcaggctgaccggcacacctgagcacggagtgaggtaagatagcatgaatattacatatatgtgaatgaatgcttgtttttgattatttacactactaacactgattgtttgtatgatttaagagtgttagtatagtgtgggatatcaggatggttacagtgttaccaacacgagtaccagagggtacgtcgtgcatgtggtacaacagttagtaactctcgggagtacaataatggctataccaacacgagtacagggttagtactttagtgcatttggtacagaggtcgtacttcccttaagaacattcttaaccatttggtgagctcaattattgagctcagggcggctt

SEQ ID NO: 319333 - DNA, 1531 bp, Cannabis indica
accatttgattgcatctgttccaggagctgtacagggaatcatgtggaggaggttgaggtaaagatccatcaagaaatggttttttgtttctggcgccaatggagagtttgaaatcacgctgccatggctgaaagttgcgatcagtgagaaccggagtggcaagaaccaaaccagggtgatctgcattgttgagaaaatagggagatctcacatcttcgtatgcaagacgatcgtgaagaggaggtcgagaatcgatcgcagtggatcgggaatcaggaactggagcttcagttcgagttgtgttgtcagcggaagtttgttgtggcagaactggagcagcatcgaccatgggaggatcattggtggtagctggaattgtggttcgagttctcgccattgatgagtgtttgaatgtgcaagatgaagtttcttgaagcttcaatagtttgcatctgataccatattagctttgaatagcagagagaaattgaatttcattaattggaagaattggattacaatggcaaagggtctgctatatatagcagagtaaagtaaattaaagtaaagtaaagtcggttgtgagataacaaaccaaccgaaagtataacagttataacaaaccataactaacttaactaactaagcctaagtctctaatactattacacctctcatggaatttaaactcttctttttgccccactttctttattattcctgataaatactcaatgccgaaaacaaataatgaagcagacattgagccaccatgtcggagaccccttttagctgcaaagaatccaaggagctggccattcatcatcaaactgaatctgagggtacttatatacaacataatgaagcaaataatagagcatttaaagcaatagctttcaacatcttctctatgaagccccattcaattgtatgataggctttctgtaaatctagtttaatcatacagctgagccttgcattactctacccataatggcgaaccaagccttgacatatcattacattgtaagcaatgaatctttcctaaacaaacccactttgattgtgagagattagttctactaggatctctattaatctgaaacaaaaaaaattagtggcaactttatatatgagattacaataagctattggttggcattcacttacattagctgggcatttgatcatcgaaataagagtaatgattgttgaattaatttccatcaaaataatactcgaatgaagaaaagaaagtactacattacacatattctccccaactatatcccaattatcttaaaaaaaaaaaagcagcttccaaacccatctactcgagatatcaaaaatttccatcttcacttcatctttagtaaaaaaagcttgcaattttttcctttgttctaccgtgaccaaggggccaagagcaactacaccttgtgttaacgcagattttcgttaacttaggtggcgtttagtacactttttaatcaattttctattttaaagtaaaaaagtgaaaatattttt

SEQ ID NO: 319334 - DNA, 956 bp, Cannabis indica
ataagcgtaagacaatcagattcaataatgacatgatgccaatctttcctcttgatctaacttagagcctccttcaaacccattgcatccaccattaatggactccaagttccaatttttcgaatttggacagcttcaattacattgcctgagagtttctagccaccaatccaaatccgaagcattcctcttccgaaaaaatgggaccatcaacgttaactttgatgaaaggatcatttggtttaatccaatgctcaacaaatctcccttgttgaccgtggccagaaggagatataaaggatgttttttgagtattattccaagatacaaagttaagagatgttgtggataccacttcctccactgaagattgcttagagttccaaccagagttgttgcgattattccaaatagaccaacataacattgcagctccaatttgttcctcctttttccaaatacacatattattaaaacttcaagaacacatttattcaaaaatacaacataattcaaactaatatatacataatcttttaagacatgaagtaaaattaaataaaaactataaataatctttaaagttttaaaatccacctatgacaattattatatatacataaatatttgttttaaaaaaaaatgttgaagtcttactttatatagataaactcaatgataatcactagaacaaaacttatatttgaaacttaaattaaaatttaagttataactatataattcattgtataaatttatagaaaatagtgtaatgcaattcaaattgttaagattaaatttaaaattacaaaccaaatcgtactgcgcgattttgcaaaaatgcaaatcccaactacattgtgaaggatagaggtgttcacggtgtgggtggtgcagtttttaactttttttcaaaccaacccgcatatgcaatttttctaattataggaaatttt

SEQ ID NO: 319335 - DNA, 1161 bp, Cannabis indica
ttttatttttaaataattaattttattataattttaaatatttattaagtggactaataaaattgtgccatgtgtacactgtgtacacgtggacattccaccctacacttaacacccaaaaatggacggaaggggctaagtgctaacagaacttggatttaggaggttttaccactaaaattttagaattgggggttagttgcaaaaacctgcccacctaaggaggttatgccgcaaataactcaatgaataaatgcggctgttcaatccttggtagcaggtaggtattaggtgagaatatgaggctcatgaatacaccaaaatacacttcatcgatacattaaaagactgtctcgaactaaatttgcttagcccttacacttacttgataatatcatgcatgctaaagaaaatcaaatacacgaatacataattatatatatctgacaaaaaaacaaaaaattatccattatatgtatgaaaaattacatgataataatataaacatctcaacatgtcaaacgagagagtgagttaagaatcaatacttacagcatttttataattatgatataattcttccatcccagaagcaacagtaggaggcagccttcctgcttcttcttctttcctgattccagccagtatctctgcatgtaagctgaaaatcactagaagtctagaagcaactaatattttttaattgataaatctgtatttcaggaaataaatatatcactgttgatcaaatttcagaataacttcacgagttatttctattttttgttatgcatttactacagttgcaaccatattctcctccatataaaaagcgaaagtgttccaaagggagacagaaattgaatggaaatgttgattcaaaaatctagactagacttctaaactacactcgctcgctagattgccaaaaatgaataatgtgttaagtaattaataagacagacacagcaatttatagtagttcacccctatatcgcaatagtaataggactacgtttacttccgagttttatttctcacgagatggcaattacaacaatagactaagtatcagaaactccaaactgtatagagaaaaagtctagagagagaagctctgactttgtggataattttctaaatgtgaaaaatgagctaagg

SEQ ID NO: 319336 - DNA, 1415 bp, Cannabis indica
ccactgcatacaaactaagcatcattatgccacctgcatgcaccacaacatgcgccaccactttgaccaccacttggctaacttgtgagcatcacttagcttgtaacgtgccatcattgactgcacgtaacaacaagcaaggcctaataatctctccattcaaagttaaatttaatcgtcatttctcaacaatgatccacaaataagtaatccccactcaccccaacgtgccccacacaaactgccgagcaccccaacaacgccatgtggctacctttttccattgctatttttagcaactttctctccttatttttacaagaaagaaactgatgcttagactaaatagggtctataaatagtactcaaaattagtgtaaatggggaacaattgagtttagcaaaaatatacacaaaattttgtctcactctcttatttttctttatatttttgagcgaacataatgttttgtttaagctaatttttttattggtaagattagagaggagcttatgttggtgtgtttatatgctacatgattctcttggttgtaatgtctacaatttgaatttattaagtcttcttcactttttcttcttattattttacaaagtattatatgccatattttatataagtattagtcctgctctacttatgtactttagccatataagtattttgttaatgttaatattattatatatgattatcttttactgcaaaatcactatgaacagtattttgtcgctttttgaatatcgtatattgataatcacttgttataattgtgaaaacttaatttattcaaaataaatataaagtgagcttcatttagaattatttttcatttataatacaaaaacatgagtgaatctttatctcactattttttctcattgaattactatggcaaaattttatttttttattacaattgcctacatcgtattctctaaatttttagtcactttctaatttattttaatttagcaaacttttcttttgagtgtatttttacctccctgtgaatatgacaaactatcgcaaccgcggtgtaataaattgggcggcatcaattttttgatgccgttgtcggggaaggtttctatactacaagaggttagtatagtttgtctctactttttcttttctttttttttaatctttttttttttgttttgtttttgtttttggtttcatctaatttgaaaaaaaaaagttataacatttaaaaaaaatgtaacatttttttattcgaagtttaatttgtttcttttacttaaattataaacgttaactgtacatatatatattaacttttttctttttttaagttaaaaaaaattttaattcagtttactagttaaatttaggtgccgtttggtaacacgttctataaccacttttgttt

SEQ ID NO: 319337 - DNA, 726 bp, Cannabis indica
aaaaaaaaaaaaaaagttttgggtttagcggtttgtaaattttattagacgggttacaattagatatttgcaactcaataattatattggactggtaaaaatacacaataactcgatcaagctaatcgatatacacccctaatgcatgtaacgatgttacaatctttatgtttacctttataaggttatccctaaaaatatagcgtgaatggacagtattgtagtatagtgtgtcaaaaagaacaggtgtacaaacatttacaactccattcatcactaattaagttttaagatgaaatgtggcaattcttataatggtgttatgaaaattttagtatgcaagtgcacgtattgtttataagtaataaactcacaaaaatgagattgatcccacaagaactatagttaattaccaaacgattaaattcttaaattttatttggcgataataataattatgaaaaggagtttaaattttattgaaaaagaaaataaaaataaattaaagtacaatttaacaatgattaaagcttaaggtgattaattttaattgaatctgttttatatggtttagtataattcaattctcaaattttaattttcacgtgataacagatttactaaagaaacttatattcgggctaggacataggagatattaagtataaaaattctaaatgctacacaaaccatataggtactcttgtcctatatcgaaatctatgt

SEQ ID NO: 319338 - DNA, 519 bp, Cannabis indica
gactaatcagaatcatgctttagaaccgcggtaaaaatcatttttttagatataatagaaaatttacatagatagctagtttgctagggagaaaacttcaatttatacatacacatgtgcaacaagatttttgactgattttggattattaaaaaattattaatagcatgtgaaaagctataaagtttctatcaaaaagattaagattcataaatttattatctacatactagaaataattgcccccccatggtaggaagaaacctcaacattttaacattatcatttaatgcttaaatataactttgatctaatttttctaaaaataaactgtttttaacttttccattgaccatatttcatatttgacatgaaagagagagaagacaccgccatgggatccacctgggttgtgagatggctacagaattgaatgtcgccacccaacttggattatatatacttacaattgtaggaatacgattttgtctcgttattgtattttcacggattgtaatc

SEQ ID NO: 319339 - DNA, 816 bp, Cannabis indica
agtttagggggcaaaaatcctaaacagccaaaaagaaatcaaatttgaagaacacaaacccatctcttctcccttattgggctccaaccttaaaacccaataataaaaatccaaatgttgtggtggtggcattgcaaattactcttcgaatattcactactaattcgagttttaataattttaggggtatacaatggtatgaggatagaccaagtggccaaaacaaaatctctcatacaaactaccaatcagtagtgagatgagtgaatttagagagagaaaaggagaaaatgaatacccaaaaataatgaaggccaaacgtagaagataaacgtctcgttgtgcttagggtggtgaaggggtttatcagatgattattttccattttccattaacgttgacaaaaagaagggagactaatagagaaaaagatatacgagagaaggagagaagaaagagagggattttggcatctcccaagctcgtggtgacgtccattttctttgacgttagtcagaggtggcttaattagatgttgaagtggctgtcgtgattagagtgagaggaagaagaaaatgaaggagagagagagagagagaaggtgaggctgaatatttttatggtttttattgacctcgcttttagccaacgacagtgagtcaataaataaacaattaataatataatgaaaagagagcaaaacgataaagtaataaaaaacaccagattttgaagaggttcggtcccgtgagcgtggtaatagctgttaggttttatgccctaaataaaactccatttcaatgtaatctattttat

SEQ ID NO: 319340 - DNA, 819 bp, Cannabis indica
atcagatctgaagggatttcagattgaagacatgatcaaatgctagtagtgttcaaaaacatagggcttatggccaaagatacgaacatgaagatcctagggctgaaaaataaagtaaggttctaaaaaggcctcaagccacataggacatgaaaataatgttctaaaaaggctccaggcgacataggatacatagtttaaaaaatgccagaggccacgtggaacacaaagtgagtaatgttcctaagctatgatgccacaggatatccagaacatgaaaatacaatctatacaatacaaacatgatgctgagtactaataaaaaatttatctacatctttgcaggggtataaggagctaaatctggagccaccaagtcgagatctttagagtctaggctagcctcaccatcactatgttggctggcctggtgggcaacatcctggctgaccacctcctcaagtggtggtcagccaacacctcatcacgggtacctattgatgacccctctcgataagtagcagcctggtctgttttcatcagacttttgaacaatgccttcccgcgagaaagtgttctcccataaaggtcggactgcccatgtttgacaactcgactttagggttgtgaaggcataactcataagtaagtttggaggacaaatcaaggtgcaatgaccactttcgtaattgggattagtaaaggcaattagcactaatttctgacatttttacaattatttatgaatttaactatctgtgggccccattgttagaaatggacattagagttataatttctcaattccagagattttat

SEQ ID NO: 319341 - DNA, 963 bp, Cannabis indica
agttataaagagatgatatattctgttatttagggagtaataaacttagtgactgcacttatgtattaaaattacaatttttacattctaatatggtatcagacgtttacaattctctctaaaatcattatctttatttttcatccatggcgagaaggagacctactggtttaagaaattccgcctaaactccattgccaaaaaaatcttcttttataccagatgctccctcaaatcctctgatcattcctccaacttccgctcttaccggagacaataacaaccaacaagttgtcgcccacgctagacctgctcacgaagacagctccggcccttatttcttgaactccgatgaacatcctggattaactctgggcacactatcactatgtgataaaaacttttagccatggcgtcgtgacttcgagctctctattggtgcatagaacaaaactgtcttcctcaaaggtaccttaccacagccaccaatcgatgatcctctccacaatcactggcttcgtttcaagcagatggtaatgtcatggattttctactctgtttcaccaaaaattaagagcaacatcatgttcttgaacacaactgctgaaatgtggaaggaactcaactcgagatacgatcaagacaatggacctcgcatattcgaacttagggaagcactcatatctctataccaaggtgatgacactctgcacattagtttcactttcacttgggtgccatgttattgcaaataaatgggtatacaaaattaaatacaactccaaagatgaagttgaaagatataaggctcgtttagttgcaaaaggatataaccagctacatggcattgtctatgttgaaacctttacaccagttacaaaatttaatacccttaaactctttcttgctctggctgacataaataactggaatctacaccaaatggacataaaaaatactttt

SEQ ID NO: 319342 - DNA, 1118 bp, Cannabis indica
ttttctctttcattttcttttctttccaaccaaacaaacaaacaaacattctccattattttccatacacatttctttatttaccaaacatagtgcaagttaaggagttgtatagcaatagttgatccataatataaacaagagcactctttcccatgtaagagggggggtccataagttttttttttttacttcttcttctttttttttttctttttggaaaataaattttaataaataatataaatacaagagcactcttttccatgtggtagagaagggtcatggattttccttttgcttttttatgaagtggaagatcaaaagcaaaagatttattatatatgtaaatatatatatatctctgcttttacttttcagccctctctttaagactattctcttcttctaataaagctctctcaaagaacacaacatgacccaatatttatatttttacatttttattttttttaattttttttaaattaatacaatttttacaaacatagagagttggtccccattacactgtagcccaaggaaggagaagaaggaataaagctgatgaatgataccattttacaaagaaaaaagctttctttaatttttgatccatgcacctatttttatatatattcatatttattttatatatatatataaaaaaaaaaaaattaattaattttttacaacaacattgtaatgatatattaattatgatcatcatcaatctttttattactactgtacatcttgcagaccacttgtttccaactcagataataatttttttatatattttttacacaacataatattaataatatatatcttaaaataaaataacatatgaagaataatagttgtactaagtttgtaccacatcaataaaattattttaaaaaataattaaaatgcaactaaaagaaaaaaaattaataattatcttcatagtttaagaataatgttttacaataattaataataatttaaagaacaaaatcttacaagtgtcataattttacgaacaaaaatcttattttttatacaattaaatccaccaaatacaatatttagtcaattacaaaatgttactatatatgcagggacggact

SEQ ID NO: 319343 - DNA, 883 bp, Cannabis indica
tgtatttttagtcacaatacttgtcgtgatgatctaaaactaaattaataacaatttatatctaatactatatttttagtcacaagtaacatttcatactgagattaaaagtcacatttaatcacaaaaaatcatattgtcattaaaaaattatcaccaaaaataaatatttttttagtgaaagttttttagaataaattagttttttttactttcatatttgtaagttattaaaaaaaaaaactttaaatatttgtagaattttaccttctaaattagtatttttattaaaaatgttcttcaaattataaaaataattataaatttcaagtttcgatcatatttcgtttatttttaaaataatttattataatatagctacaagctatatgtataattatattatgaatttatttaattaatttaaactagttgtaactaagtataataattttaaatattcaaatattaactctaaattatcgcaaataatattagattagccttagatcaattatcattaaaaaactgtcagaaaaaaataaacaaatgtaaccgaaaaagttctaattattttcaaagtttgaggagaattttaaaaaaaaaaatttaagaggcaaaacttgtatagagggtaaaaattatatttatttatatttttaatcataataatatttataaattaacattacacaaaaatatgatatattcaaaatatattattagtttaaataaattataatttaaagtaatattaataaaaataatttattattttgattaaatgtattttagttaatacttattatgagtaaaataaaaatattaattaattatgtagtattttttttgtttgtggtaaaataatattcaattaatcaca

SEQ ID NO: 319344 - DNA, 958 bp, Cannabis indica
ttttttttttttgagataatgatcgttattgttaatgtcatgtgataataaataggtaaaagtaacttactcggggatgtaagtgttgcaaattttattacataagaatttttacagcatccttattttatgatattattttactcatgcatttatgactgttagaatgcattagctatattagctttatagttgtaaaatggtttagttagtttcctatttagtctctctaatttagttatttctcatttactctctaattttgtatattaatacatactattctatttaaaaatatatataattcattcaaaacacatttagagagtgagctctcactgtcggcaccaacagacaatccaattgccgatctgcagaactttggagtttggtggctgaaaccgtcgtgcgtgagccacacgcgctgcttgaagctgtggcgataacacccacgcgccacagcgtgggggcgtgtgaggtgtcatttcccagtcgtttctcggtcggttgcctttttggtgtttctgacttttccgtgcatctatttcaaccattgttttcttcttatgtgattgttgaggttcgtttgtcatcctttggtgttattttatcctttatctgcaatgtccttgtctgtttttgatttggtttgggttttcctattttgcttgtgagattttaattactagcttgttgtctcattttatttactcctttatcaaatttgtttattagtttgttgttggatttagtttggtaggaggaacataaaatatttgtaacggcctctgaaaggtcagttcttatttttgcagataaatgtgctgacttcttacagtatcaagagtctcttaagtattcatcttcttctattagagtaaactaaattcgtgtctccttttctcgtcttccaaatgagttattgattctggtgctatagaccatatgacaggtaatt

SEQ ID NO: 319345 - DNA, 1536 bp, Cannabis indica
acaatatattattgtgtgtttttgtgcctttgagtttgtaaacattgaagaaaaaaaaagaattaatctaatagttaaaaaaaacaaaaatgattttccaagaaagaaaaatttgcaatgaattgttacaaaaaaaaaaatatatatataaaaaaaaattatttaggatgttttttcttttgtaaaatttttaaactacaaggataatgctaaagacacaaaaattgcagatagtttttacagagtaaaatatagttttagtttttaccgtaaataatttgatatagagactatattatttttaatttatgattaagattaattaaacatgtagataatgtgtgcaatttttgtgtattacaatacaattataattattagaaatagaattcaaaattcttaattctaaaaaaacccaaaattgaaaaatttcttggagattggtaatattttaatggaaagtgaagcttcaaaatattaagaataataaattctttggaggaaagttttgtatgttcccaagctacaaccaagtatcttagtccaaaataatgatattaacatttagagcacctatatatattagactaattatgatttttattttaaatttttttttcatatattaaatcatgtttcttaaatttttttgactatttaaaattgcatctaaattattaaatttgtttgatttaaggactttactataattacagtcaattttactaattttatgattggttatattctaaattttgatatctactaaattacgtccttcaaactttgtcatgtatcaaaattacgttccctaaatttttatccatgttagatttttctaactaaaaattggacaaaagtctataaatctaacaatttcaatagttcagaaaatatttttaacgaccttaaaagtttaagaggcatttttaacgaccttaaaagttcaggtgacattatttaatatatgtcaaagttcaaagacaaaaatcttaattagcctatatttatttctagattatatgtatagaacaataaatattttatcactatttattgagtttacaattatttatcaatgatatttttagttctcgatttttgaagtgtattactcttaaggcatgttttcttgaggctatttttctcttaaaagtagtcattgtatttattatgaatagtatattcatcatttttcgtgaagaattttaaaaattcagggtttacagtttacttgagataaattttaaaaaaattatcattattaaaacttaagaagaaaaaagaatttcatttttattatacattaattattattgtcaactttttctcatttataagttatataattgtttctcatatccttactcattggattgtcttgctttaactttcaataaagtataatgtgcagattgatttaaaaatcacacaagtttaatttgctttttattatttattggataaatattattttaaaattttatatttttaaaagtttttgattaaattctctattttataaaatgataaatt

SEQ ID NO: 319346 - DNA, 966 bp, Cannabis indica
cttatataaacataacatacgtgcatcgcacgtaacagtatactagtatatatattatatatataaaattcatttaaaaaaaagattttacataaaaactaaattaataaataatatatattagcaaaaaatttaaataaaattattttcaaaataataattgtggttcttgccatatatatattatcttttcaatgaccgactattgtgggcataattttttcttttttgaacaagtggattatataatttggacatttaaaaaagaaattgtatattttcaatataaaaagacattttggttagttatagttgaaattatagagaaacaaaaaatgtgtaacacgcgacaataaaagtattactttttgagagaagattctattaaaagaacaaaatggcttagaattggtttacgtggacaaacgaggtagtttggtactacaagtagataatcttgttaaatcttaataaaaataatataaataccatttagacactcaatgaacatggtggttgaagggttgataaatgagaacgtgccaaccaacaaaatcgatgatccctattttaaaataattgacgcacaaattaaaagtctaacttggctgtgtgagtttagtttctttattgcattgaaaataatttattgattagctagtgaaacccattaacgtgtaaccaaagcaaaattgtgcatgacgcacaaaaccatgtttaattaaaacatactaggtattctatatagtattggcagcaccacattaatatatattttatgaaatattctaaacaatgaggagtctatcaatataattttttttttgggtgattctacattgcacccccttaaaataaatgtactgatgcacccttaacttatttcggcatctacaagaattttttagtctattttttttttcatattcatgtacgttatatctatttaagataccctacaaaatt

SEQ ID NO: 319347 - DNA, 1718 bp, Cannabis indica
atgcctaggattttcttagcttttcctagggctttcatctcaaattctttgttcaggagtgacttcatttctccaatttcactcttgcttttccctatcaacagaatgtcatcaacatagagtagaagaaagagtgttccattgaagtatacacatggatcataagcactcttggtgaagccacttctcaacatgaaatcatcaaatttgagattccattgcctaggagtttgtttcagcccatagagaaatttctgcagcaagcagaccttatctctatcttcatcaaaaccttttggcatcttcatggaaatgatctcatctaggctcccatggagaaagacagtctttacatccgtttactcaatttttaaatcctcagaggctgccttggccattattgctctaattgaggcctgctttacaacaagtgagaagatttcattgaaacatactccttctctttgtgtaaaccattttgccacaagtctggccttgtatgttttgtaatcattacttgagaggccctccttttgtctaaagatccatttacaactgatcaatttacacccttcaggttttttaacaacaatccatgttttattcttcaatagagatttttctcttcatcaattgtctgcagccacttgtctctgttcttgcaattgatggcttcttcataagtggtaattggcttagaattctcaatctcactggcaatggtcagggcataggccgtgtaatttgcaaaaccaaatctagctggtgcccttgattctcttctgatcctatctctggcaagttggtagaaataaagggagctatcttgagtctgatctgattcttctacagtttcctgttcaacattgtcactagcccttacttctgaccttacttcaacttgtacctgtctagcctcagtactgatctcagctttattttctagtttgatgggccattaccttctcattgaaaaccacattcctgctcactacgctttttttgaaaccttcttctaggcaccatagcttgtatcccttaactccatcaagatatgcacttgattgctctaggttacaatttgtcctgtttgacatgcatatattcaatgtatccaaacactctcaaattttctagacttggagcctgacctgtccatatttcttgtggagttttgaatccaattgcagcagatggacttctattcaccaagtagcaagttattttaacagcttctccgcaaaaccttctttccaaaccagcacccttcaacatgcatctaaccctttcaatatgagttatgttcatcctctcagctaagctattttgttgtggagtccttggtgctgatttgtgtctcccaatcccaacttctctacaatagtttgaaaattgtgtggaacaaagttctagaccattgtctgtccttagtttcttaactttcttaccagattggttttcaacaagagttttccaatccttgaaagttttgaaagcttcatctttggttttgagcaagtgcacccatacctttctcgagtaatcatccataatactcaaaaagtaatttgatcctcctaaacttgacactcttgagggaccccacagatctgaatgtatgtactcaagtggctctttggtggtgtgtttgccaatgctgaaattctgtttgcaacattttccatacacacattcatcacagaaatcaagcttaccac

SEQ ID NO: 319348 - DNA, 858 bp, Cannabis indica
tttgagttagttcattatgatgtttggggtccttctcctactttgtctcaacctggattcaggtattttattacttttgtggatgattattctcatgtaacttggttatatttaatgaaaaatcgttccgagttgttttctatgttctctgctttttgtgctgagattcaaaatcaatttattgtatctgttcgtactttgagaagtgataatgccaaagagtacacatttgctcaatttcaatcttcctcttcagcatccgagaagtttgattggttctattccaaggatagaatccactgattttgtttttcgaacatctgagctcgaattagagcctttcttcttcaaaattttgcatgaattcaacttccatgcccttttggatcttgtttttgccatagctccaactcaagagctgcaagaaacagagagagaaaaagcttgtactttttttttttttaacaaaatacaattattattagaactacatcttcccataaatttttggcgaaaataatctcattaatatctatttctaactaagaaaaaagaaaggctaaatgtgtgcgcgcccacacacacatatagaatatattttaatgggtattacttattgatggttactaaataaatttaattataaatattaattttaaaaatattaatcattagattttgatccaataacgaataataaaagagatattctatgtttaatttagtcacttaattgaataaaaaatattctttttacactttatcaaaaatatgtttatatatagaaaatatttaagtcaaactcaactttttttttttttgctgattgaacaactctagcctatataatattaaaat

SEQ ID NO: 319349 - DNA, 1053 bp, Cannabis indica
ttttagaagtttcatatttagattgtttaaacaacatacttgtaagtagatctaagatcctggtaaaataaatttccaacagaaggatgtactcctcgtcatccatccatctcaagaattcgcgtctttaatgagcgaatacattgcaattaatagcacgtggctctttagttagccctgcttggcctacagcttctctgagtctgactaacgtgagatcctctcctaagtcaacatggggcttgccaacttctggtcctatctctctaatgcagtaccagagacgagatctggttgttaatcccctaggctatcgcccacaagtccttccttcagtgggaggtgccaatggtggatctgctcatggaggtaggggcctgttatttggatccaccgggatgcttgtatcagtttggccagccgtagtggccagattggtggtgcctgttatgctgacaagattcaccacatctacagtgttcaattggaattcctttatggttggaacctgagcattcagatctgtaatttgtgggtcttgagggagagccaaagatgtagatggtgcgattggagttcttctcgtgttaaccatggcatttgatcaggtaagatatccacactctcgatggaagcaccagaccgttaacctccaaaagtaatcaaccgacaacaaagttgtatggatctgatgcttgccatgtgtaacacaaatagaacaaaaaggtactaaaaacatagatttattatagaggttcgatcccctgtgatagcgggtaatgacctactctcctttagttttattaataccgagggttaatagtatccaaatcaaaatagttgagatttgacatagcatccttaaggatacaaagtatgaatcaggattgacaaatctcaagtaacgagaatgcttgtatggacatgtgagacaggaaatgaagaagagaaaagttattacacttacgcttagagcttgaaggctaatatcaacttaactgagctaaggtgtaacaccctaactaacttagacgtattacgtgatttttaaac

SEQ ID NO: 319350 - DNA, 501 bp, Cannabis indica
agccaaacaagtcacaacaagtatcaaagcatttgtctaccacgcttatagtgatataattaacataattaatgagatgaaaataataacttcttagggcattatataagctaagaataagataggttgtctcaacatgtataaataaataaacaaataatgcataatatcattatgaagttttatttggcatgttggttcattacaccacttttttttttttttttttaaaaaatatatttagtcatgtatgtccaagttcccaacagagcttgtgggttccacgtccactataaagttactaaaatccaattttatttattcaatattccttaataaaaaaatatatgaattatattatatatgtatagtataagaaatttataagatatgtatttattatagaatatggaggtagagaatgtgacaatgtgaaaataaaaatatccacatttattggaccctaccctacttatatatatatataaaaaataatgttat

SEQ ID NO: 319351 - DNA, 1272 bp, Cannabis indica
aaacctccacttacctattccaacggtctttataattgaccgtcttattaaccgttagaaaaagccaattttgtaggcgtgtaacattgtgcatatttttttttgcgatttatgttatgttttgtgcgacattattgtgattttcgtgcgacattatggatgtttgcattttcgcaatttatgttatgctttgtgcaatttggtgcgatagatatgcgatttattcctatatttgtatgcaattttgtgcgatatttgtcgatattaatacgatttgtactttttgcagatcgttgttcattaaattttgtactctcgaaattgggaggttgattattggaagtccaattgtgagggtgatgtccccacgatggatatgggcttggatgcggtcgaagaaacacaagttggcactcaagattcgaccgtattcgaaacccaagcaaaatgggttgccaaatatgttcaaagtgccaaaatcattccaccatcaccacacaaagaagcaccagagccctccacatatgccactgtgcccccaacctctattactgccaatgatgtcgactacttagggttggcaaagagattggagaatgtcgaagtgcaacaacttgcgattctgactgcacagactgagatgaaggctgactttaatagaagtcagaatgagatgaagaatcttatcatggatcaaattgcgactatgataagtttgttacagaagcagcaatcagcgccgacaaaaccatcagaggtgacaaaaccatcagaggcgacacatccatcacatttgggagataattgtgatgaggatgatgtgtatccaagagattaggaacccaacatagatgaggttccttctactcaaatgtatgccattatgattgtcgtggatgatacacagtctcaggttgtaaaagagttggatgggccacctactggagtggaactcttgagggttaagagaaaatggaagccacttttctctaaggactacacagaggggaagaagaaacaacgaacctgtgcaattgaagtagacactttgagaccagcagactcgcggttgttaaaatttttccaaaagtggattactcactcatcctagggatgtccacagtggcacagcaaatcgatcttagttcgtgaaagtgatggtgcacggagaatgactcgatgatgttgtaagttatttcttaactattcaaattctttgtttttcaacttttgtgcgacttatatgcgatttatgtgtgattattatataat

SEQ ID NO: 319352 - DNA, 1206 bp, Cannabis indica
gacttacttaatgtcaatgaaaaacataaacattttgcatcaccattggccttggaaacttgcatgatgggttgtatttggataaatggtccttgtggttcgttcgtccttcatacagttccatctggggcatcctaaaatgctttggcaatggtgcatcaacaattctcttcacacaaggcttcgtatcctcttcctcagaatcagatacgataccactttgtattttagaaatcttttagtgatcttcatccactcctcaactttacgttccaagcattgagtattatcacttgaggattctcttttgcgaatatgatcattgatgtggtttttttctttagagattgtttatggaaaggcttctgccactataatctgatacaaaatgcacttcttcaacatccttgtcatggttactggaatcattgggaggaggtgtttcttttcgagactctggcttttgtactccaacatatgtcttttttgtgtgtgactctgcctctagaattggtttggtcaccgtaccctgagacatggtttcctttcctcttttgttgaggttggtcaacaactttggattttttgggatgtttcgtggaaggagtcttctttgattcttcaatagcgattcctttgcctttgtccttgcatacacctaaagttctcggatctttcaaatctattttctcaagcacatctattgttggaggagctagcacattatgagatagtttagtcagggcatcacaacctcaattctggtcattttgtcgagtagcaactcgttgaattaatcttactgagttaacatgcttttagccagttgtagttgcctcaccatgatgaccacggagtcagattcgttaggctggctcttctctccagcattatcattagtaactttgtcctaagggtcatcttcatgtatatcctgcggtacgtcttcgacgttaactttagtgtcctcataactactttctccaaactttgcatcctaaatgataggatcgtatcgattttggtcttcatcttgacagcctttttgatgactactcacctcttgagggtcactagaatctccagctctgacactaggcacagtgaaacgaaaaccagacttagtttggatgagggccatgattacttgaacgtaatctgcaagtggtctcactacttttttcaactcttaatgaaagtaccaaa

SEQ ID NO: 319353 - DNA, 1228 bp, Cannabis indica
atttatttttttttaatttcaatctttacaatatttatgcatatataaagttaagaactgtttcacagacgtacattttaatatatcatcaggtcatttaaacactacatgaatttaaactaaaattgactatttatccacttattatcatttttttttgtcccacatttctaataaaaataaaacaattcttatagtgctacttttaagtcagtataattatttttattctaagattaaatttttattttagtataagtatcgtattgaaaaattaatctcttcctaccttattttatttttatgccatcttcacagaaatttgttacagttcaagaaaatttctgcagcaattaggttttttcttcatctgaattataaactaattataccttgaaaaaccatgttcacatgatgtatttaactaaccttttgaaacaatccaattactcaaactttaaaatttaatcaacataataacaaataaattgtatcataagaacatttaatgacagttttagttaccaacatcagcaattacggtaaatagcgtaccaacagagcagaagctataacctaaactctacagcacaagaaaagagaaactaacccacataagatgtcttagcttattactcctacaataaagctcctgtccaacatatcaaaatctacctcctaatctactaaagctacatacaaataaagctaacatagattttaatattagaattacagtcatccattaaattctggggctacccaattcatcataaattacctttacctttgactagagtattacaaaatgcacagggaaattgaattgatagctctaccacgtaacgttcagcagctcactggggagggtgccggaggttgttgtggggcatcaactcgccccatatggtcaacctttccgtgatcaacaacaccctcatccgccttcgtgatattctcctcaacatcaacccccttggtctctgcttgggatggaggtgccactccactaggatcctctttctctgcttctccatttgcttctgcggttacaaaagcagtgacattttcatatgctttctctgtgtcagctgcggttatagtagcagtgtctgtttctttctggacattctcatttgtttttactgcttcggctgtggctacagtagcaatctcggtttctatctggacattctcattcactatctctgcctcagctgcagttaca

SEQ ID NO: 319354 - DNA, 1248 bp, Cannabis indica
gtttttaacgtcaacagtttggtaccgtctatgggaacgaaaaactctagcgacattagttcctaaacaattcactataattttcaagatgtcaagatatttccatcatctctgagaaaatagggttcactcggatgaaaactagccgaccaccatagtaagagaacatcaacctcctgtcaccagaaagggccaaaggaagagtaaccaaagtgtggaccaccaagcaaatactcaaaaagggctcccatcactacgtgacttgataatcgatagataaccccatcgatagaagtatttaactatcgagaaggccatctctagtgtcgtgccttccaccatctgtgccatcaaaccctgacactttaaggagttagctcatgcataaagaaaaagcaagtgtactcggtgagttcaagcttccgggctcactactatgaaggggaaataagcgacctccactggaagaataagaaattagaaactactgtggctggtatgcaaaaagtgttgagtggcatactcaaaggcaaagcccaagcctcacacattcgtcatgaaagccacggagtggggctggaacgagatctcaactacatatgctggaaaaggtaattccatgtcatccactaatagcacccctaatgaacacagaaggaacctatggcgagacaaaagctcaacgacgcaattgagacaactcgagcccactcaccatgagaggatttcgctgagcgaaacaccccataacctaaaaaagagacttcacccaagaggtctcatactagagggcacctcgcctatggctcccccccaagagtaaggtaagctgaaggccttgtctgtcagctttagtgataagtcacacactggttggacaaaatgagtacctctcacgggcccaatgcaaaccacatagaagacccaagttccactcactaaccctcgagagaggatgagtgaaaggatgaagagttagaggcgaaaatgtgagacctatgtcgaaagatagctatcgctatgcagggagacttcaatgatgatgaggagtctgatgaagaatctcctctcttaagggagattcaaatcgaaccacttccaccgaacttcaaggagacacagatgacaccatatgatggtaccactaatccaaagtaccatatcaatgcatttaatgagatgatgaagataaaaaaaaaaaattaggggtgtaaataaaatttccctctaaaatttctaaagacaccc

SEQ ID NO: 319355 - DNA, 542 bp, Cannabis indica
ataaattattttttgcaaaacatagaccatcacacttgttgaaactactagttgtgtgatgttagaacttggagagaatatgatcatctttagacactaggctgagcatacgaggcttgtatattcttaaaagcttttatagagtttctctaaggctatgtttggaagttaaattttagtgaggaaagaaaaaggtaggaaaaatgtaagaaaaaaaagtgtttagaacaaaaaaataaataaattaatttttcaagtttgaaatggaaaatattgtcgaattgagtgtttttctatacaatttttctttccataccaaatatgattattattatttttttttttttcttttttttccctacatttttcttactttttcttggccaaaatctaacttataaacatagcctaagtgtccatgaggaaggaaatgatttttgagacaaaggtctttgattaatgacgaataataaaagagaaatatgaatttttatacttaatttagctacttaattaaagaaatatataaaaaaaaaatatct

SEQ ID NO: 319356 - DNA, 1009 bp, Cannabis indica
gtatgtatacatatatatgtatatgtatatgtatgaataataaatgtatatgtatatgtatatacctagtgcctgacatttcctttccagtttccactccggcaatatactttgttttgttggttttgacactaagctagcatttatcatgtaaacttgtgttccttttttttttctcttctttgaagagaactattcattattctattcttcgttgagaatattgctttatttcgattttaattgatcgacaatgtgtatatatatatttttaaaaaagaagaagttatctatgtaattaagtaggtcatacaaattaaatgtataaaatttgtatatttttttctttttctttgttgcatcatgtatatgcttacataaaacagctgtgttcattaatttagaccacacaataagtaaagataaggctgcagagaaacaaagcaagaaaaaaattaaagattgtgccaccaaccagtttgcaagcaatcaaaataaatatatattactaattattagttgcttactttaaaaacaaaagtagtcgtattattatatttatatagttaattaattctcacgtgcactatatacagttccaattgcaaacaatgttattccagaaatttttctctttttgtaaggtttataacatataatggaaaattattgagtagcatatatacgttttcgtttttcatttttatacaagtataaacttttttttttggataaaataattaattatgtaaaaacataagagaaaagataaataataaagaaggaaagaaagaaagaaaaaaatgaacatgaattaaatatttatggtttgaaatcaagggatacgatcaattattaaataagattaatttttgaagtctatatatacaattactgcccacccatgagtcacttaattgaatgttaacttttttaaaagttcaaatagtacaatctcacttaagaaaaaaaaacaaaaaaaaaaaacaaagaaaaaaagaatagaaaa

SEQ ID NO: 319357 - DNA, 1233 bp, Cannabis indica
tatatatataaatatttgtatatatacttactggaagagttgaataactgagtgcagaattgatgagcatagccaaacaaaatgaagcaattggattcagaccaacagcacgcattcctgacacaattattatatatatatattatacaataataatcataataattagctacatctaattggtgctctatagtttgtaaattattgttaattaataaaataataaataattagctatatatctaaactgtgtggagtagtactgttgcaacgaaaaaagatagtttgtgaaagtgaaagaactcttcaaacaccattaataccagaactcattagcagacttttctctaacttttttttttaagaaaattactttatactatttttaattttttttaaatttacggttgggttactcaagtaatttctagtggattgctatttgaattttagttgcgatttatgttgttctattgggctgttaataaaaatgatttcagatagtcttatatatatagtctgtttgaaataattgtaattctttgaatacaattgggtaattcatacaaaaaagagtataattagattcatgggttatatatataattatatttaccaacataagattcccaaggataaacaatgccattatgatcttggtcaaagtatgcagcatgttgctgaagaacactcatattcttgtgtttgtggccttctgttccatttggatgctctccatctacagccacaagtgctcttggcatatctatatatacacattaatatataattaaccaatatatatatgtatattattaattatcatatatatatatatatatatggttaatatagacttacaaggtttagggagtgaaatttctagatgagttacaacttttctttgagaagttattggtgctaatggagcttcagttgccaatgcttcattgttgttattattattattagtttccatgctctctgatttcccactcactactctattcttcctctcttttatctttcttatttgttctctctctctatctctccctatatatatataaattataaatatgctatactcaactaccaaacattgtttttatttgtttttcaaatacataaaataatatatgttttgaactatttatatttagttaatttaaagtgtcatctatattttaaattaactggcaacatgaattatttatgtgtacactcttgtac

SEQ ID NO: 319358 - DNA, 660 bp, Cannabis indica
catccatgttaaaattttttactaaaattagacgaaagtccctaaatttaacaatctcagtagttcagggagaatttttaacggccaaaaaagttcagaggtacgatttagtacatgtcaaagttcagggaaaaaaattactaattagccaataatgattggtgtgtgttgatatgatcttattatatatatatatacaattaaaaaaatagagattaattagtaatgattggtggatagaaaaaaaaattattattgggtatcattattgctcagtacattggcgtcctacgattaattaacaatattctctaaaagttattttttaaaaaattatatgagacctagctaatacttaattatactaatagcagtgtgacaccaaagagagagtacaagtaacaattatactttataataattctaaaaaaaagtagtaggtttcaaattcaccaataaaacataatcattgggcaatttaattggccaattgtcaatttcatagcttcacaattcccacgagtttttatttaattattatttatccaaaataataattaaaaaaaaaatagacgaaagggacacaaagcaaatcaaatttgcacttagagctcacccaactcaaaaggcccaaaaaaaaaagaaatttttaaaaatatt

SEQ ID NO: 319359 - DNA, 954 bp, Cannabis indica
aaaaagaaatttttaaaaatattgatattttttgtatttttcaaaagtagcatatttcagaaataaaataatataacttaaataacgaagggtaatttagttatatttaaaaatattttgatcttaaggtcctaattgtaatcttttttaaaacaactatttgtaaaaatatagagtttaaattggtaattcgttaaagtaattataaatcctaagtttttggcggttacacccgtttaattatcgttacacttgtgtttaattctacaagcttaattttgatggtaaaaccttttaggctattgaactgttagtaaatttaaggtgttatctggttaactgtcatcatggattatttatgtgtacattcttgtacacgtgacatgtttattggtacacctaatattattatttcaaaattcattttaaaattaaataaaattataaattttatattataggtgtactaatatatatgtgttatgtgtacaagagtgtatacataagcagtccatgttaagttaactgtggaaaatagagatgataccttaaatttgttaacagtttaataatttaaagagttttactattaaaatttaagcttgaaaaatgaaataaaaatagaataataattgaaaaagtttaaccacaaaaaactcacgtattaataaatagttcaaaaagtaacactgtagcatgacataaaatttagtagccgtcacatattaaatttggatggctaattaggttttttgcctcatgatgtttgacatgtaccaaatcatgctccctgaacttttgagtttattaaaaaaatccttgaactattgagattgttagatttaaggacttttgtctagctaatttcattcaattttactatttcagtggttgtttatatactaaaccatgctccctagactttgatatctaccaaatcatgcccctcaaact

SEQ ID NO: 319360 - DNA, 859 bp, Cannabis indica
ctctcattgccaataaacctcacttaccttatcgtagattctaacatagtatctagaaatgaaatctcattcaccttatcttaaatgctaacagtaatataatctatatgtatatgtataatttacttacaaatgcgggtgaagagctctttgaacgatgtgttgttgtgattgttggtgagttataactatgtaagaattcatcttggttcacacagctcaaaggattggctgtgccaatggctaagattgttgccacacaacgaccaacatcctttgctttaagtactcctttgatttcttccatgtttgtcaatattatatagagtctttataatatgtcttcacgtttccctctgatagaaagagtgtatatgagggaggtatttataaataaatatttttatgagtttatggtatagtcaaaaaataacaactctgtatactttctatttcctattaattattttattttatttgtcttgaagttggctataccacaccaaaccgatacaaaaaatatgggcataagcatgaacgcaacatgtaaacacaaataaactaactcgaaaatatgacacgttaaaaaaacttgatactttgataagaacaatatttataaaatttagttattaattaaaataatattaaatattaaaattaataacttaattatttttggaaaacttacaaaaatattaaaatttgggttaacttttaaaaaaatactgtcactcagaaatctttttaaaaatattgtattttataaaacatcattaaatcacaaatcagaacaactcaaaacaacagtagaacaactaataaaaacaccagttgaacaacagtgaaaacttaacac

SEQ ID NO: 319361 - DNA, 675 bp, Cannabis indica
atattaatgaagcttcatctagtttgtgcttcccatcattttaattgattaaacctaagcactgtttctttcttttcttttcttttttattcttttttggtttttcgatccataaatggatgtctcaagaaggaccacttccttaatattttatatgatatattgatagtaatgcatggaagatattattataaactttagttatcaatttatattataagacatggatacgaaatatacggtgcagtcattaattttaacagttaaatatataaactatatatgtctatttgttacattataatattttgtgcacttcatgatcatatatcgtttctattggtatttactacaataactacacttcatcttatataactaaaatcccctatataaagaatactattaaccatgtaaaatctaattcagaagaaaaaataaatcatgaaaaatttaaggtggcgtttggtaatatttttattttttaattttaaaaataaaaaaataaaagtagattttttattttaaaattttatttttagaaaataaaaatggattttataaccactttatttgtttctaaaaacaaaacaacaaaaatatgtttactaaccacttttgatttgtaattttaaaaacaaaaaaaaaagtatattctgtaactatttttatttt

SEQ ID NO: 319362 - DNA, 1699 bp, Cannabis indica
ttagtataatgtatattatacactaagtgttctagcagccagttcgcttcgtcaccacttctctacatactgcgagattaatgcctcgctgtgtattgtcgatatcgtccttgcaattatgtcttctgacccgaaatagtttcttgtcaatacgtgggtcaacatttcatacattcttgtctcgctaaggactgtgcagtctgcgagttataaatataccctattgacttctgcatttaaggagttattccatttaatatttataaatataattatcattatatttgttggttaatattccctgagactgacacgtgtcatcttctgaagtaccagctaattttcgggtataacaattagattggactggacaagattggatcatgctgaaagtaattatgactttggtttaagaataaactggattgttttatttatttacctttaaaaaaaataaattaaaaataaaaatatataataataaataaataaaaaatgtgtaaattaccaaaaaaaaaaaggaataattaaaaataattaaattataaattcaatgatatatcatacataattaagtgtatattataaatatataataaaataatttattatatttatatttaataaataattacaatagtgaaataaaaatattttaataatataaaattatttatacaaaataacaatttaacctcaaatttaataccaacattaatttatgatatatatattttagtatttttaaaaaaatatataattttattatcatattatttgtcttagatttcatttaagtaattattgtttaattaatattattttaaattttaatagcttgtaagataattcaaaattatatatttttactaatttgaatatataagtttttgataaaaaaagatttataaataaatttgtaataattcttcctttaaaaatattattaaatttaaaatatattaataaaataaaaattaaaaaaaaaaacgataaaaaaatttttgtatggattatttatcgcaccctgttagatgggataaataattccagagagttgaaatttatccaaacttcgtgcatgtctatatattagactagacaaattaagatttctaatcgaattaggcgtaacaaatggacgctaaattttattcacaatttttctttctttctaaagccaaacatatttaaactataattcactgttttgaaaaaactagatcatgccaaatatggaaaaaaatagagagagtaaaattttaaaacaaatatgtaagctaaaaaatgttcatgataaagccaaaagaaaaatatatatttaaatcaaagttgacccaatttccatcgacaaatcatgatcatttgcatttgtatcaaaataatagatggatgacaatgtagcattacaataataacattattattattataattatttttgaaaggagcactaccataatatggtaataaataataaattatatttattgcattattgtccttttggtcctctcaattctcaactgggatacggtaatgcccagctcaataaatagtcacagggataaagatgtcataataacgaacattaattaatacaaaatcctctttccaaaattccttaaatatttaataataataataataataatataataggtatgttttaaaaaataaataaaaattaatacttaat

SEQ ID NO: 319363 - DNA, 745 bp, Cannabis indica
gagagagagagagagaaataagtggagggggaggagggggtgatctgcgcctgggattcttgtggttattgggttttggtgtgttccagagaagacgcaaatcgaaagataaagaaaaaagaagaaaaaaaagttattttttttcttttgtaaatatcttttttaaatgttaacacgtggatcaataataaaatctgttatgtacatttgtgtgcacatcagtaatacacattgccatttaatagtatcattctaacaaaagtgcaaaaaccaaaaaaaaaattgagagcttgaaagcttttgccgtcaaaaaataaatttattagattaaatgtcacaaatcgtatagtttatgtcgttttactgctaatatccctaaatataattgctctagttctaaagactattggttatataaaaatacataacgaattgtcttaaaaaattactatgataaaatttgaaattccagacagttttacatcatcgggtaaaaaatttctgatggtctataaaattgccgtctataagagcatcgtcctgaataatcggtagaataggtgttaggtcctttttggcaatttagttgtcaaaatattttttaattaatgtgtattttattaagcatttaaattatttttattacattgatttagtgcattttattgctcttttctatcttaggaaagaatcactttccagctggacttttctttgtttggaaacttcttgtaagagaagaatt

SEQ ID NO: 319364 - DNA, 753 bp, Cannabis indica
tacttgtgagtagatctaagatcttggtaaaataatttccaacacggccctcccgaaatgaccagtatatcctcgccctcaatagaaggaggttgtattctctgtttatttgggttataaaggttgttgggctggtttggcttgtttactttatgccttaaatattgtctgaaatatccacgcgagatcaaactctctatctcgtctttcagttgtcgacattcttcagtagtatgccctatgtccctgtgaaatcgacaatattttgttgattctcgcttatgtctagcatgcctcatgggctcagatttacgaaatacaatcttgtattcatttgtgggaaatatgttttcacgagttttagtcaacttgttgtatactgaataaatcgagacatacttgtcatgctttttctgcttctttttacttcccgacccaatcttcaacagcttcatcttgttctagcttcttatttgcgcacaaatacttgcactctttcattaaattcattaatgttcctcactgggcaaccctgtaggtcatccaacaattcccctccagtcgtggataggtcaattgtgatacccgcctgaagtgcagtaagctgaatactatcattcaagtttctaacccttgcagcggctgtgctaaagcgactcaagtaagccttacgtgacttcttgtttttattggttaaggacgatgcctcaggtcgcctgtctctagttgtaatgaccgctctagtaatttgga

SEQ ID NO: 319365 - DNA, 787 bp, Cannabis indica
acattgggatctctttgaattggatcttgggtgtgggtatctagctggacgatcaatggaatgttttgtcggtctagtctctttctgtgatttaaattgtttttgaggtcatgcactgtggctagtcaatcgaacactgaagcactagatggtcttggcgtttgacctatttggctgagaggctaacctgagacctccgtatgagtagagttgtttgaatgtgtaaatcctcccaaggggcgatctggcaagatctggccatctaccatttggcccacagtttggacctgtggccttggattggacggctaaccactccgagtctgttcggtatgtctagctgcataccattctgacttgctcagggggagtactagattcagttgttggttgttgactggtaaactggtaggcccttctgattaggacgatggcctgcctagaacgatcgcaaatggctgcctgctgtgctctcatgacttccatcttctggcctctccactctatgaattgacatctttgctcgtcgaaggcaaggttaatgactactcggagatcaacctgatcatgatgaaaagtgttgttatggccttgcataagcccaagtgcttctcgtagattttgaagtttagtgtcatgtccaactggccgttgagtattattagtggacgtgaccttggtgctagtaatagtctcatcgacaacagtacttgtgttcccagtatcctgtacgcctagtgtgaacccaaccaaaggggaagtcactccatggcctactgttggtggt

SEQ ID NO: 319366 - DNA, 1237 bp, Cannabis indica
aaaatggtggtttttataaatgaggcatgaaaaggtgtcacccagcggcccaacataaatttgtagcctatatatgtatactcgtgagtttggggaattttagccgtcctatatataatcataataaatgctacatacaaatacaatatatatagtactcttccaatatttgggaaaattatgccatccattttacgcgccatttacgtgtgaaactttttttttaaaaaaaaaaaagcattatctgtcaattctctggctctaatgtccatatagtccatacttcaaaatattgtattgatttgcagcattactcatgttttataagtagcttaatgctaatagtctcagccattattatttaattagatatgtttgtgtattgtattataatgattatattatataatttttgtttttgtatttttttaaagaaaaaaatggtctccgtgccaaaaaaaatagcaagacaccgcagtgtaatttcatcctttataattattaatggaaaatttgataaaacatgcttatataagacaaaaataacaaattatactaaagttaaattactattgttaatcaatgtaggtttatttttcatatgttcccaaattactcttcttatatcaaaaacatcacccattctcttttttttatggcataaattttaagcaaatatcagatcactatcgaactaccatcgaactactatcagaccatatcatgcctttataaactatcagaccatatcgtgtctttatcaactatcggacttttatctctaacctccaaattacactactatcgtatctactatcgtaacctattgtaccccattatacccccatcataccatattgtgcgtctgtccgttcaacgatggtgttctggattgtgggtcatttgtcacgcactagatagaaccagagagagagaaggtcgtgggtagtcaatcgatgcaacaaagagaaccagagagaggagggtcgtgtcgtgggtggtggtcacaaatgttcaacggtggtttcagtggtagagtttggtgccaaggaaaggggaagagaaaacgtgctgaagggaaagagagaaaggttgggtggatttttgaaatgggaggagtaatttggggtatataataaagaaattttttcataaatatgagaaaatgtaatatagtttacttttttatggcataaataaataataccatgggttagggatttttttattttttaca

SEQ ID NO: 319367 - DNA, 1188 bp, Cannabis indica
ggcataaaacccaacactccaacaaaagagagccggttcaagggtggccctagaggacctaagggaaaaactcaatcaaaaagtactgtcagaaagatagtgtcgtcatcaatgacgcaccaccacaaagaaggcccaagatgcacggcgcaggacctttgagacaagttgaataagaagaggaaacaactttacaagaaaatggaagatctccgcagaaggatagcctcagttgcctcagaggagggaagttaggatgaagaagacttcgatgatgaatctcctttttcaaaagaaatccaatcttaacagttaccacctaatttcaaagagcaaaacatatcgccctatgaagggatcactaatttgaagtatcacttggacgctttcaacaagattatgaaaatgaaaagagtcacgagtagagcgaggtgccaatgcttcgcgatgacactctgaggcgtaacctacaagttgtataagagggttggctcccagatatataacttcgtagaaacagttcaccaatgacttcttgtcccaacaccgtgcttctaaagattatgtcgtcccaaggacaactctggcagatatcaaacaaggagaaactgaaagcttaacaagctacatccagcacttcaacgcagaagcggctaaagtggggagactctctaaggatgagcacaaaatggccatcatcgtttgagtcagacctagaagcaagctgtggaacaacatgcttaagagatagctggattaccttgatcacttctatgagtgggccaatatgtatatctttttggagaatggacatgaaaattttggagttgggaaagacaagcaacctggaaagactcgagctgaggggtcacacaaaaagtggggattcatgtataaggatgaccttcaggacaagagagccaagagggagttatatccactaccaagagaatacaccgactgttgggttttatgccctaaataaaactccattttaatgtaatctttatcttttaaatatcaataaagaaacaaaagtattttcatcacttatttgtgtgtcatttggttcatgttatcattttcttgtttatttgatttataaattcatccaaacccatgtcacatttatattcttgtttattgtgtcgtcagcacagcggaaagtaatcaagattatgtgattaa

SEQ ID NO: 319368 - DNA, 682 bp, Cannabis indica
atttaaaattatgatattaaaaaaattaaaaattaaaataaaattaacataggtgacttgacacgtaacatctatctaataaaaatatatacgaatttcctttcctttgatttttcaactctactaatacatgttgcaattctttccaatagatttttatttctctctcatttattttctttcatctataaggttttgttaagttaaagatcaagtgaaatggttctacgtgtaatgtgagactttattcaactctgttctaccatgcggtcgtggggagttggctcaactcagttaaatttcattattttgggaaaacataattcgaattctcattgggtcctccatttttgtttaattaagttataaatattttttttctcaagtaaattattgataaatatagaaatttaaatatttccttcttgataaacttcgtccaccaaataattgtttatttctttattaattaaaaataaaattaataaaaaagaagaagaagaagaagaatgaagaagcggacacgttctctggcgtttgctccacgtcagcactggtaatgaacccacttgattggatccttatttttgaaactattcttaatacttttctcacattataaaggaaaatgtcaagtttataagactcaaaagaaatttcctttttcttaaaaaaaaaaaaa

SEQ ID NO: 319369 - DNA, 2255 bp, Cannabis indica
atcatgattatattccactgtgctgacagtactataatcatgaacaaatacatatgttctggacttaatagaatttatatattaaatataatcatgaaataaatcatgtgaaccatgcaacataaaataatatttgatctttattaattagcaaatctgattatagtgaaatgagttttatttagagcacaaaatccaacactgtaaagtttgaagaattacatagagaattaataatcatatctatatgaaaccaaacccataacctaccatcagaaccctttaatatggaaaattaataaacacacaacgtacacgtacataggaaagcttattcattattgagttgtttatcttattaattagctcttctgcaattttttcttatctctccattggatccagtgagggggctgatgtcacccatcttaaccatggctgaggcaaaatcagagaagaagctggtctggctattgacataggatctgacaatggagtcagctgatccactattgaaaagctcttggtcagagtggagtagtcctttcttctgaatgaggttttggaaatacttgttatcgaaggctttcggggtttggagatcgagtggggccaaattgttgtcaccagtgccagtggttcttgggcaattggcttgccttgttcttgcgaatgaaccatcgatgttgctctcgttgtatatgtgagccctgaatgatgtgcatcttgctaacccaattgtatgggctcctgtagtgtaataatccaagaaaaaacaatacccaataagaaaggcctagctagaacaagggaattttctttaaattacaataatttcacatcatttttatgaaaataccatttatgattacaaggcaagattataaatatacaattaaactgtagaaataataataaaaatcataaaatgatttaagtttttttacttttattacatggattaaactgtttatatatatatatatatataacttaacaaaagttaaattcttatactattaattaatttgtgttcatgatatttactcttcagtcgccagtcaaacataaaagcatgcaaataaatgatgtaaaactaaaatgtaactatcatgtataacaaaaagagcgttgttattgggtatcagtagtgcctaacatctttagacatatccctttacaattagttagtgatattccctgaaagttattatattaatctatatgacactcgatacttaattaaatcaataacaatattaacacataggaaggtgttaggcaccacttgtaccctttaacatttatctaacaaaaaatatgttccaattgtgtgtcaaaaatttatgtaaatttggcacacacaaatacataaaatatattttgctaaatttaatagaagaaaaaaattaaactaatttctatatatatatttatattattatattaaattatagcattaaattataaatcttttacaattatttattattattttacataataaattaatcataaagtaattatatatatttttttccatttttaataaaaatattaatcaatattaaattttgtaattaattatacattaaaagaattaggggtgcacaaaatatgggctaaatcattcaacccggccaatccaatctattttttgtagtagataattatgttaggtatcatgatttattgagctaacaagtgataagctatatgattatgagttggttataggtttaacacatttaactttatataaccgaacccaattcttgacaaaattatacatacaaatattcattatatatttttataaattaattgtgataaacttagaaaataaattaaccaaaatatattattaacgcatagttcaataattactctattatttctaccaacaagtctaatataagaatcaataactatattaattttactacccacacaatgataatattaccaccttaattttttttaaaccctatatttacatacacatttatgtatttatatgtatctttttttttatgcactaggctaaaataattttattatgtttgtaatatcaatattaaagcctaaaatattcatattaacacaatgaattcaacccaatccatcccctatattattgtactaagtagggttgggttgtacactaaaaaacattaaacagtttataacttacccaaaccataattattgaattgacctattaaattagaggccaagatgcaaaatggccctaa

SEQ ID NO: 319370 - DNA, 2724 bp, Cannabis indica
ttgctctgcgaatccaccgaattggactaagaagagaaatagaaattgctcatgttgtagccaattctaattaatctcctacaaatactagaaaacatattgacattcaaggaacagatgcaatgttgtttatttttgttggttacacagcatacatgtctcttcaaaagaaataccaaatctgagaagtcgatcctttatttttagcaagagttgaacaaccatccatagtatgaagctgggtatagaatctcccccaaacttcatggcttcagtgagctttgttttatgagggacaaaacattttatatatattagattatgtgtatttgtcctataaaaaatgttggccattcagaaaggatttgaattgatctttaagagagacaagactcttccagtaccatctcccttgaattggagctttgtagttgcaccagtcctcatccttaatgtacacactatggacactttttttaaaatgtggcacaaacataagaaccctaggccccacatcccagacaaggcaatcaacctgcatgctaggcaccatagtagggcctaagttgagaaacggggacacatagctaagcacttaagatcctacagaattgtttttaagttttatcattcaacagtctaagaaaatggtttatgaagacactagaatgagatctagaagctggaggtatcactttgacatgttaaaagtccaattgggcgcccacgtaagcacctagcacccatgttaactcatttgccctagatcacatcagttttggttctaagattcaataccataggcaaatgactatacaaatgcaacaaagtacatggaagacatgccataatcaagtttcaagctttgtatccaatttcagaatagatccctacttaggggtcgcccatataggtatcagcgctcaagttaacatcatgtcaccctgggcacacaacgacaacagtttatgttttttgagaacttcttttagtcatgattccacaaatctatcatgaaacaatgtgtgtaattgagttcatgcagcgagtaccaggtcggggcacaaacaggtactagtgccctcattggcagtgtgcactcactgggtgcacaggtcacccaagtgaaaaatctaagcaaattattactgccttagaaaaaactagatttccatgaatattttcgccaagaaaattattgggcgaaaaggaaggagaatccaggcatgtttaacttagacccagtgcctaggctgaccttggatgcttaaaacatgttttctgaagatgtttcttaagaatttccttcattttcatcaaataagaggaaacaatagctttctaaaattaaatgaatccatctggatgttgaaacacctaggggtacctatgttgacttcttcaagttaccagtggccagattgacaactagctcacactagggctctgttaagttttctgacaattttgtgtgagtaaaccttatccaagagcacctaggtgttgtgttgtctcaacataacactttagttcaaaactacgctcaagttgacaccttgtgcctaggttatgcacacctagagtaaccatcgattaggttgaataagcacctagagcattatgcttattttgcaccaagaataagcactcatggcaaaggtaaatctcaatctagtatatcaacctatgcctaaattgacatggatgctgatctccagtcatcacctagtgctcaaccaagcatcaatcaccaagagtggaagaatggataaatttcatcgtcaaaatcaactatgtggtgctcaatcatgctatttcaccaacaattcgagagattagtagaaacatcaactagtgcccaagcattgggtgccaaggtgatgcctatgccaagctggtgtagcgtgcaccaccaggggctctaatcatgtttttctccaaagtcatgtaagcaaatcatgattttggcttcgtgatgcaccaatatcactcaaaatcttaaaatatgttaaaatcaagccaaatagaggaattcgcaactaggttgacgttaaatgcttaccttgtcgctagtacgccgacttggttgatgatatcaaagcagccacacaccttgtagtgttttggtagtatctcacttaatacaactcgggtttatgcgattccaactgaattagaaaggtaattttgataatctttcgatggatttctcacatgcatatcaaaattatacttattatttataaaaaattagcttacattttgaattgagatttgtcaatatcaaagcgtctgaaactaatcgaacgactcaaattcgatctcccaaattgatgatcatcattcaagatcaaaagatctcaaccattcatcagaggcatgccatcatttaataatctcatattgtctcaaaagaaatattcctagcatatttctgatacttgtaatattttattattattttaagaataattagtattattgtcccctaaacttttggcgctacctaatcatgctttttaaaatatacgatttgttaaaaattttctcttaaatttaatagttacataatcatgtttcctttaacaagtttcgtttcttttaccattaaaatttgaaattttgcccttgaactttgaccaatactaaatttttccccttttaaaaaaagaagttaattttaaaaattatttttttttactaattttgaaaaagtttaaaaaa

SEQ ID NO: 319371 - DNA, 1152 bp, Cannabis indica
gtttagattggtgttaacattatttaggctaataattttttttatctttataattattttttaataatacttgttaatggtattttagtaatttaaaataattgaatagcgagagtactaatccttctgttattagaaggattttaaattagagatttgaataggtttactatcttttcacttctttttatcaatccatcttggtaaacaacgagatttattatctctttccacttctccttcctctcctctatttttctctcctaaatatagtgttaaagtgtcttgtgattgtataatacacccatagtgagggtgcttagctctcattaaattagatagatttttggaaaatttgtactatatattatttttggttttttttttagtattgatactattgataatatttataactaaaattaattataatgatgaaacaataaattagtttttcaatttacacgtgtgccatcatcatatcatagacaacaaagatatgagtttgagtactataaaatataaatgtaacactaatctcttttttaattatgattattattccttttggccgtttagcgaaaaggaaattatgagtggaagattcttggttttaaataacaatttcttattccttttttctcacttttgtgacttgttctatatcttcatgttcaaccttatcataacatatatctacttctttattgatttgccactacaaataattggacctaatatatataatactcatatttctttgcaattttatataccttgctttcatcatttaattagctattttatgtatggttcgtgcttcaaatttttactcaccttcccctatagatttataattcttatatataggtgcattactctcaaattaatcacatttaattttaaaatactttcgtgatgaactactagaaaataagattgttgatataagtagtactaatcaattcatttaaatcatctttaactgtgtagcctcatacctatacagtctcaaaattattacagtcaacatttcttaaacgatgtggaattgcataacttacttaatatttctccttacaaatactgactatcacattttagtccccaaattatttaatggttattaatttttccaacaaaacttactga

SEQ ID NO: 319372 - DNA, 513 bp, Cannabis indica
agatttggtccgatggtagtccgatgggtggtccgatgggtccgatgggtggcccgatgggtggtccgatggtggcccgatgggtggtccgatggtgtaaatggggtgatgtaaatggggggtattttaggaatatcataaaaattgtcatattttacaaatattagttattatttgtttagaaaaacaattttaaccaaatgtaagcataaaaaatcaaatttccctatataaattattatgagtgcaggactggctctgaagtgagctgagtgagttagccgccttaggttcccaccactcagggctcattttgaaaaaataaattaataaaataaataataatactcaaattattaaatatatgttgcaactcaattttaagtatttgaagtaatatataatttaaagaataagagttaaaatcccaacaatatcatttttttatagggaaatttgatattatatgcttaaaattaatttatccactaaaaatatgctagcatattttgc

SEQ ID NO: 319373 - DNA, 943 bp, Cannabis indica
tcaaaattaagaaaaaaaatcttaattaacctaaatttaattaaactagttttaaaaaaaatatcactacactgcgttctaaaattattatattaatatcggataaaacaagggatccaaaatctaatttttttaactcccacacacacttagcaccagtcctgatgattaaatgcttgaagggtgaggcttggttttagaaggttgatacttgatagagtgatcttgtggggttttgattttaaaaaaacaagtttattggctgtaattttgttttttcattctcagaaactatatgtaatgaccaaacctttgtagttttgttaatgaatctaaaaacataaagacaaatctgaaaaatgtcatttttttttatctaaaactaagtttttcaagtatgataaaaataacaagctgaactctttatattatgaataattactttataggctaaattaattagggcaaaattgaaattcaaaaccctgagaaaatgtttaaagtgcgaaaactaattcttcttaaaaaacaaatagaaagagggggagagaagattgaggctcagatttgcccaaaactcagccaaagagagaagaatcacagctacccatggctgccatcaacgacggccgccgcactggtaaacgacagaaccgtcaagtaaccaagcggagcaaccgagtcgagccgccaggcaacccaatcctttctaagtttgactgattttgaggacttaaaatagcatcactgcctctgaaagagaaagggaaatttgaacttctatgcctaaatgtgacacagtgatatatatatatagatatatagagagagagtgagagagagaaatatttatttatttatttatttatttgagaggagaggtaggggaaatcatcggctccgcatgcgatcagagagaagcaagcagcagagactgagtggc

SEQ ID NO: 319374 - DNA, 522 bp, Cannabis indica
gagaacatgtggtatgggtagaatgttcaaatacgactgaatcgaaccactcttgaaccactctcagacgactgctcggcgacgttgggcgtcgttgatcggtggaacgacgcctgtggattatcgcaaaaacttcacgaaggttccagccaatacgtgatatttccttctctcctctacgcgatatttcctctctcttcacgtctgcttttctcgcctataaaagagaattagttaagctaggcaagtgaggttattatcgtgactattggtgctttatgctttgttaaaatacataaatgtaaaaagttattaattacattaatgagtgggaaaataataatagagaatgatacctattgcggtgtaaaatttggttcttcctatattttgtttcaaatttggcacaatttctagtatgtgttaaatttaaactacattatacactattattagagtttaattttatgaacatggactaaaaaaatacttatacaacatctttatagcactttattagag

SEQ ID NO: 319375 - DNA, 869 bp, Cannabis indica
tttattaaataaattttctgtaacaaaataaagtgtcacaccacatcaaccagcctcaaatcgaacgaacggcacccgtatggtgggtcaagtgtgggttgtgtcgccgactaggtcgctctctttaagacattcgcgacactacccatgaatgtgaaaacagtcagaaattgcacttgacccaccacgtctgcaccgtctattcgattcgaggttggttggtatggtgtgactttttttttcgaaaatttatttaataaaataattatttttattatttaatttatttgagaaacgtgttcaattaaaatttattacttattccattagtttatataatacgattgaattaacaagagaaacacatcttttcatactgagaagaaaaaactcagttttcactatcaaaagattctatctgcgatatatattttcaaggtgtatttgacggttcggtacagtgcagttgtgttctgatacagtgtacaacaactaggttgttttatccttggggcgaccgataatttttaagtgcttgcacattcctgggcagtgtcgcaaacatattaaagagagtgacctagtctacgacacaacccacacttgacccaccacatgtgcgtcgtccgtttgattcaaggtcggttggtgtggtgtgatactttattttttttcataaatttatttaataatataattatttttattatttaatttatttgagaaacatgtttgattaaaatggatttcttatcctattagtctatataatgtgattgaattaactgttgggaatattttaccaggatctagatttactaacaagtatgttgaattaacatcctgaatatgaatatctctaaaacaat

SEQ ID NO: 319376 - DNA, 496 bp, Cannabis indica
gattgtacagcttacccggtgtttccccttacggatcacgggactactgactgtcacataatagtaatgtaataaaataagaatagtaatatgaattgatttctatgtttagtttgttgttgaaaaggaatatttagaataagtggtaaattaataaaattattcgacttttgtaagaaaagtataaatataggagtaaaatagtaattttaagtaatgataataagaatttataaagtatacatatgagtgtaataatttttcatacaagtaatgatgtaataatcattacaatagaatagcattaccaaagtttaaaagaaaaccaaatattgaaattgtaatcatatttcgagtacaatgttgattacaataaactaaacatatatataaacaagtactataattaagagtgaactaaaatttttagaaataataaatattattttggactctgtgtttttgcaaaagttatcaattaaactttctgttttgt

SEQ ID NO: 319377 - DNA, 809 bp, Cannabis indica
ggtagcttttctaagtaaatatgtgctacaaccatcttaccacaaagtttggtatgtacattttgtaactctaaaaaaattctaagtaacaaagatagcaaaaattggcttgaaaataatattctacaagaataaatgagtagtttttgaaaaaattgaccatgaaaatattaatatgataaaaaattaagaaaaacgcttgaatatgctcactacccccaactgaaattagacaatgtcctcattgtttaaatatatatacatgaaataccttgaatgagaacacttagagagtgagccaatgtaaagtgacatgatattgattaaacccaacaccgaatatggtagccactaagaactcatgactttaggatgttgaactgcgatccaatacttagttaagtacggacattggtataaggaaaacgccacaaatgatgatagaattccatttgataagtcagattgaatgccacaagaaataccctcgataagtttgaatagtctctttaaaaactcaagaagaaaacctctcaaatttttattcatcataatttgtcttttcaaagcattttcaaggccttatacagctgaaattgcatgaaaaagacctttttgtcctcctaattcaaaccctaatactcacaaatagaaagacttttcaaataaaaaagaaagattaataaagaaaaaaaaaagctcttgacactactacaaatatagcctttagtgactcgcttaaaggtgagggtcaataaatgtttagagataatttttagtgacacgcattattcaacactaaatattta

SEQ ID NO: 319378 - DNA, 627 bp, Cannabis indica
aaaaacatagatcatttttgtattattcttgactaataatttatgattatttgaaaattctcagctaaatataaaaggtaaaactgtaaaagcatattattcaatgtgaaatataacatattacacaattttattaagagcatagacattattaataataaaaaaaaaaagcatagctactagacattacatttggtagtaaccatatatatatatatagtaatgcttcctgaataataatgaaaacattatcttaataatatataaacccaagtacgtagtactctaaatatttatagtttcatagaatcaaggtaactttttccttgcagctcactcgaaaaaaaatccttgaaatattctttattggacaatgttttgtataaggcaggattttttggagtgatcaaggtgttggctggggctatgacagaatctatacttaaattatggaatgtggcaattgagagtctttcttgtgtagagtttattgtcactctgtgctcaatactacgatatattccatttgtcaaaatctgcaaaaaaaaaaattgttttctgttttaaaaaccaattcacttttggttaatatattacttttaaaaacactaaccaaacatgacttgt

SEQ ID NO: 319379 - DNA, 1555 bp, Cannabis indica
tattgttcatgatattttacatgtttggtcttctttctcttttatttcttttattcattgtaaaaggactcaaaatgttacgattcattctcttacacgtttggctttatgcattgactcttctcgagtttggtggcttggtttgcctcattgcctctaatcctaggctattttgtagtaagtttttatttttggattttttgcttttaaatagaactctccttccgttaaaaaaaaaatcatagaaatattttattaaattaaaatatatatttttttactaaaaaacgttaaaagaaaattgaataggctaaaatactattcaaagaaaaagatatattaaaatatgttcatacaataaaaagatattcacttaatagttatatataatattaagactatggtttaattttatggttaatttagcactataatagctattgtatatattttcctacaattttagtgattttatacgttaaaatatatttttaagttttttaaaattatttaggtagtaatggaataaagtttacaacctaaaagttttaatatgcttataacgttttaaaattacaaaaatatattttttcagtaaaaagtaagaaaacaattaaaaataacgagaaaccaatctcacgatataattataaataaattataaaacaatcaaacgaattagaaatacaacttcgtgacaactataatacaactataaataaattaaaaacaactaaaaaaacagtttattatttttgctgaagaagttttttgtaaataaaaaaattcaatgcgtcaaaatgaaaaaaaaacaaaaaaaaaaatcatgttgacatatttttgtaattttttcaattttttttttgtctattatgtaaatttttcttatttatttagtactattatcatttagaacaataaaaataaattaccaactttattttttctctaaaaataaataaataatttacaagaatattatattttataataaaataataagtctttatatatattgcctttcaaacaaaaatctttatatatacattgttttgagttacataggatatgcgggggttcaggtacccacccttaatgggacaagggtaggggttgactttcgggagcggggatgggtataggtttaaatattcatacccaaatcaataatagtgtgggggcgagggaatagatactcgccctgatatgatatatatatatatatatatttaagttttgaaatattaactactacaattaaaataacttcatgatttaggttttttattgattataataatgagaaattttagttttcataaaaatgcctacggtgatgcatattaataatcacacttaactgctttaaaaaaatgacacttaactatttattttcgattaccaattttgtatttactaacttcatttactatacacactattccacttatgtttatttttatactaagttttcatgattgttttttttttttaaattctctttgagacattattttttaaaaatatatatttgtaatgggtacttgatgggaat

SEQ ID NO: 319380 - DNA, 608 bp, Cannabis indica
gtcttctcccatggcttttctgttgagaattttaccattaacatcaacgattaacgcgtcgacaacgttatcagctgctaggccatattttcttagcagagagccgtaaccacctcctgttatgtggccaccaatgcctaaactcgtgcaaagtccagctgggaaagcatgtactctgcttttttgagagattctgtaatagagttctccattagtggcaccggcctgaacccaagccgagttatcttcgatgttaacttcgatacgtcgaagattgatgagatctataacagcgaaaggagtttggcttattgatgcgtaggaaactccttcgtaatcgtggcctccacttcggactctgagctttaatccgagctctttcaaacaagtaatggatgcttggacgtgggaatcgtgtaatggtgtgaatatgaagtctggttttggaactgatggttccaagaacctaagatttgttgctgtggatcctaaaacagaagtatatgatgaattgtttggtgtgaagagggttgtggtaactggtacggaaagttcggaaattttttgatacgcatttgatgaagctttcagttgttgaagctggggtt

SEQ ID NO: 319381 - DNA, 821 bp, Cannabis indica
ttatcaatactattagtaaccaaaagttacttttaaaaacaaagaaaaaaaattaaaaaaaatcaaaaaaatatcagaaacgttaaatttggctgacgtggcacatcaataatagtagtaacgttattattataaattagatgcgaaaattgtatattattgtaaacttctcataaattattggggaacttacaaaaatactagtttttgggcaaatatttataatattactgccacatggaaaaaaattacatttatactgccctagcccttttttttcttttatgttgtagacacagaatagcaagaacaatgtctccatcttcaatagcgacgcacataactaccagaacaacacaaaaatacccaaaaaaaccattaatcctgacgagattgagcaaaaaaagagaaatcgataacaaatgaacacccaatatcttcttcaaagcctgaaataaacgaaacaaagaggttagacacttaagtccacccaaaattcttttaaatactaaattaaaaatgatgcccaaacttagatttggaattcataaataaaaacgggcagtagcatctaaaaatgtattaatatacatgcaagattaaggaaaatataaattaatatacatcacctttgagaaaaaaaaaatcgatgattaattcacattgaaatattatacgttgttgtagagtcgttcttggttaataacctgcattatattataaattaaggatatggataataaatgggcccccaaatcataacaggaccacaaaaacaaaataacaaacgtcaattttttcaatgttgttttactgttgtt

SEQ ID NO: 319382 - DNA, 3345 bp, Cannabis indica
tttatgttgttttcgtattattttttagaaagccgtaaaatgtaaaaaaaaaaaaaaacaattctttgaacgtaaaaatataaatattttacaaaaaaatagtgtcttatgtaattattccaataaatatcactctaaagtgcgttattttataattaattaataattttttataatatttattaaattaaaataagtgggattcgatattaagttatatcaatagcaatattatacctcataatagtactacacactatgagtgtcttttaatattttttatttatttataagggaaatgtatttcttttaaacataatcactttattgatgaggaaaaagaattacctcttctattcaagaaagttcatcatttattttatgagcatgcttagttaatttatgagtcgtaatattaaaattgtgactaacatgccccaagaaaactacataataaagctttaacatcgaaaagcaaaatacttaattaattatagtacacggaaccattattcatagttgaaagcaacgacaaagagttactaccacaaaaagcactattcttgtcgatccccaaatcgattttttgcgaggattgtcactaatgttgatggtgaaaattcgtcaacgaacttaaagccgaaaaatcgaaactaaaacacaagacataggacgaagatgaaagtgtgaaaatttaagaacttaaaaaaatgtatagagcaacaatggtggaagaggaatacgtatttctgggaatcaagtgttacaataattttcctagcctctaatggtctaggagacaattgttgtcccaagggagaagatgacatctatgagctggaggttgcaggtggaggcctcgtgccttgtacctttgtttggtgtcgggtggtcccagattgcagagtaatggttgtgtgcacccttggtcgggatgtcagcacttgcaggtgtagtgtctccactacttgtaccttatcaccttcaaaacttgcagagggtctggttgtacatatcttccatgcacactttgtccttgtgatcgtactcttgttaccttcattttccttacacagaaaagtttcactaagtataattatgttgttgtggaagtagcatattggtggcatgcatgaagcgcataccgaatgactcggtgatgagcatgctgagtgactttcctcaacacttagtcaagtgaatttcctccatactagtgactttcctcaacacttggtcaagtggccttcctcatgccatggtcgagtgagtttcctcatgccatggccgagtgactctctgaggggtgtagccgagtgaccctcgggaggtatggccgagcgaccttcgggagatatggcccaaggcttcttcgttgagtgggtcttactcgccttgcaccctttcgtgttttgagcataactccctcaatattaatttgatttggatgattcaagttgttatagaaatctgagaaagagatctacaaagatgagatgtccttggtcgagtgacatttcattgtcttggtcgactgacttcttgtaaaccttgaccgagtgacttcttgaatggtcgtggtcgagtgaccttgagtcaagcatggttgagacaatctcccttggcttggtggagtgaccttgcacctatgcttggccatgccggccaacaccatgtgagtatgcaccatgcgagtggccttgctcattactccgacttggctatctcattgctaatatttaaggtttccctcttttatctttattgttatcctttgactaatctcaagaattagcattgttaattttcagggttaatagctaataaaaataagtgactatttaaaaccgttagcaataatagagtattcttgacggtttaaatagtcgtttactattcccgacgatttaaaataattcaaatctcatttcatacaatcttagatatctcctctctttgctctcccattcgaacgacacaaccacctcctccgccacctcgtcctctctcctccctcagctctctcactcgaacaatgagcaacccacaaccactgccacctcctctcttggtaagacccaaaggctaacccctcctatccttcgtctcctctctcggcaagacccatagataggaacaatttgctctctctttttctgattgttgttttcagattttgacaagatctcattttgttcgttctctgatctgatcaacatttttttgctttttctttcctcgtgtctatcactattgaatgtaatcgaaggctcgatttgtagccatatggttctgcaatggaagaaggtggagtcattgcagaagtcgtatgttattcttaatcttcttcttcttcatctttgatcgaaaagaacaaagatgtttctactaaagaagatgattcagaggagagtgatgatttagaggctcaaagtttgtataaaggaccactggaaataatgaatttgttagaggattcattatatttaaggtattattcctcaattctttcgatgggtatagctggcgattttccacggtcgcctatactataggtgatagtggaaaaccatcgagaatgctactttgtattgctgaaggttttgcacagttgagaaaaatttttcctgatgtttttccactgatgcctattttacccagttttgtcacagtcgaataggcatcggtacctcggctatttaaaatagtcaaaaaaatccaattttttggtagtaagtcagcgaaaaagcattgattaggagtccaacatcctaagtctatcttaagcctacaataatgcaatagcttttgcttaaaaagctaataaagagcttgtaagcaaacaaaaaagacacgtcttataaacatttaaaataaactcactaagaaaaaatgactcttaaaactattctaaccaaagtaaaaagctttcggttagactttcattttgactagggatactattttaattagtagatgatcaagaccttttaatggtttggataaagatgccattataaaattatttgtagagaaaatggctactccaacgccaaccatagtattattctcacatattgttgcatccacaaaacttattagaccctaaactacagaaattgcatctctctaaaaaaatttagactaaaaaattcttataaatatcgaaacagttaagagttacatcagtacacccattttaatggataaaagcaccctaaaagttttatagaataataattatattgtatttttaaaaacaaaaattaataaaattcaatatatttatatacggtcaaaataaaagtgaaaaaaaaaaaatagaatggtatttaacacggaaaa

SEQ ID NO: 319383 - DNA, 722 bp, Cannabis indica
tatataaatatttttttttaataagtttaaataaatattatctttgttaattttcacaatatattttcttactaattgaatactatataattatacattttatgtaatattcatcactaagtttaaagtatagttattaatgttttaatttttaaaaatacatttttcaatacttctcttctaacacacaaatgtcatctgaacccaacaaacccactcctaatttaaaaatataatattagttacattaattctaggatagttttgctataattaaatacaattttataatagcaaattttttaaatgcacatttcaatatgtttggacaaattaaatgtaagatcttaattcctaattaatttcttcttctttagtttgcataagaaagtaaatgttaaaggaaatgtaagcttttaagcacaatatttacaaagtttcaaatacactaatgtaattaagctttgatcacgttaaaaaatacagcaatttagtgtttgttggattttcagaacgtgatttttaaatctgaagtttaataaccatcagctcgtacactaattgggataataatttaggaatagtcatttttttactatatacaataggaagtaaaataattagtaaattagacaaaataaatatacataaactgacatgacataacaatcgacacaagagattcattgactttggtgccgtttggtaacactttcgttttt

SEQ ID NO: 319384 - DNA, 1976 bp, Cannabis indica
ttttttacctgactaaactactgcctgcctcttttcatgctgcaagatgggcatttgtattgcttgatgctctcggccttagcaggtgtaatcttcacacatttcccgtggaaccacttctcgcatatgtcgcagccgatccaaaactcgtctgcgttgtagtttccaccacaactaccgcagagggtttcgctgtgctcgtcttcatcctcctcgaaactttcatctgctagcttcggattgcttttcacttgaccatcattggatctctgttgcacacacacatattagaaacagattaccgaaaaatctccaaggaaattgctagtgaaattatcaaaattttaaacttgagaattttttgttttaacaataaatatgagagaaagaaatcaaaataaacagttctaaaccattgagagaaatgttttgttccaagaatgccgtgcttacctttgtgctgccacgagatttgcttccgctatcaatgctaggcttttctttgatgggcttcctttctgtgacaacttcaaagactgtaggtagatcgttgatcatactgaacagacgcttcctatagacaacagagagttcattgtaaagaaaatctacagaaactcaagcaagtatagcatgaaaattcaaattactgaatcctccattaaaacaaaacattcatgagctgtaacaagttaaaaaagcagcttagtctttgcacactgatagaaaaccaaatctaaacatagtaagatttagctgatgcattcagtatcatggaggaaatagcaattgaacccggtaatgaatccccaccatcctcaggatctacatattcatagtcgaaagaacaaagataacaaaatgttttacacataggaagcaaaaatacctcaggacatctgttgatgcatttgttgcagtatcacacaaatactgtttcaaccaaaagaaatgcagtaaagactttgagaaaccccaacaaccccctaccctcccttcttcccaaccacccgaaaagcaaaaccccgaaaagaacaataaagagaatggtttcagtaattcttctgctcattaatcagtaaatgagaatgataatagctttcctgattggtagacagggtattgaccttactaccagaactctagaacagacattaatcgatattttttctaggtacacagcctttaatttaaatgttgcaaatcataacaaggaaaaagtcatcacaaaattgaaaaacccttcaaaactgtgtcaaatatcaagtgaagaaaaagttacaaatatttatctcctgattatgatattgtggtagctaagccaaaacagcaaggaaacaacaaggctaaaacaccataactgcttagtccaacttgagctacaattctagatagaaagaaaaggataatacgatcaggagaaacataatgacaatgaaaacagaaatcagctcaagcttgggtataactagatcaggaggaacataattatgatgataacagagaacaactcaagctcaagtataacaagatcaggaggaacataatgaagatgacagcaaaaatcaactcaaagatgaagtatacagtctctaactggaatagttaacaagatccaaaacaaatattcccttcaaaatagaaattactccagatcagaacaggcaaagagtggaatcaaccaaatcacaatggcaattaaaagaatttgtcataacacttttatgttttgcttaaatattcagacactattgtactttcaacacatccacatatgttttactagttgagtttagttctggtaatgaactaataaaaatcctacctttattatttacttggaaatattttaaaattttatataaatcttatcaaaaatgataaaaatatatttaaatttttggcattaaactctattctacaacatttttaggaaaatatttttttcaataacttttttatttaaaaaaaataaa

SEQ ID NO: 319385 - DNA, 631 bp, Cannabis indica
aaaaaaaaaaaaatcctagtaatttgcttctgtgtgaaatttgtgtgagcatttagtaactcttgtgtgagtaagttgtggcttctattagtctttcactatatataattagaaaataaatcggattttgtatgcggtaatattttatttaattaaatcatacagttatatcatatttcattttttttatacttttaatgtatttttttattagaacgattaactctcttatgaaaaaaaatttaatttttttactcaattttataaattaatatcttcaaacattataaaaaaaatatattagagattaaaaaactctcacaaaatagaggcctaataaaataataaaaaagaagacaattgatgaatttataaaataactcatcatatatgattttaaaatcgttatcatcactgtaactcacttgtattcgtcactacatttaaagccactatcttatgtcacttgtagtttcaagtaggggtgggcatcatccaatccaatccaattgaaccgaaccgatccaatccaatccaattacaaaaagttggatatccaattataattggattggattggatgctaaaagttagattctaattggattggatcggttattggatgtcaatc

SEQ ID NO: 319386 - DNA, 2034 bp, Cannabis indica
gctttggtaaagagtgctgaaaatatttaatggcaatggactcaacctctttctcattagttcgccattagtgagtatcatcaaacagccccataatagtgtttttcttttgtctatgagaagcttcattgtttgcccaagcttgttcaaaatgaaatctagtaccccacctttatttgaaagtttccaccttcttccccggacttgcttgaagcaaaataggcctatgatccgaatttcaccaattcaagagagatactttattctttcgaaatctgtctttcccattggggttgcaaaatattctatcaagtttctcaaaaatcagatttgcggccctcccattgcaccaagtaaaaccatcgtcctccggcttgatttctctcaaccaataatccgagagtgcatttcgaaaattcctcatgagataatctggtttggggccccctccctttttgtcttttctattaacaatctcattaaagtctccgccacacacccacgcaccattgaacatcagtttaagtcgtttcaaaagcttccaactttccaatcttcctcccgggtcggggctgccataaaagcctgtaaatcgctaagtaaaacccaagtcattttcaacaagagcatcaatatgggaccccgtgaaggatttaatctgaaccatgtagtcatccgaccaaagaagcgccaaacctccacttttacccttagtatcaaccgagaaacaaccaacataacccaattggattctaatatactccatccgaacactattcagccacgtttccgacaagaaaatcatcccgggatgataatctttgacatgggatttgagggagtttaaagtccaagggttcccaagcccttggacattccagaataaggctatcattgctctcggcgactcagttttactgagttcaccgcttttaaattcgttccaaaggtcaaatcagagatcctcgaaatgccccctttgtatcacaaccccgaccttctatgttcacatcctccaccatcgcctccttagtaccattaccccctttgtttttggaccttttaggaatcacctttctcctcttagatggcccctccatctttttcaacgaagcaaagctattattataacttatgggaatatccattagattcgacattgcagcaaggttgttgttcatcagattctgttgaaagttagaagcataattactttggtgttgtttcaaattcccacccgaatcaatgaagctctcttacctccaagaaccatctcttttgaacttccctgtccagtattcatcattcccaaatccaatccgataccagtgttctttatgtgattaggggcttccaattcaataaagatcaaatctggattatggtctttctcaatgtccttacccttccccaatatttcaggatcagtattgagggagagagaagaactaaccaggggtaccttagccggattcgaattgaaattgagtgaagattcaccactagcacccgaaccatgacctgtaggcagcatcatcgaagaggtagaccgttttttaggaaatctaggagggaccttagcctgtgctgtattaccacacgtgtcttgaatgaatgaagtagggaaatcttgtcgttcattaacttttagccaagaaccgtatcccggctgttgcttccccgatccatcttcaaagagtttaattggttctgcacaaacccgagtatcatgtcccacaaaaacacatttaaaacacattaagggtaatcgatcgtaccagtatggaaccagatctttcgaccctcacatggaaatagaaagcccggacatagaggagttgcaatgtcttgccaaactttgaaggtaaaataacctttggacgcaatcttggggatatctacagtttgaacattgataatgtgtcccgcaaaacccgccaatcgttccatatttccctgagtaatcgatcggatgggaaggttcagaatacgtccactgagtggaaatttggtgagcactttgtcccaatcttg

SEQ ID NO: 319387 - DNA, 817 bp, Cannabis indica
aataaaccctagcagagaactctttcttcttcgtggttcttctctgaagaacacgaagacagccctccaaaaccaataaaacccaaatcaacaatacccttcccagattgattcaaaccctagaaaatacaaacacacatacacaatatagaaatgcagtaaagaaaacaaaggaaagagtgcaccgaatttatagaggttccccaaaaattgttgctgggtacatcctcttcgagctcgcctcagattgctcgtttccactatagatcttcaaagatcaaagagttacaatgatagattccaaattacaggtacgattggtaatctatatgtgtttacagttattagtttctctcctttttctctctgcctagtattaatctcttcttcttcttccatctgcatgtacaatcttcctggagttgatgttggacctccgagccctaaccttagggctccaaaacttacccaatgtaagtctcttccaactttcaaggctgatctgattttttcatgtgtgtactgctctgattttctgagttttgatctggtcttcattcttctcttatgaattttttggtctttttattgtgttgtagtggaatacagagaacaaaagagttagttacaaagtttaacaaactttgtaactaacttgctgatctgtcctaagatttagaggtcgaagcttagtcctttaactgtacgtaatctttgtgtatatgttgatcttagcagtgtacagggcatgtgggaatttattttaacatatatttttttttttgaataaataagaataaaatatacatttgatcta

SEQ ID NO: 319388 - DNA, 645 bp, Cannabis indica
ttttttatatacatatatatttaatagtgttaactttgtaaacttcaattatattatgttattccaaataagccatactgaggctatgggggttttgaaagtcatggcagggattgactatagaaacaaatagtctaacagttgtgcgatcactccgaagtctgctcatcatgttatcttattttggaagtgttatttttgaatgtaagatattgttatgtgagctacaaagtgtttttgttatttttatcagggggtctgcaaatagtgttgtctactttctggctagagcatcctattctgttgcatgtcgtttgttacgaagagatgatatttcttgtgagtttcttaatgtaatctcgaataattgccgttaataaaatttaggagaatttttaattatatacataatattgtaattattaatgttgaccgagattttcggcaactaataaaatattataaaattactgagctgtaagaaagtgagagaagaatttttacgtggttggggcgttaatgagccttagtccacgagtctttgttatttatggatgtctttaatacagacaatatatttgggagagtttcacccttataaatacaaagaatgttcttggtgagtatttactctacttgctcata

SEQ ID NO: 319389 - DNA, 1557 bp, Cannabis indica
gtttgtgattgtgtacacttgcgcaattataaagcaatataattataattattcccttgagatattctccacgtttcatatttacatcacatggaataattataaataactgtcgtaaccactctttgtctttatttatagatggttatgctgactatgctttatacttcttgcaattcaatagtacttttttatatacttcatcgtgagtcagcgtctaagtatatgttgtagtattcctcgcattcttttattaatattgagtgaggtatacatgagacgcttattacagtgtgacagaagcgagatgaatcatgttgaggttgttgtctttaattaatctttcaacatactcatctgactcatctgtatatgagtcgataagctacaaactcactaatatcctcacatgtatgtgggtcaataagctgcaaactcattatttaccttttcctaataattttgtaatgtattatgtttatctcgagatggactttctttattcgtctcactggtctcatcaatcggtagttattactcgtgtcttgccattgtctacatgatagtgagttcaagtatttctatcagctgtatttcctgaggcaagtcatctgaatacatttattaatgcataatttgagcttattcatattctaactatattacacatgtcaacaccatattactgctcaaaatatgggtataataattgcctcttaaattgttagatttgaattcctttgatttttcaaagattttgaaaattctttcattaaatattacatgaatgatgatatgattatcataccatcattcttcaacctttctttaagttgcattaactttatacacaagcttgtaaatgatctcatcatcaaatacattaatcttgataaattcacttaggtaagtttcaatgatctcattatcaaattgcataaatatattttattcatctcaggattcttcttaagattgcaatagtttcatcactaattgcatataaacttatcgtccaccttagggttctcattaattttattaaattcaatcatggttaccaagatctcaacatcaaataaggtaacacacatgaatttttttaaaaaatattgtttaacgagattttcaaaatcaatttaaataagagcttaagaaattaaataagtaaatataaaatggagataaagatttttacgtggttcgggtattaattaattttagtccatgagtcaatgtattatgtcgaatgactttgatgtattacaataagatcttacaggtttaagaacccatagcttcttgcctatatttttttttttcgattttctcacttaggtttttctaacttttcaaaaaagaaaatctaaaagaagttatctctctctctctcacttgatatatattttttgagtattaatttagtattgttataatttttttgtagtatataattttattactacgatatattaatttcaatgatacaatatatcaaatattgttgtatatatttaatgatctaatatatttatttgtttttgttacaatatatta

SEQ ID NO: 319390 - DNA, 1429 bp, Cannabis indica
tcatattagaaatcatacaagtatacaacccaattaatatttatagacatggattcatatttacaaaaatttctttatcttctttattaatgattactcacgttaaatgtagccctacaaaagtgatgttatatgtattttaagacacatgaagagaaataatgtattttgcatattaagatagtgagatcaaatattgatagagaatactacattaaattttgtgaggatggataaactcccaatccatttacaaagtttcttaaaaattatgggattgttgcccaatacattatgactagtacactaaaataatggtgtgtgatagtactaagaaactaagtattattagacctagggtggagtctgcatagtaaatttcaaacttttctaaatctttgtcgattgacactcttcaacagtagtgtacatatcgaatcgtgttctaactaaatttgtttctcaaacatattttgagttgtgttaaggttggaaactaactttatgacatgcacacaattagaaatacccgtatacagttagagtataattgttaaaaaaaaatagaattggggctaagtaccataaatgagcatttcatcataaatgctataaggtctaaaagttgtatattttattattaatcccacaatactagaattataaaattaagaattgacttgaacagtgggaatgattgattcaagaacatatttttgagaaagatcattcttatttttaaacttccacctcaagtatgaaattgattgagattcataaccattaagtttaatagttacttgagaattcacatttaatcattgaaaattcacaagtcaatgataacattctaatagatcaagttatttagtagttgtttacgaattgctaagcaacatacatgttgaaccattttctcattaagagagtttgttggttcacttaagatgacttattagaacgaatcaatagtttctagtgattgcaatatgtacaataaaagtgcaactacaatattattttgagatacaaattaaatgtggaatgaaaagaattgaaattgtaatacaatatgtcatgaatgaagaaacgaataccataaaggacagtgaagtctatctttcgtaaagtttcctaatgaggtggagaacattaagtaaaggttttttaccaataaatactcattaggcaacatgtaaaaatatgaaggtataaaactcattgctaagaagtttattttgaggaaagaatcaataacaaatgagatttacattctcacttatctttgttgctcatttcaattcattaattaattccaatcaatgaactagagaagaaatgtatactgacaattataaagatttttctctaatattggtgaacatatgtaaacttaagaagtctatgtatagattaaaacaaacatctc

SEQ ID NO: 319391 - DNA, 1437 bp, Cannabis indica
aaaaggaaacctacattgaaggcttcttgccatgtcctccaaatcaagtcttgtaaaaccttcaattttacaatgatcaaaatactcccaagaccctccctcatatcttctatttccaaatggggaaaaccatgtactcccatgtataagcttaactgtgaattcaccctcttcattcactagcagaataacaacaagctacagtgaaattgaaatataaagcctaaactaaaaatgaaagttaagttgacaaagttaggcaaaaccccccaaacaatatatcactaacatgtttctatcatgtttttttaattataataagctactaaaacatgtaaaggcttattgaattgtgaattgagcttatctctgatgatgattgtacatatcttaacggtcttcgattgataacctggcgactttgataccaaaattgtaacaccctactagtttaggcatgttatagtgctttcttcaattactgtgtaacctttgctaatcaatgtttaatgaaaacgtaatttaatttaaactttaataaataaacataaactatattacatttataaaatttgggatcccgtgtaaatatttttcatctgtacataatcaaaagatggcgcacaatgacaacaaaaattgtgagccctagctgcgtcaatgatccaacactccaggtcaaactcttgatatgtacaatcttcatccagctctaaactcactttttttcaacaacaactttgcttttacctgcacataacatatcatatgtgagttgaccgactcaataagaaaatcataaaatataatatataatcgacctgcaactaagtgcccatacacctataaataagtcataaaccatgtcaaacatgtaaaactgagcctcaaacattcctgagcatagtatgattgactataataccacatgcactcagttttttagtcgtactagtgttggtagtattaatctatactataagtacaactagccataataccacatgcacttagtactctagcgtactagtgtttgtagcactaattcatacttttagaagtataaccaatcataataccacatgcacttagtactctagcgtactagtattggtagcattagttcatacttcctaaattaccaaacacatatattcacaatatcaagatgtaatcatacatacaccaactatcgttccaactgatatgtcaaacatctgacaaccataaacatgtacatatgtatgtgtgttatactaatcttacctaaattttaaatttaggtatgccagtcaatgtgagtagaaatagctgctagtaattggaggccttgtcacaattccaaaaaaaaaactataaatgttgccctaacacttagggggacttcaattcaaaactataaatttttctatcgatagatatcatggaaatacccta

SEQ ID NO: 319392 - DNA, 729 bp, Cannabis indica
caaggggttttagataaggtctccgagctgctaaatgatacccccaacagttacatgctcaatcaatttgaaaatcctgccaatccgaaggtattatgcaaaaacaatgggccttgatgttgccttcatgatcaggctttttgaattctgttatctttgtttatgcagatacattatgagaccactggccccgagatatggagagattctgacgggaaagttgatgcctttgtagcagggatagggactgggggtacaataacaggtgtagggaagtttctgaaggaacagaacccaaacatcaaggtgtcatactttatgcatacttgtgcctagtttagatttattttttatttgtttggggagggagagagtaagtgttatcagttttattaagcttccatgtatttatttataggtttatggggtagagccagttgaaagtgcaatcttgaacggtggatcaccaggtgagtaataactcataatacactcaatttccttgttcatcattgttgtttaccttctcttatatttatggaatatgggtgcttgttaactgttaaggataaaaagtatagcatgagccatgaggaatggcctagtgtgcttgaatgtcaatgtccaattactagtatagataataaattagaatcttgagcctgccatttatgaataaagagagagagagagggggagagggtgagggagagggagagagagagagag

SEQ ID NO: 319393 - DNA, 709 bp, Cannabis indica
aaattcaaatgtaaatatacatatagaaacgtcattattaattaattaattatatatcttcatatatcattttcagatttttattaactacacctgtcttgtcccatgtggggttattaatcgaaaaagattgcccggcctactactctctctactaaaattttattagtcaaaaataggtaaaagaaaaaacttaaaagagttaattaaccttgaagtagtgtagtagcattaatatatacctaatccttttgttatttattttatttatttatgattagtttagttggcacctacgcttaatctcaaacgttaattattatgtgaaggtattatattaattaatctttatattcttgtttatatatagatgatatgatatacttgaatgctatatattcattgatcttaattagggtttcatttgcatgttaacatatatttgacgactggtaaataatcaataacttgtaacgacgtcctcacttcacgtgtagtcttatagtacttacacattatatacttatacattacttttagtgacgaaaccagaaatttagttgagtgagggcttgaataaatattaagtcaaaactaataaaaataactgataaatgtatctttcaaattttcatcttcaacaaaataaaataaaatattgttaataatatcattttatttttttaataaagtattatttttttttatt

SEQ ID NO: 319394 - DNA, 498 bp, Cannabis indica
taaaattattttcactttttaatcttttaattaagaatcaaacttttaaaaacaaaaataaaatcactttcaatattttttttaaaccgtttttttttagtttagaagaatatctttataggctacaattagaggggaaaatgtattgggacgccattgtattttcccatcagaatataaataaaaggtaaaaccacttaaaaagggaatgaaaaaaaaaaaaaacagaaaagagaaaaatgaagctctaagaaactctttgtaagaacttgattacaatcatcaatacaagtgactcgtagattaaaattcgttagtaccccaactacgttaaaatatctctttaaagtttaaacattattctatggttcataagtagttgctaaaattctcgatcaataaactattcgaaattttttaaaagtttataggtaatcttaaaaaatgacaacatatacgatcataaaaaaaaaaaaaaaaaaaaagaaagtaaaaata

SEQ ID NO: 319395 - DNA, 1029 bp, Cannabis indica
tcactaaaatcatactaaaggggtatttttgggacattctaaattcccggccactcccgacattcccaatgtctaaaaacccgtccccaaaatactaacatactaagttgtgatttctactgagccaaacgccgcgttccaaaataccggacaccggaaatgcgaaatataaaaaactgctgatgacataattatgcatatctgaattccataaataacaatgataaattatttaaatagctataaataatttcctgattaacataaataactgctaatttccaaattaactaagcgggctttacagttgttgagtcggattgtttaagggtcattaatgatttgcaaaagttcaaacatacggcttctccttatggccatattctttatgattgtatgactttggttactgattttgatgttgtttcttttaattttgctaagcggcctgctaataaggttgcgcatatcttggcgcgatcttctctttttgaggctgaccgtaattttagtagggactccttatcttttgtttttgcattcttgatttttgataatttaatttaatgaaatttaatcattattcaaaaaaaaaaaaagaaaaaagaaatgtttacaagataaataggcattataaaaaggtatataaatgtagagcaaaactgtaataacatagagaatttgatagtgtatttttgtctcattttctttatattttggaaagaatatttcttttacacgatcgagtgtgatgattgtgctcttgtggatcgaaattctaagaacagttctttggttaggaccactttatatcgaacacagatgattggattcaaatgtgcttaatcattcggaggaatcagattccttacgatttcattttttgttccagatatacttgcatatatatatatatagatattgaattggatcaaaaaggtataccaaatatatatattcctatggagttaaatttaatacttacattaaatatataaccggttactatttttttagtaattaattatc

SEQ ID NO: 319396 - DNA, 1000 bp, Cannabis indica
gttattgtcttggaccattttacccatatgttgttaggttacatcatgattaagtaagggaaaaatgatcattttgccccaagtttagtaaagatttgtttttagtggattgtgtagagaaatcattttttttttggctgagtaattaatagattatcactagtctatttaaataatatatcataaaagataaaacaaaatcaaacctcctctcctcttctcctagcttcggcataagcaaaccccaagcaaccaggaatttttttcttcatttttagaccttaatccaagggttttgtagtaggaaattcaaggtcttagttagccaagccaagatatgctccttttccctttctcttctttgaattttcaagtgaaaagttaggtttaagtatcaaaattttatattctatttctgttgaagtttaagttgatgagggactttttttgtagtagttttgagtttgtttgagttgttactggttgattgttgtggatatagttgggtttgagttttaaagctcaaacttagcctaacaatcatagaattcatctaagagttgtatagttgaaattttttgatgcactatatttgttttagctttatttgaagttctgggcagtttgggatggtttggaatcagttggaggagttttttgggtcaattcttttttgaaaatggcatgacgtttctggaaaacagtctaccattttttaggcagaaacctatcgaaagggcctgccagttttagggacactttcccaaagtctcatttttcgtgttttcttgatatttagggtattacaacgctatttatctatagggaaacttttagttttaagtttatatcactgaaagtgatttagcaagtcacttaccagttttacataaatgtgacttagggccttaaatcgtcgagcaccaaattctactcagggttaccggtactattgcattcaaaatcaaggtaagattagtataaatgttggaaattattt

SEQ ID NO: 319397 - DNA, 1023 bp, Cannabis indica
tatgccagttagggtgttacaatgtgcttttcttactgagtctattcactcatagattctactttcgtgtgtaggtaaaggaaaggcaaagggtaaagatgagtgagttctgagctcgaatgatgattgtacatgtcgagacgatgcgacttggagtgttcgatctcgggacaccttgaattgtattttgtagtcactgtgcgataagtttgtaaaaatattttgataatgattgtaaaagtttaattacatgatcttggtttttgtatatatatatttgtaaagtataatagtttaaatcaaaattttaatttggtaagattttcgaagaaaatcctttaattagcaaatgtggcacgttaattagaaaatcactgtagcagccttatgtatcaagtgttacagctaaactataccactttgacatttttttaatccatcaagtttccattgttactaatcataaacatattaaatacacatcatatacatatgacacacacataactctaaaaaatctctgtaattaagtactactataatatttgcctttttttaataatagactttcatttttaattacacaattattcttataaattacaataatttaattaattactaatttttcatgtataattatacggtcattacagttatgtaagtaaacaatctggtggaccatgccgcacaaaagatacaattggcttcagatccatgaaatcagtcctaattctctgaagatgaggtctttattggtgctctaaaatacgagattttggtaaattattgcatttattttatatcctctaattaatgtagattatttcatttaatctacatatatgagcccgttacatttcattcatttagaacataaactctggtgaattattattgtaattgaaaagagctcttgagaaactcaatcaacaaagtttcttttgatctcaagtgttcttttattgagaaaaaggagtaagctattactaaatactagggttaaactgttgggttttatgc

SEQ ID NO: 319398 - DNA, 1551 bp, Cannabis indica
ttgattaatggatacaaaaagataaaggaagtatttttcaatttatcccaaagtcaattgggtttggtccttgggccgaaaattagagtgttttgagaaaacaattacaacttttatctagataaaattttgaatatggtatttctaagtaaagaaacttgggcgtatttctaaaaactaatattataaatagtagtaaaattttaaaatataataattttgaaaactaaattaatttatttttttcttaaaaaaattagatcaatcaaggttgggtctgccttcacatttaaaattaaaactagtaaactaccaagaaagttacccatgctcgaacccgcaacacactaccagttactagttactagttaccagttaccagttactagttaccacaaggccacttgttcagtggtaattttcttgaactttagttagacaataaacaagtctctcattatgggttgaatcttaaaaatcaaatacacactgcactacaagaaaaataggcttttataatgtccacttcttgttcttttcctataaaagtgaaacaatcccataaatttcaaaacataaataaaaacaataacaccaatttaatgcaatatagattgaaaacaaaatacccattaacacagattgaaagtaattaataagaatatacaaaaataacaaaaaaaaaaaattataaaaatacagttatacaaaattttaatatttttatagattttaagattttatttataaaaaatacatcttttgataatttaatattattttgttattggttttttatttttagtatattacagttaggatgttatttttttattatttttgtgtatatttttactatttttgtattatcttatataacaccgcaaaaatatatatataaaaaaaaaattaaatgtaaaagtgtaaatgttttactaaaaataatcctttgtataaaatttcctaattaatatccaggtagaatctaaataaatgtccaacaattaaattacttacacttcaagatatgattattgttcatttatgtgcataggttaataaatgattaatgataataaggccattttaattttaactttaattataataattaattgactaagtcctctacacaaagtgttgaaatgtcattatcatttatccaacctatgtgtgtggttttattattattattattttaattatcacaaaagtcaaaaaatatttccacctaaattactaactaaaaacgccagaaaatatgtgccaactgttcatcaatttcaaaattaatatattagtcttttttataataaactttacataatttacatagagtttcattttcaatcttataattggaactaaatgaaatagaatatagtttctttttatggccatattctttataattgtatgattttggttgctgattttaatgttatttcttttatttttgttaaacggtctgctaataaaattgcacatacttattgcatctttaattttggatgatttagtttaatgaaatttaatcattattcaaaaaaa

SEQ ID NO: 319399 - DNA, 1256 bp, Cannabis indica
cgtgttggtgtagggtcagtcatcaatccaagaagcagccagagtggcgtactcgtgtataagagctattattccgtgggtgtaagggcccaatgaaggcttgaagcggagacgttatagttgatattatatattagtcatgataagaacaaaaaactctgaagaaggtagtcaaacatatataataataatatatatatagtattaattggacaattggtagctgtagtaatatatatattctctcttctttatatatatatacaaaccctaaatcatatacaataatatacatctcctcatctcaaaaacctcttcatacaaaaaaccctaactattcccaaaaacatgaagaagcaatacttacatatacacatatacatttcataattattagtattatcatcattagttatttcttcaacaacaacaacaactcttacaactactcaagaagaagatgttcaaaatcatggtgttggagaaaattggggtggtatatattgtattatacaaaacaacagtgaaaatattcaacgatttagatgataattttgacttaacaattcattgtaagttaaaagatgatgacttgggaattcatgtgattccattgggatgttttctcatggaaatttagagtcaatttttcagggacaacatttttttttttgtaatttaagttggcaaaatggttctggtacttatgatatttttaaatatagtagagattttctaaaacaatgttatacaaaatgttattggagagttggaaaagatgggattcatgggtatttgccccacgttataatttcccttggctcaataatgttacagctacttaattataattaattaattaataaaaaaataaattttattattattattatttaaaatatttatttggttcatgatttatatatagaatatatatgatttttgtctcttcaactacaatttttttagagtttgatccttgaatttttttctattgtgaaaattcctctgaattatgtaaattgttgcaaatattattttccaacttacaataatttgtttatttttcaaaacaatttacttatgtgactatgggagtaaagttacaagtgaaattagacttattattacataaaaaattatttactagctagcactaaatatacaaagggaaatttgattttctatacttagaaaatcttaaaattttttccctaaatacatacttaataatattggtaatatatgactacatt

SEQ ID NO: 319400 - DNA, 918 bp, Cannabis indica
gataaaagggtataactaagaccttttaagcctttttatcaatattttcttctcttttttttcaagtgctattagaatatataaagaaatcgtttaggttttagggttatatattttctctcaaaccatctctctctcccgccaacatccctttctcttccatcttcgtgcagcagcccattcacactagtgatcaacccattttcgacaacgaacaatcaatggagtccagatctaaaatgctcatctctctctgtggtctctttttctttttcttttctgaaatgctcatctctctccttctctcttttctcaggggaacgcaggttcgcaatggaagaaacttctaggttcatggtggacagagcttcacagtttttcgtagtttgtagtcaatgtcgtgaatggacgaagcttctgttgggttcgtggtgcatcctggagtgagcttcgacttggttcatggagcctctgctattttaggatatttttgagttgttgtataacatttttttggtcgaccagatcttttatctaatgttatatcttcaataaaccagctgctattagatgtctaaattcttataaccttttgtgtaatttaatttcaaaaatctgaaaagttttaatttgataaaacaatttatgatataatcttaaatataaatttttttcttcaatatttttgggtttgattctgattcttataatagactggagattaagaacacattttatctcattttaccccaagtttcttttaacaactgagataaaaaacacattgacaataaaaagtaaaaaataaatgaaaagggaccacttttttatctcggcttttatataataattgggataatacgtacccttttattttggtttttttttaaaaaaaaaaagggataaaaggtacctttt

SEQ ID NO: 319401 - DNA, 599 bp, Cannabis indica
gaaagaaaatgactcctaaaatgggcaaagaacgtgagtcatttttattgttcgtgtgctgagaaaatggatgacgtcgtgtgtgtacgtggataatctgttatgagggtgaatttgactctgccaaggaattaatcatcttggattgcacggaaattggagtcccacgattgatgcttcaacaatgagttattcacttaaatttggattgggccgattgaagcttgcatgggaagtgatacttttcttggtgggccttgacaaaagaatcacattaattgtgtacaataagttcacgccagccacatatatttctatatggattggagaatagaaatgtttggtctttgttgtagttggagttgatgtaatatgaaaatggtcttcaaatttacatcacttggaacttaacattgtgggctttgcattttaattttccttttatcactttatccaaatctgaaaaataacacaacaattaaaacaaattaaatatctgcaactaaaataaatttatcattaaaactataaaatattcaatttgtattaatcatatgtgcataattaaagacatgaaatgtataaatttgagccttaat

SEQ ID NO: 319402 - DNA, 1586 bp, Cannabis indica
tatcaaatatttctggccaaaataattcaacaaagagaagttttataaaaatgagaaaactgtacaggagtagcagagtacatccacttgaaacaaaattcttaaagtacaaaaagtaaattaatgagaacaaaatctcaattaattgaagaaatataaaaaaaaaatggcaaaagctaatttcagggcaaaaatccaacgaagggaacatgggcagtactctgtaaagccgaatttcttgaggaggaagaagacggagacgagttttgatgaatcacaatctccaccgcctcagccaccacgatcacgaaatctattgccattttcaccatctctatacacatttccagtctttgaatcaccatttcttctttatactttgtttttcttttctttcttctccttcctcttcttctctccccctttatatatatttatttagtgcgctttatgagataatatattattttttatttatttcccttcttcccttttccgacgactgtgctccgcgtcgcaagggcttatccagaacttgaactttttctttttcctttatataaaattaataacggactacgttagtacatatatagatataaaatgaataaattgtccataatacgatctattcacaataattttgaaaacgacccttgcttattgtatttcctaaaataattatatgatatatattaaaagataaagatggcagttttgaagagttgtagatgttctttggaaaaatggcccttggaaggctccaaaggccaaatctcttgtgtctaattttatgggcaataagtgatctttatgtgtatacatatataccactttggttgtttgttaaagcatatattgcaatttgtgtggtttaatttgttaatcttatttttgttggtgtttaatttgttaaacttaaatatgtattgcaatttgtgtgatttattctagttaatttggttggtgtttgatttgttaaagttaaatattgcaaattgttatatatattttacttaatttgatagttgttcatttactgacgtcatgaccaaaccataaataaattaaatggtttgttttttctttaatacataaataaattaaatggttaaatcactaattttacaaaattggttgcacctctctgtttgaggtatctttattgttccgataaactaatgggaatcttaattgtttgcttgagagaaaagatttagtcaatctttttttttacgttcataattaaagaaatatataatgaaataaaagaattaagataatgtttttttgtgaagccacgtgtgcttagctttttgaaaagagttcccgaacgtagaaacttcattgcaaatctgtgatgattcctacatgcttgtaatttgttcttaattatgcatgactcattacgcatgtgatcataaatatatttaaaaaaaacattgaaggtgcctagcacttctagctctatgatacgatgtttttgttttataattaattgggagttttgaataatttttattaaattaaaataaaatacttttttttaaagaaaataatcaaaaactttattaaacttcaatctc

SEQ ID NO: 319403 - DNA, 799 bp, Cannabis indica
ttgatagtattgcactatcaaattgaagtaattgttatggatcaaattgaagtaattgctatggatcaatcaggtacgcatacctaattattatgtattattattgtgttctatattatatacaaatagatcttgggtttattattaatttttctgacaccattaatagcttagaaggtttaataaaacttctatgacttagttgttgactttttataaatataattttttaattttgaaagtaatttagtaaattagatttatacgtatcttttggtctcattacgatgataaagtaatatattggataaaatagtattgtgaatttaatagtttgaaaatgacccattaatttctctatgatcatgtacttcaataaaatatattcattacattttttttatgtttcaacatgtgatacaaaccacttcataagtttgtttttaatattactttatatgaattttttggtctcactttaatgttccataagctgaagcttttatttgctttttcaggttttgtgaaagaagtatggtacaatttcatgaaggaattggctaagaggcaagaaaaaaccaaataatgataagaaaattgtatatgataaatattaataattatgtggatgttcaaatcttttatttattaccattaattgtaatcaacattcctctttttcttagtttccctttttcttagtttcttaatatttcactcttgtatttgtataaataggggttcacctcattggaataaacaactgagaaattctcattcactttctctttctctcttc

SEQ ID NO: 319404 - DNA, 1376 bp, Cannabis indica
aaagaaaaatagtggacttttgaaagaatcctttttgttactcaacgtatatttttcattacagatctacttggaccaagcctcacgtgccttaaatcaaggtcactattattagaagattgaacaaacaaacattaaacagtatgctcatttgatttaagctgactacttcatttagactctgagttaagacttcttggaattcaaaatagcagaaaaacaaagactcgatttgcttggttaacttgaagtgaaacatgatgtaggaagctgaagttgataaagaccattactagttgttccatgagctagcctccttcctcgtagccagatccttaacaatgcaacaatctaaataaaactcaatgaacacagacttatccttggttagctgagatatggaaattagatagtttggtcatatgtggaacacaaaaaaaatgtttaaaaaagaagagatgaggttttaagaatattcaaaatattattgccaatttcaatgatggttaagggttacccattaccgatgagcagttaagttgtacctttgtactccattttattttcaggttgtgagtaattggtgtaatatggtttgtagctccactgcgtatgtaccaagagttgtcatgactagcattagttgaggaagaggagtaaaaggcttgttgaccttttccagaagattattgttgagttgggttaatattgggttttattggttgaaaccacaaacagcagcataaaaattgatattaaaatgatgatagcatttagcaaccacatgtcccacatgattacaaagctgacaaaaaggacgatttcctcttccaccacatcacacacgaccatgaccacaaccacaaggtgaaaaaccgcgattctcagtaccatttgagcttggtggaccactgatagtagtagaccatcgaaattgagcagcaagattggcgctaggagaaaccatatcaccatttctttgagtgttgaggtgttaaaatttaatttcttggctatgtaagaggaactgagcttcttgaggagttatggggtctagccatgaggtgagggtgatgaccacaaggtcatagtcatgatccaaacctcctcgaatgtacaaaatcaactcctcatcagaattaagttgtcctgcaacaaaaaggttgtaacaccctaactattttaggcatgttagcgtgatctttaaacttactttgcaactcgttgctaatcaacgaggttatcgaaaatcgtgataattcaaattttggttatttaattaaaaacataaagttacatacatataaaattctgggatccatttacaaaaaacatttacgaagttaactatacatgtacaaaagtctgtcgcctag

SEQ ID NO: 319405 - DNA, 621 bp, Cannabis indica
ataaccacttgtattaacatataagcttttaagttttgattacactatcatacataagagctctctacataatggagcttttgaatgtttcgcactaagagctgtctctccatttttcggttccattttctttttatttatatttaagagtttggattacattatggttgtaggcttaaagctaaggtttgctaaagaatattacatacatatggctcgtttggttatgctgtataaaagttgtattatattaaataataaataatattatgtttgaataaaataattattgtattaattattacggctaaattttttaatacaatgtaagttgtattaattaatacataacaaatgatatgtattagcttgtattaaaatatttacaaaacatctcaggtcaactccaatctccatcctagatctagggacctagacccagactggacacggattagacccaaatcggacccgaacacagaccataactggaccggggacccgacctgaccctgacccgagattcgacccggacctagacctggactcgtacttagactcagaacctggatccagacccgacacgtagtcagtgttggggttgagtttattgaaaatata

SEQ ID NO: 319406 - DNA, 1928 bp, Cannabis indica
atttaggacataaaacccaacagttatctgtctcaacctgtacattctgccattttttatttttcaccgaactgaaagcttccttgataccaatggcttcaatagtttcagcagaaaaatcacctctttggtaacaagtttttgccttaactgtcacgagccacaattccaaagccgtatgaattttcttgtgtaaaaagggcggcatcaatattgaccttgatgttgtttgattcaggtttagtccaaagctcagcaccatcacccttgttctcaaagaacaaggaagataaacatgtattgtcttgagcttttcgccagtgatcaagggttgtacaagctaacgccagaatctcagtatgggaagacacttttttgttccaaacagtagcatttcttgctttccacaaagcccagcataacattgcagcacgacatacttgatcctcatcaagttttaggaagacttcttggagccaattgccgaatgaggatggtaaagccatgttcaaagtaatccccaatgttcaccaacaatgcgaagcaagatggaaatttaataaagcatgaacagttgtttcagtatgggagttacataccgggcaagaatatgagattctcacatgttttgacgtaagttggaggcaagttgggagacactcagaagtagcccaccacagaaagttcttaacctttgtggagagctttagatgccacagtttgcgctagaatccagagttatcagctccctggctcttcggcttaccattttgcaaaagagtgtaagcacttttcacagagaagatacctgaacgttctccagaccaagaccagaaatcagcgtcggcaataggtgacagtggaatgccaagattcagggtagcatcacggtgattgaataaatcattaatgattttagtatcccatcttctttcttcggttacaaagagggagtcaacagtttgttcatataaggccagatgggatgatgaaacaaacctgttcgacgaatgtggaagccatgggtgggaaagaatatttgtggttagtccattctcaatggtttgaaaagcaccagctcggaccacactttgggcgccccagatgctatgccacacgaagctgggattattgccaagtttggccgagagataatcagtattggggaagtattttgccttgaatacacgtcgtaccaaggacttagggtgacataataatcttcagacgtgtttagcaagcatagtaaggttgaactcttgaaggcatcgaaaacccataccaccctcatcttttgaaacagtcattctttcccaagacatccaagtactacaacgacctttactagatgaagtcttccaccaaaatcttgccataagcttctcaatgtcctcacaaatgcctcgtggaattagaaaaacactcatggcatacgtaggtagagacaggatgacaattttgagaagaaatttccttactggcacgagagagaaacttgccatcctaactgttaaggcgagcaataactttatttttgaggaagccaaagatagttgatttgttgcggccaatgatattgtgtaagcctaagtagaggctaccatcagaagcttcggccattccaagaatagcgctaatttgagactgggtttgagcattgagttggggctgaaaaatatagaagattggcaatgttgaccttttgaccagatgcaagttcaaactcatgaagaagattaatagcaccttgggctgcaccactcgaagcttgacaaaagatgtaatgaccgttctagtaattttttattagtaaaggcaattagcactaatttttattattttattattatttgtgaattaatttaattgtggactccaatatttagaaataaatattagagttataatttctcaattccggagatttt

SEQ ID NO: 319407 - DNA, 767 bp, Cannabis indica
tcatttaacaaaacagatagtctaatcagtaacttttgtaaacacaaggtccaaaataatatttactttaattgttattaaaattgtgaacgacggactagtgttgaacactcctacaatttaatctttcaatttgttatgtaaatattttattttgatgagttaataccaatttaaatgttgtattttgcaaaatttactaatagattttttgttttgttaaataataaattaaattctgtattttttaaaatagtacactaaacttaatttttgataatttttttagtatagccaacttgaaaataatttttaatatatcttattttattatttaacaaaacacaaaattcaatcagtcattttaaaaaaatacgaatacaaaatggcatctacctatttttattagtataattaaatattaaattttatttatattattttaatttaataatattatgaataaatgaaatccataagtaaacattctcattaatatttagagcaaaaacgaaaagagagaaaaagccatggccatgcatgaaggcgtgtaaggtcgactctgaggtcaggcgaaccaggcgtacgtctcaaaaccttgcacacacaaagtccaaaattgtggaaaaaaaatttattagtacataaataaaatatttagataatataacaaaataagtgtttagtacatagtggtagagagtgatattttaatgggtaaataccattttggactctgtgttttgcaaagttacagattggaccct

SEQ ID NO: 319408 - DNA, 903 bp, Cannabis indica
cagtgagacaaaacttgagctaaagggaaaagagtgcaacatgaatatgtctccttctcatacacatatgatccataattattttggtgataatatatctcataagattgatgttattacttttaaaatatcatcatatactatctatgaccatatatttactataactattccagagtatgtgtggacttgtaaattatggatgaagggttcctagaacatcaatatttatccaacttatcgaatcattcatgtgtgtatatacaacgttgttcatactaaagtttaaaattttaagtaaatatgtacataacacattaataataataatataaattttcatatacgataatgatggtactccaagaccatatatttgtttcattcttattgtatgatcttaacttccatatcaaatgatcatatatttataattcttgatgcatatgaagtacttcgcgacttctccactaatacttatgaacaaattatatgcaatttaatatttattaatataagaaaaagaaataaaactttgttcttcaatcttttataatataaccggaagctcttcaagagactatcacaacatataattttcgaatttatattgcatagacatatcatacatgtattttgaaataataatttacttatacatctttaatttatatgaagattttttgtcatatagtgcgcgcaactttgaatttatctcttaaggaacgtattaaattcttctagaatttttaaataacgcatatttcaaattctcataatattaggagctctaaataaataatttttgctgtaacatttatgtattgcttataaattctcataaaatatatttcaagttataataaaatcatgattatattttctcaatatttaagcattatt

SEQ ID NO: 319409 - DNA, 914 bp, Cannabis indica
aattggtaataaaaatttatttgtaaattaaaatataatttctaaaatataagttctcactaatttaatttagttacaacaattattgtgatttaaaaacatatttcgtcacaacaaattctaatttttgtagctaatatttttagctacggatcttttaattacaatataaaaataataatttataatcaattacaactttttttactttaagtcacaatttttgttgtaactgaaaacaaaattttttgtagagtagagctggcacacaattcttatggttgatgcaatggtggtgagtacaacaagtttagtggatttaggtgctattatgaagataatagaactatgtcaacgttatgcaaattttttaaaggctagtcatcggggtgaatttagaggtcatttctgcaaatatttttgtagttattatatgttcttttatctgttttttattgttttattttgttctgctgaccatggaaagtgtgtaataatagaagtgtagttggatctaaaaattcagtttcctcattgttgatgcttgatttgatagtgtaggatataattatggttatgggccatcagttagctagtggcacgaattaaatgttgtgtgttttttgtatgagaataatgaggattgttatagtttctatttcgtttaatttacatttatatgattacgtgtagtaaaagcggaaatgatttacaacagattaaaattagtagtgttgttagtaagtagttattaaatatttttggctagttatactatatattattggtgttttgatttgtgtagtagtgttgagctagttaattgagttgtataagaatattttattttaagaaatatatttttatttaaggaaatataataaataattgattttataaatgaatattttata

SEQ ID NO: 319410 - DNA, 891 bp, Cannabis indica
ccttcggggtaaagtcctacaattctagttctaaattttttgggctactttgattttttgttgttgtgggcttcgaattctgttgggcttatattttgaagagcccatttgatggagaattcttaatacttttggtatcatatttctcatagattttgtgttgttgtgggctttgaaattagtttccgaaaaaatcttttctccatttttttctacttcatatgtttttgtgctctaattacttatgttagtctgtttattcaacttgttctaactagggtgttcattaaatgaaatggttttcgaatttaataattgcgaacaaatatatgtaatatatatttagactccttgctgttgttgctagagattgttttgttgggccgccactgctagatttgatttttctgactctctttgtggtgaggctgcgttgcttggctttaccgataacgacaaagaagagatgtaattttgttattgttgagagtgattctgggtggtgattaactctcttttggaaatggagtctaagtgggatatcgagaattacactcggcaatgtttaagcatttcttctttatttgcgggttataatttctcaaatgtagctcgttcttgtatatttttgtgctcataatgtagcgaaatggacttttacacaaaatcgttatggttgtctggatgctaatgacattcttttgaacctaatttgtaatgaccttacggtctaactagttcgtttgtttaatataacgattttttttcaaaaaaaaatatatatattataatatgtttcgatttgatgattagtatagggaaatttgattttctatacttaaacattttcaaaatttcttttttgaaccaatacattttacactatgaaaa

SEQ ID NO: 319411 - DNA, 1378 bp, Cannabis indica
tgggcttaaatagaattcatacattatatataatcatgaaataaatcatgtgaaccatgcaccataaaatattatttctgatctttattaataagtaaatcggattatattgaaatgagttttatttagggcatagaacccaacacacccgtagtgcttagggctgaacgtgccacattagtctcttttcgagatagctagtataatttctacacctggaattccttcctcatagatcgcattgcacataggtttgatagttggtaaccagaattccacgttcaaattagctgtactaactactactatgggatacccgagtagtatgggaccatgcttgataggtcaggtcatatattttcgagctgggatttagaaccaattaattcctatgacatgttcaggatcacaggatatagagattttagtgaatactatagtcctctttccttgtcttcttatgattatggtaaatccctttggtgggaaataacttcctaatttccccttttacttgtttttaaacaaatgttaacacattgttttgtctcgcatagatggattccgaggaccttctacattcttcaagcaagaagggaatgaaaaggttgactgcctcggaaaatttctcagatgtcaacgtggagcccctccaaaggcctaggaagacaactgccaacaagcagcgagcctccctgaccattgacctcaaggcctttaagaaccaggttcagaatcacctttcggccctcacacatactgaagagcccattcccaaagcaaatcaagttgttgcctcttcgagccaagcgcctgagactctgcccatcgaggccgggaatgctagctctaagcattctgcgcagtatgctgcggcttgttggcgtcacatccgatccttccttccaaacaattgggacttgatcactaacagcaacctaaacgagatgctcgagagaggcgtcgcttttggcatctcagtaattctttatccttttcgttttgcttttccttctaacaacccccaaaaatacttatgcatttttgttcatttgttttcagcaaaccttcatttcctttgccacccaacgctggggtctagactggatgaaacaactggaggacgagatccagaaggtgattggtcagtgtgaggtcgtgtctagggaatggaacgcgccacagtcagagatctctcacttaaacaacgaagtcgaggaggtgaagagggccaaaaaagttgaactcgaagctgctcagaaggaggcgaaggacaagtccgagctatgccataaactccaagaagaactcaatgcaggcaatgcaacgctcgaggggaaagaggctgacaccaaggagcgatgcaatgccattgcca

SEQ ID NO: 319412 - DNA, 889 bp, Cannabis indica
tttttctaacattctttatttaaaaaataatatctgtgccaacccaatttaactctaaacacatatttttattataattatatttttatatgaactaataagaacatgttagccaaatcaaaaaataactttaatagttattacaagctaatatttatcaaaattgatctccataattcaaataataaaactataaatcaaataggtttaaacacatactaaaagcatttctacgaaagttaagtggcagatgctcaagttcatggcctctaatataaattttttcaaagaaagacataatttatcaagataaatttactgatacagtagagtttaaaaattgaggacaaacatctgtcaaaacacgatcgtttaaattagtaataaaggttgccggtgtgtgggcatgcaacaccattcaccgatcgcagaatggtgcttcaagaaccaccactaacagcagctaataaagaataaatatctaataaaatagactgaaaaccaaaattaatgtaaagtttattaattaaactaattaccacagtaaaatcagtattagtaatggatacactaaaacaaaattaatctgctagagtcaaaccagacaaaagttaataaaatattcgtatcttgtctcttcattttgaactaatattaattttacttattttagctggtctaataattattaaaaaaataattgtcagtcttcctaaatttttttattgttattgttttaaataatttttttttataaaaatttacataaaaatgcaacagtaatttaaattgcaatcaaaatttaaattgtaaattaaaaaaaaaacatcaaaaaataatgtataagataatacttttttttttattttatacttcaaaataatttttt

SEQ ID NO: 319413 - DNA, 862 bp, Cannabis indica
aagacaaaaaaaaatgtattaatataattcattattttcttaaaattaaaatttcggatggtaaaataaaaaaattaaaaaatatattctatattgggtaagcaaaattttgtatgttttaatttttaaacacttaaagacaaaaaaaaatgtattaatataattcattattttcttaaaattaaaatttccgatggtaaaataaaaaaataaaaaatatattccatattgggtaagcaaaattttgtatgttttaatttttaaacacttaactctcttatatttttttttttttttggtatataagaggattttgcccaaaaaaaaaaaaattaagagttaatataaaaaataaaacataaaatcagtaactttttaacttttctttttctctgctacaattaaataaatgcttggacaccggagatcggagccgaggcatttcactctcaggtaccgtttttgagttttgaaatcgattctctctctctcttttgttgttggatatgatttagccattatctatcaaattttatttattgaatattattcttagattaggaattattaagaaaatatttgtttgtgaataaattaagaattattttaattttaaatataacttctcaagtcatgttcggctgcaagtgcctctattggaacagactcaccgatttctcacccccacaccttgaatatttctctctccctcaacccttacccacctggcctcatgtacgatattaatcagcatttacgtacgtaccttggggatttgatttgtggtcggcgtgggcgagccagaaatgagcagccattgcagtgagatcagaataggtcgctgatgaagatggcggtgata

SEQ ID NO: 319414 - DNA, 1113 bp, Cannabis indica
gggacagagttggtggagttacaatgcctctgtgcactccagctggtattggaagaggttagtagctctcaaaaaccaaattctctctttgtatgatagtactgagtttcagagacatagatatgttatcacgactggttataaactgttcaatactccaaagtcgaatactcaatggagtaaagaagtctggtcccgaatgaatacacctaaacaaagtataattctctggttggtgatgttgaacaagctgaagactaaggatcgattgatcaaaatgggtatcatggtgcaggagaagtgtagcctatgtgaagaacaagctaagagcattcagcaccttttctttgactgcaaggaaaccgatgtttgaaggagataaagacttggctgggatggaaagctatagcctacaacaacttgtcaaatcgataggaagagcaaagctttcaaaatttaggaaagctgtgtactgtgttgtgattgctgtcgtggtttatagtgcctggaaaatgaggaactctattatatggcagggtgcaaaaatagatgccaaccgaatggttgaggaggttaaatggaatataaggacacgggtccaattcttgctcccaaagaagctctcaagtgtagataataaagagtggttttttgctttatagatagaattcattgtaaaagcataaatggaaatgatggaaagatagaattgtatagattgaggcccttgtatttgggtgctcttagtttgtaaatttatttatgcaatacaactcattgatttatcaaaaaataaataaataaataatataatatacgtattctgtattttatttacactaatagtattattaatattattaacgtatcttagttaaatttgaagtaatgttaagtttactgcgtatattattaatatttgtggttttaaaagaaattttttgattattaacagtattaataagaaactaacgtaaaaaaaaactttacattaaagtaacattttttatatatacatataattttatagtgtaattttggttactttcaaattatatttcgtatgtgatcaatgcaatgatcaaacaacctcgcaaataacacaatgcaaag

SEQ ID NO: 319415 - DNA, 1187 bp, Cannabis indica
tcgcacaattaatatccaaacgaaaaattaaatactattttaaactggatattacaaaagatggcacctattctcataactctttggtctcacacttcattctagacaatggttcttggaacattgatcgcctaaagattacttcgatactaataatgtggaagatatccttaaagttcctacttgcccctctatggaggacactctcatttgggattgtcacccctcatgcatcttcactgttaagtcagcgtatcatctagctaattccttggtctcttcaccctctccctcttcctctaaccctgcagcttataaaacctgatggaagtctatttggactatgaaagttccttccaaaattaagtattttattaggaaagcttaccatcatgtgttaccctgtaatatcaatcttttccataaaaaaatctatctctcacccctattgctctctttgcaatggccaaaaattatgaaacgattacgcatgccattctagggcgtaccagagctaagtccatatggaaacacactagtcttcactccttgtactccacaaatagtcattatgacggatttttcactaagaactttttgatactctacataaggatcaacttcctcttctatctaacatttgttggatggtgtggaaccaaagaaacagagctatcttcaacaagccttcacgaacttttatagatgtggaactttttgtctctaatcttttataagattacaaggaagttcaaatacgtggctcccattggaatttagaggcccttgctccccccaaccgtgatgatcaccatcaagaattggatacaccagctccttctgaagggatgttcaaactccaagtggatgttgctcttgattcctaaaatcttaaaataggtgttggtgttgtagttattgacagtaaaggaactgtcgttgcagggctgtattctaacatcttaggagcctcaactccaattattggtaaagttaaggccttacaggcagccctttcttagggtgtgtttggaaggagggagacatgagtggatggagagggaaggagggagagggggtggtgggagatgtaaaatccatttgtttggcatagaggattgtgggagggagaggagagatggaatgatttacaatctatttgggcccaccattttgaatccttcctc

SEQ ID NO: 319416 - DNA, 1452 bp, Cannabis indica
agagattctccaaggcaacatgtgcaaaacatcctagcaaaaaagaaaaagggtatggaagtcgcttaaaacacccagaaggaagcgaaaaggaaaccaccattttcaactctcagaaaaagaaagtcggcagtgcatgtacaaagaaagcaataaaaagcataacagcactatcactgacgtcaaaaagtcctcactaaaagtaacattattaccaacgacatttaaatgtcctcagcaataaaaatgatttttttgtttaagtatgcatcaatggtgacaaaatatatcactaacgaaaatttcgtcattgagatatatactaatgatgaaattttagtcagtgttattttattttttttaaaaaaagagccattaaattgggtgggatttttccctctcaaacattcactggcgacaaagttgtcaatgatggactgccacatcgtcagtgtgccatccaacactgacgactttgtcgtcagtgtatttctcagaaaactaaataaaatacccaggaccctatttcccccattcccttcaactttcttcttccccaaatataagatttccttctcaaaaaaaaaaaaaaacccttaccatcaccagcctccacccactggttgcgccgtccaccactaccaatggtggtggttgtgccggcgaccacaaccatctctttttttaggtacaatttttttttttctattttatttttcagatttgttatacatcataatcatcatcttctccattatcatcttcctgttcttccataatattatttacaatctctctcgaggtcaaaatctcttctcttggtgttctctctgatcagattggtagtggtggtctgttctctctaggcaaaacatgtcaatactttcatcccatatatatatgtaatgtatgttatatgtttgtataaatgtctttgacttttgttttgttaacaaccaaaagctggtaaaatcttgctacatattttgtatcatcataaacccttcctatgtggttggataaatctccatagattttttctctacgagtttcatcaaatttactaaacaacctaacattttattttcattagtcaatttaaacccacttaattgcagctatacccaaaatgtttatagtaatcaaatacccaaagattgagtttgtctgtcttgtagcttaaataaaagaagccttcaggagcaccaagcctgaactcatcttacaaaattattttactaaaactgtttggtttctgttttgttgttatttattttcgtgttctttgttttggggtgctctttcgaagcccagtattaaaaaaaaaaacaatgcatttggggtatagtgcctcattatatctataccttatgtttatgaggaaagggtacattatgaggaaaagatattgtatattatatatatatatatatattgattgttagactttta

SEQ ID NO: 319417 - DNA, 1348 bp, Cannabis indica
agagagaaagagagaagagagaggcagtgaggggtgagacatctcactctctctccggtagtgacacagagaaagagaaataaaagcctgcgattgaaagcgacgaaggcgcgtgcggacaaactgtctttcattatacaaattttcaataaattttgtccgaaatttttacatggttttgtctatgaattattatttttttagttaattaaaatttgtgtactttaatatacattaaattattattttttcaaaaaaattattaaaatataatttttttttataatttcatttaattttactaatgtaatgattatctttatagtaaattatgcccccgaactttaatatttactaaattatgtctcatgacatttaacatgtactaaatagtgctttctaaatttccatccacatcagattttctttgataaatttaaataaaagtacttaaatctaacaatttcaatagctcaagtagatatcaaagtttaaaaggtaaaaatctaaattagcttaatttttttaagaaattttttttctcaaactttgaaaataattgtaatattgtccttttggttgcattttgtcaatttttactaataatttagtgatgtaagactaattcgtaactaatttattgtattaggagaatttgtacaaaaaaatataaaatttaagattgtgtatatgtaattttagagtttaaatttaaatattttatgttattatacttgatcttaaataacttaaataaaattttttacccaaaactttgatacttatatgattgtgtccctatgattataatattgtctttttggttgtattttgcctatttttgtaaataattttttaatgtaaaacttatctatagttaatttattgtattcgagaattcatacaaaaaataatttcatacataatactctaataataatattttaaactgtatatctataattttaaagttaaaaacttaaatattcaaaattattatacttaatattaactaacttaaattagttaagtagactctgtaattatatacataatttgtgatcatatcaaaaaattatttgaaaaaaataaacaaaatataattggagttgtaaattgacaatcattttcaaagttagagagataatttttacaaaaaaaaaaataataataaaaataagataaataccattttacatgttgtgttttgtaaaaaattataaattggatcatttgttttgttaaataataaaatggatcctatattttttaaaattatacaaataagactctgaactgattttttgtcaaataaaacttaataataatctgatctagagatgttatg

SEQ ID NO: 319418 - DNA, 1576 bp, Cannabis indica
taatctagatctagagatgttatgataaaattggttatattttttctgtatctgttcgtattataaattgtacttaaaattagttaatatttaaaaattaaacttacggtcttatttttaccattttataaatataaagtttatttaatatttaaattaaataaaataatttaaattaataattttagcaaaatacataatataaaatagtataatttatgggacaaaattatatgtctcaaagtttagaggcttatttaggacagaggtcaaaatatggtaaattgttctagtcagagcgagggtaaaatcgtcattgtaaaatgacgtggatgaataagagagctccgcgagttattcggttgattgaagaccacgcgccgcgccagctggggatagggcggtgggatagtgtgttctcttccatttgtggtaagagagtttaccgtattattcggacagttgtaaaacaaaaatgggtaaaaaatttctggtgtggtggggtccatggtacattactgagccctgggttttaccttttacgacggcacactttttattttttttaaatttatttttgttgactagtgtttgtgtgtcgtataggagggttttgttttggtcaaatttgtagagaaaaaagaataagggtcttctactcttcttagaagtaattctataattgaattttggaacaccttcttagttcttttagagcaaacagggttagttcttttagagcaaacagggtcggtcttgagatgagacgagttagacgtggaattttaaaattgtaaagaaaaaaattattaatatataaataaaatattaaataataaacaagtatagcaaaataatatttgatgtattggttgaaattatgattttaattagagagattaagtgattaattctcaacttctaattttagatttcttttttagatatatttaatttatagttatacaggattaaacttttaaggtctgaagaattttaaatttttttattactacacatatttcgttaatagagactatgttatagtcttaaacaagacacgtatgaaatttagattctagattattatgtctagacagaaatatgtggtatcaattacttttaaatgttgttttaataaattcaaaacagagtttgtactgacgaaattataaaaaaattacagttttacaaacattttagtacttatactgctaaaaataaacattaagtttatgctacttacaaagttaagactttgaatacttgtactatcatttacctttttatatgatggtgtacatcatagttatttaagacctagtacaaattttcgagaaattcataatagttttactcatcaaaaataatatttaattttgcgcatattgattagtgttcaataatgtcattatattgatcttaaaagtgtaaaataaattaaatttaaattaatattttcataaaattaagggtaaatactattttggaccctctgttttacaaaagttaccaattggactctgtgttttgttaaatgataaaatggaccctgtattttctaaaatagtacaaa

SEQ ID NO: 319419 - DNA, 2021 bp, Cannabis indica
tcatggctaagacaaagaacttagggcatccaagcaagatggtagatacagaaactactccctcaaatgcttcacctgtgccttcaaaattgcctcctgctactacataatcttcaactctaagagattcatcaccatctcggtgtgaatcaaagaatgtggctatcaacaaagcttcttcttccattccccacttccaaaaagggctcccaaaaccctggctcaaaaatcagtgagacccgtctaattgctcaaatcatctaggtctgattcgaagtcttcatcttcgactgtaaaggcatttccttctcatggctctgagaatcctcttgctgcaactggtgttgcttatggagcatcaactccaaagggcccatcctctcgaacccgtgcccaacaagcttctcttgacaaggaagctcgcacaaaaaggtgctatgataaaccaattcctgttgccaaaaagcttaaactagattctccctcggccacctcgagttctgatggagaagaatagcccatggacgtgtcatttgatgactatgagaccaaaactgagtctttttcctctaaaaaagcaattcaagaagatgttgttatctcctttgacagtgaggaaactgatttggagcctgagccatccttgccaaaatttatagcagcaactcctcattctgcttcagcagctaaagcttctgtagtagccaagggtgaatagcccatgaagagcaccatgtttgtctatctctcttcctctcaagctatgaattctagattttttttataatgataaccagcgtgactggaacttatatgctacccataagtttgagagtgaaagaaattttgatttacatgctcatagagtctatgacattgtgaagtttgttcaatatcatcattgtgaagatactttaactagctttgaagggtatattgatggcattgtcaaagaattttatgctaacttgactgatgatttgcttgataagaaatatgagttctttggtaatgtttatgttcgtggccattagttttcctttactgagaatgatttagtcaaagctttgaatctgcccaaaggtatgacaaatgcttcagtgactatggatcgtcacctcattattactgatctcaatagtatacgaagtgaatggcaagctagtcaaagtcttcgtatcaatcatctcacttatggatgtgcctcactcatgcggtttactcttagcaattggcttccaaactccaacaagactatggtgtcccaagacttggctcatcatcttttttgaataaccttaggggcaaccatgaatttggcttctcttatcttggacaaaattgtttccttttgaagaggtaaaaaacactgtcgcaagcttatttttcttaacttaatctataacgttatttcctctcagaaggatgtggcttattcttatgagacactcgagcctcccctcactggaaccatctttcaaccctcagactactttgatggagctttttccaagcatcctaaggtttttgttggtgtaaatcctgctgctgctactgtaagttcgagttttgcgtctgcagatgtataagatgtcaagcaagaagtcattctggtgaacaattgtttagctgccatggaggaggttcagcaagagatgtccaaccaattgtccagtctgatcaagctttacggggcataactttttttttcttcttttaaatatttgttggacttatttttatttctattcgtctttggcccttagataaacgaaaagagggagtaatgatttttaatttcttgctttgttttctaaactctggaccctttttctaatgggagttgaggttggtacttgtgttaaactttggtttcaagttagcattatatttcgatttaatgatgtgtttcttagggggatttttgtttggtgtggctaactttgttttgtaggtacttttctgttaaaaaataatttgatattctaaagtgccaaagggggagattgtaaagtcctttt

SEQ ID NO: 319420 - DNA, 1203 bp, Cannabis indica
aatttggtattagagccttgcttttatcaattatgttgctaagttgtgctttattttttggtatttctctctgcctctatttttaagatttttggtattatgtaattagttaatagttacttttattgttatcgattatagatattactaattataaaaatttacataagttttataattgttacttttaacattttttgtattatgcatatagttatagttatcgatcatatatagttttactgttatgcaaaacgattttaaaatatgaaaatgcagttaggaaaattgcatgaaagtttgtaactttttcttacctacacctatgctacattttataactgacacaataagtaaaaaaaataagtatttacaacatgttactcttcatttaagaacctacgaaataagttttttgtgttggttttgaaatggcacaactctttttgcgtcacttccaaaccgacacaacatgttataaagaaacttttatattttacgtcgcttttaaaatgacgaatataattttttcgtcatttataaacgatgcaaataaaacactatttgcgtctatggcttatacgtcacttccaaaccgacacaacatgttataaaggaacttttatatttttcgtcattttataaacgatgcaaataaaatactattttcgtctatggcttacacgtcagttttagagaccgacgcaaaatctttatatgtcatttagtaacttacccctatttgtagtagtggaagttggccagccaccccttaccggccctatggtcagcataggccggctaggttctggacatcatagggtcggccagcatgcatcctgcagtgcatggtgggccaaacaggattttggtgcatagcttcagacgtggatagcaagccagactgcgaattcggccttaacaaccgataaaaataaagcaaaaatatctattattaagggacattttagtaatttgtaattactaatttaatatgtaaataactgttgggttttatgccctaaataaaactcaaattcaatgtaatccgtattattcaatatcaataaagaaacagaagtatttttcatttatttgtgtatgtttaagttcacattatgaattatttgtctatttgattttaaattcatccaacccttttcacatacttgttcttgtttattgtgtcgtcagcacagtgga

SEQ ID NO: 319421 - DNA, 2353 bp, Cannabis indica
aaataaacccaataattaaaaccaaaaaattaaacaatctttttttaaattaaaaaaatcatattagccacatatctctctaacaaaccgtatatcccaaattttaatatttttttgttatattgggtggctttttattttttttaacgttttttttaacataaaaactaacgggagattaacttctcccttaactttcaaatccttaatttatcttcatctataattttcttttttttttaaatctcaaaccctatatcttgcaccaaacaattgaaaggttatggagacggccgcgtgaagcctacctctgttccaattcttcttctcttcatcgtgaaactcttgagaaagaagaaatcccaatcgatcaatcctctcttcttttcaagaaatcaaaattgtctgttcaggtttaattttaggtagtaattgaataatattcattgagttttctttaccatatatattctttgctttctttttctattatactgaacagagaaaaaaattctaatgtttcatattaccatgaaaatttgctgacttgtaaatttgtaaatttgcttatgcttttctctccacacacaatacatggtcatggtatttgttctacaatcatagatgtaaatacaccaatgtgaatttgatatgttcacttaatcatgttctgttttgagtatttcgtgaccatgtataattaaaccttgtgctaaatttatcattggcttagaattaactcttgttctcactctttcaagaatctaagtaccaactagagtacaaaataattcattatcacccactatcaaaattgtcctcttctacctcataagctaaatgaataaagttaatatatagctacgcagtctttttcaaagtaaaatatattaacttattgtggacctttttttcttcttcagtaaggataccaagctaactatacagtatacacaagacatattgttatggtcttctttttctaactatacagtgtaatgatatattgtatgttgtaattatacagtgtaatagtactgaaatattagatgttgtgatctccagagatgttgctatatatatattattatgtactgcacacttcaattaaagtcatacgatgagaggtatacattcacaatcaattcaccattcaaactgctaaatcgatggaagattaaaataaagttctactatgctttgttttattttttattgggtattctatattattttatttaataattctttttctctattttaagatgacatgacacttatttctcgttacataatgtttcctttcaattttgtaaaacatatatattgtttatttgaattttttaaaaataaataataaatgttaaaatcatatgttcttatgacttatcataaattattttttcacaagaataactattatatgagtatatatattgagattaacctactttttattattaataacaatgtacatatatatatcataaatttatagaacaactatgttttacttaccaaatgcactgacacacaatttacttttataaaataaattcaaataattatactaatttagtaaccataatctaacaaaaataagactaacatttacgtggctcagcacgtaacattctactagtatacctatatacacatgaaaaaatgtggttatttcaaaataataaaaattaaaaacaaattaaaacttttttttttttttggcaagtatgtttagattagtaaaagtgaaagaaatattagtaaatagaataaaaatgtgtggtacgtgttttacaagttggtggaatagaaaatattattacaggtaataatagtcttttgtttttctttgttgtacatataatcatatatatatatatatatatatatttttgtaactcaaactattcttacactattattttgttttttaaaaactaaattggtgtaattaaattttagttggtaaaatttaattgagagagtctgagaagaaaatattaaactcaagtgtttaagagaagttgaaaattactctcaaaatatacatagtaataaaactcgcataaatatataagacataccactaaaattatactaaatatagatttagtttaacatttttatctcaaaaactcaaacttccataacaaatataatatctcatatattgaacaaataactatctaattattttttgttctgattgtgtgtggtttttattgcatatttatatgagtaaatagcggcataagtgttatatatttgttatttaacaaatatataataaagattaaaatgtggcatattatatattaatatgagattaatatatattatgtgttggagg

SEQ ID NO: 319422 - DNA, 628 bp, Cannabis indica
gagagctataaaattttacatacatgactaaatttttcatgtataaagtcaattaaatgtgtaagaattttaatttggctcaatgaaaaaggtgatgatgaaaccatatattaattaaaaggctaaaattatttgctttaaaaatgtattggatataattacagttatgttaaataagaaagggaggttattacctatttctagaccaatttttcttgaagcacgttattagaactcgaaatacactcatggataacagatgtccattgttcatattacaaatcagaaacgataacacagactcgtggatgtccattcataacttagcgtaaggcttaattattttgatcgattaaggagttagaatatggaggaaagaagttggcgacataaaattgtacaaaacaccaaagccattttcatattctctgtaataacgatcgaaagtaatttttttcaaaaaattcgaatacatggtcaattgcaatagacgtttgggtttgggggagaaaatcccaataattaagtacaaactagggaatatagttttgggtttaaggatgaagaattgtaaattaaatgcgattaagagatgtaatttatttttaaatatacataataaattaaa

SEQ ID NO: 319423 - DNA, 1768 bp, Cannabis indica
agatttaagatcatttaatctaggatcaactaggtgatattgaattgaatagatattacggtaaatttatcatatttaatccaagttcaatatcagtcccttccaatgtatacttcatacatctgatactagtaaactttgccaatgccctggaaaggacataatacttatccaaggtgtaagtatacctatcgctgattatcatgccagtctaaatctagttttttagacaaatcaaggaattaaacttttgaacatataatcacgattatattccactgtgttgacaacactataatcatgaacaaatacatatgttctgggcttaatagaatttttatatatattaaatataatcatgaaataaatcatgtgtaccatgcaacataaaatgatttctaatctttattaattagtaaatctgattatattgaaatgggtattatttagggcacagaacctaacaactaggtgatcttctttccccgtgtacatcttccaagttggaatcttcaacttgggcaagggtaaggcattaatgtatgccgagaatggtgatccccttgacctgtctagctcaagttctgaaggttttggaccagctaggcctttaagcatgtctcgtatttgatccaactatgcttgcacagaaggatctattgttgtaggggcctgatggattagccttctttgaaaaccaagattggcgaaagcctggccgaccataccttgggagagggtatattcaaggccggccagctctgagtctggtatttgtacatgggatagatcacactaattactggagtttagtatatccaactatttgaagtgattaattttacttctcaaattgttgttttgggtgtttccacccgctctcagtccttgttagttgaaaactaatctttgggtgacttgctcccctcggggagggagtgctcctttctggctggacatagggatgtttatgccatcctagccaaccatagtggctagattcgtggtgcctgctatggcagtagaattgaccacatctgatgtgttcatgaaaattctagttatggctggaacatgaacattaggatctgtagtctgtgggtcttgagggagacccaaagatgtagatagtgtgactagggttcttctcatgttaaccatggcacttgatgagattcgaatccacactcttagtgaaagccccaaactattgacctagaaaagtgatcaaccgacaataaggtcttataaatttgatgttcgccacgtgttatacaacaagaacaataaagtaaatgttggcccccttaattagcgggtaatgacctactcctcttttggttgtattgatacctagagataatgttggcccccttaatcagccaaggtctgcaggttgaggttcttctgaccatgctcctgtaggacctggccagtcatgcgtctgtctggatcttacatgtcactatagctttaccaagaggagaccaacctttggatgtggaggctagatttttccaagtggagggcagctttgtacactgtttccttgtagaggttaggttcctttggtcaaacaaaagctccctttgtctaaatgtcactttttggtcggcgagcttgtgccagatcttggccagcctatatgcttaccctggccgacctataggattctgttggccggccagggatgttagtactgttgggaatattttaccaagatcaagatttactaaaaagtttgttgaattaacatcctaaatatgaa

SEQ ID NO: 319424 - DNA, 1061 bp, Cannabis indica
gtatataaatatttaattattgaaaattgtttgtacctaatttagcctgtttttatttggggcagattaaatgaatatagctattattgaatgtattatcatatcattaattgacttaccttataattaaagatcataacaaacaaatgcatatgcagaccaataattaagggtgagttttctaatattttttcaattaaatttttattttttaattataaaaataaaaatattttcaagaaacatgttctataaaattgttttcactttttaattttgaaaataaaaatcaattttttttaaaaaaataatcacttccaaatttttttaaattataatctatttttactttttctatcaatattttaggccccaacttcggcctcaaacctagactcgcctcaaagctcgacccatctccttgtacctgaatttgaacctggactcagacgcagaacccagtgcggccctagatgtagaccccgaccccaaacgctgacccaaatccaaacctcatgttagaacttattttaccaagatatctgactttactaatatgcatgtttgatgatcatataatattataacatcctaaaatataaaattaacaaaatggtcaaataagacataaatagtttaggatcctcacattgcaccctcgattctcattttgtaatagggtattggcaagtgatgaacttagatagctttccttaacccgataagcgataattcttaacgatcttctacaaggatgtgagtatcaccttgaatagtatgggctggtactcaactcacttttagaacaatttagagagagacctaaaaacaaataccataaaaagacttaaaataaataccatataaattggtcaaatttaaaagtgccaaatttaacataagaacttttaaaatacattgtaatttcctctattcctctacttatcccttaatccgccagtgcgggcctcacagcttcttctagaggaaattacacttagtatgggattttaaaaattcttatgataaatatggcacatttaagtttggccaatttatat

SEQ ID NO: 319425 - DNA, 996 bp, Cannabis indica
aactatcatggaaaaaaccctggacagcggagggagtggctcaaacatcaagatttgatcacgagcaccagcataagagtcatagagacccgtaagaaactgcaaaatttgatcacgggaatagtgatcttgaatttgttgcattgcaccacaagtacagccacaagaacatggcgtaaagggttgaaactcattaagctcgtcccataaagattgtagctgagtaaaataggtggtaatggagttagcaccttgcttgatgcgagtcaatgaagtcttgagatgaaagatccgaggacagttactttagttgaaccgattatgaaggttattccacatagcaagggccgaatctttaaacataatactggctgcaatttctcgtgaaacagactgcaatatgcaagccctaaccgtactattgcattgatccaaagtagatcggtatggatgattaataggaggacgaggaagagtaccttcgataaacggagttttgttcttggcagccacattgatcgtggcagcgcgcttccaggactggaaattgtcttggccagtcaattgaaagggaacaatgaggaaatttgggttgtctccagttccaaggtgatacggattgcgttcatcaatggaaggtcaaccaagatttacccgaggagtgtcaaagacattaaaactaggtggacaagaagggaaaaccgttggagccataggaggcggtgttttaaaaacagaggggaccgagggaataggtgcgaaccccgacagaagagtaatcgtagtgatcgacgatgaaaaagactgtacaggggaacgcgaagttggcagcagaattgtcggagtagcacctacggttaaggtctcaggtggcggagaagcaaactgtgaagacgaaccaccgtttgggttttgtgccctaaataaaactatttacaatctgattagttatcaatataagaaatttgaagtgatttatgtttgcatgaattttac

SEQ ID NO: 319426 - DNA, 758 bp, Cannabis indica
tttacctttaagttttttttttttttttttttatgtttttgacactaaaaaaagtatggaaaatttgggaggggttatttttgggttttagataaaatggtcatatattttcaatgatgatatgtattagtttagaaataaaatattaggtatatgtaagtatagaaaatcaaatttccctttacttttgatttaacctattttctattcttttgctgccttttttttttccctatggagataatataaatcaatgtatattttagtgaataaattttgtttatccttttcatttttttcatagtttttgagagtagacttattctgtttattctcataattatattggatcaatagttcagtttattcaataattattaaatagatttcaaactatatatctaattacaataaaagttagtatgtacatgaaactttaagtaaaatacaaaaaaaaagtaaatttataatgtatttcgtttatttacaaggtgtccaactaaagtttcacatttaaggtaggaatgtttatatgatgtacttcgtactattttgctcatagtgaatctgatctattttaaatgtagattttatatttttagatccaatccaattagtgtagattagattgattattttaggttggttattttttttaatattaaattatttaatatttattaaaatattaattatttttacataaccaacaacaaaatagaatatgttattattattattttatgtctccaaaaaca

SEQ ID NO: 319427 - DNA, 1713 bp, Cannabis indica
agttatcattttatttgagggagagttttgccacttggactttctcaacctcttctctggtgtaacctttttatggagggagtatagactcttagagcagtctcgacctcttcttggttactcgctggatgtaaggaagcttttagccccttagaaaacaatcacctttttaggatttaagattttattgggggagctttggccctttaggtaacgatctacccctttaatggtataatatttaattaggggagtttgtggcaccttaggcgtccctcaaccctttctactattttcattgtgcttagaacacatgtttaaatgcgataaaatttgtactccttttagagaggcctcctcttatattcatactctttttcttttcatattatattattattattattattgcctttgtgcagtcattcagtattactaggcacttttaaccattacaccgctaagttcactttgacaattttaattgacaagtataatgaacaagatgaatggacgttcagagaagtatgaatgtcacacatactgtgaaactttaacattttatttataagtcaaatacataaacgccttgtacatttactatttttggagattaacttaggtgccctctttaatttagtacaatgtatcaaagacagactcgccattgtcaggagtgctttcctcgatcgactgttggaaatagaagagctttactttgaagaatctcttgggtgtttaaggtttacaggttttaggctggaggcttcactcaaatgtatcatcttataagtgttgggggtctcgcctagcagaccctataagggcccgacgagccttccaaagaatactcacttgtatttattctcaagactctattaccctcctccacacggatgtacttctttgctctcttgtagaagccatctatgccatccaactctcttttcatcgtgttccccaatagtccacttccaggacgtactctagcggctatgacaatcttgagttcatctttggacactttccctactttggtaactttagtgtttaagtgttagatgtagcttcacaagctttcttgttcctcttgcttcacattgataatacttgtgataggcataacatagtcatatgcagtttgatgttgttggaggaattcttctgaaaatttcttccaagatgtgattgttcccaatcctagccatttgaaccacttgtatgcagctcttttcagtgtgaccgtgaagcattgacaccttatcttgcatgacacttttttttatcttcattagttcattaaaagctttaatatggtacttcaaatcatttgtaccatcacatggtgccatacgcgacttcttaaaattggggagaagtggttcaacttgaatctcccttgaaaaaggggattcttcatcaaactcgtcatcatccaagtttgccttcgaggaggtagctatttttcaacataggtcttgcatctttgcttatatctccttcatcctttgcaatttgcataaggcatgtgggagatactccttaggggtgttcatcaaaccattcaaactgctcaaactacccgcaccgcaccacaaagcaaaaaaaactgtagtttgaaattctttacagtgcagtcgcggtttgaattttcctaagtcgcgcggtgcggtgcagtttgcggttttgaattgttcatatgcggttcaaacc

SEQ ID NO: 319428 - DNA, 573 bp, Cannabis indica
ttttttatttttttctacagggctgttgatcaccagtggaatggtgatcgctttgccactgctggagcaggagttcatatatggaatcacaataagttctgattcaaccttgttattctctttatgagtgataagttagtaatattgtttttctccattgttgcatgacatgacattgtatatacctatgatttacaggtcagtgccagaaaagatatttgaatggggtacagacacggtgatatctgttcgattcaatcctggagagccaaatgtcttagcaacaaccgcaacgtacgtataggattctgttaattagatatatgctaaaagtagtaaattatgctatgattcagcttcaacatgccatatactttttagatcaagtattccatcaatgcaattgaccagtgttagtggtgtgcatatgtttgctcactctaaattatgtggggatgagaataaaatctggtctaagtgaatagaattagacagcttgtggtgattgagttggtcagaactcagaaggaaaaaaggggagccggttcattttgtagcagtgcaatgatgaac

SEQ ID NO: 319429 - DNA, 655 bp, Cannabis indica
aatagaagtgtttaaataaaagagaaaaaaaaattagtgagatataaatttgttctcacttttttaaaatatctttataccatatcatcaatcaattagtgattgaccatttataaatttattgacagattcattaattaattgatttatttatttataattaatatacatttcatattattattttatgtctttcttttaatattttttttattttatattattattttatgtctttcatattattaattattttctgtaatttggggatgtttaattttaactgtttttggtgatatgatatcttggtatttattcagaactttagtttaatatggtatcttgtagttggttaaggaggtaggcaggtaaagatagcgaattttaaagaatttctggttgagaggtattagctttcttgaggttgttgtgatgtgtctttggttaaagaaatagaaataccgatttgatggatgagttgcgtcattatttatggttttggtgcctttcaagactttcgcgcctgatatatgccgacccctaattattgagggtaatttggttaataaaatttcaaaatatatgaattgtaaaaatattataaactttaaagttaacaagtgtttgcagttcaaattttactattgtgttataa

SEQ ID NO: 319430 - DNA, 841 bp, Cannabis indica
agatcctggtaaaataaattccaacacgtccaactttcatccttctagctttatcatgtgacgaccaaccttccacttaacgccacatgtcatcttattgcatgccacgtcatttgggcaatttttgggataatagttgctaacttgaccaaaaactgatactttctattttaaaaaagataatatgagatatttaggtttcaaaataatatagatgagattcgtctcatatgcctaataaaattactttagccaaccttaaggcaacacttaattgtataagggttttatcataaaataacttaaacattcttttatgtattttagttgtatgcattcttgcatcacatttacactaattctaaaagatatttatttttaaagcttattcattcgctatctttatttattttcaatcatgtctactatgccaaatcctcttactgctttactagcaattgaaaaattgaatggtaaaagttttcttaaatgaaagcataatttgaatttgatgctagtttgtgagaaccacaattttttcctaactgaggagcatcctgaagagcatgctaccaatgtcccaaaaaatatttggaaaaaatatgatgcttggattcaattcaataacaaggtcaaatgcttcatgcttgtaagcctggatgacgttctgcgtaagacgcatgaacaaatggagaaggcctttaaagtgatggattctctacagaccatgtttgtgttgggttttgtgtcctaaataaaatctatttcaatataatcagatttactaattaacataagatcagaaattattttatttagcgtggtttacatgatttatttc

SEQ ID NO: 319431 - DNA, 2822 bp, Cannabis indica
tcttgtacacacccaaggggctccatcatctgctctccctcatgcctcaaaggctatacctctctctcattagtgatctgcctacttgatccatgctttgtaaccttatgagagctatatcagatcccacctttagtaatctaaatagtataatctgtaggtattaatacaactaaaaggggagtaggtcattacccgctaaataaggaggtagagcctctataaaaatcattgtattatttactttattgttcttgttgtgtaatgcgtggcaaacatcaaatttatataacaccactgtcgattgatcacattttgaggtcaacagtttggtgctttcattaagagcgaggatattgtatctgatcaaatgccataattcacacgagaagaaccctagtcgcaccatctgcatctacgggttcccctcctaacctgcagacttcgaatcccaatattcatgatccaacaagaactagaattcccatgaacccaactgatgtggtcaatcctgccaccatacatggcatcacgaatctggccactacggttagctaggatggcctaaacatcctagtggatctgaggaatcggcattttcctccaagggaggaacctccataagcgcatccaactaaatgaacaatccttagggggcaccccttaggagcaataagtaggtttcttccccagtactatgtaggaaagacaagaataggaaatgtcgatcttactaatggcgtgccccacatggacttaggagaagatctcaagttatccagacttaaaaaggccggctgtaaagtcagcctaattgaagaaccacacgttactgattgcgatgtactagcttagtagagacccgaattccttgaagaaacacgtgctgctgattgcgatacgttagctcagtaaagacatacaattcctaagatggatggatgaccaagagtacatcctttgagctagccaggcagagttacattgtcgcaataggaggccaatgatctgataaggtggttcaactatagaaccagtttaaaaggccaggatctcatcaaagatccacttcatggagtactagttgattggtcaggagggtctatcgacaagttgaccaacctggtccctcaaggactaggatagatcttcccttgcaagagggaagatagaccttgcctcaaaggtctaacggtgagaacagctagatctcgacaaccagcagcatgggtgctggccagggatctcaagctcagcaacaacccctactatccatcctgtggccggccagccaccaacaagagtccatatggccaaccagccacctgaagaagtccccacggctggtcagacaccctcaaaagtcttaatggcaagccagagatgagcactccctcctcaagaccaaaagaataattttcaaacgacaaggaccaagagtaggtggcaatacccaaaacaaaaatttgagaagtgaaataaatcacctctgacagttgggtctatcaaaccccagcaattcatgtgatctacgcgatgtcaactcacaaactccactagccaggcaaaaatgtgtgggaggctaggccttgcccaacctagggctagccgaccatgtacaagtagcagacgcagggctggccgacattgagtataccctctcccaaggtatggctggccaggctgtggctaatccaaggctgcagctcaatcaagaagagctaatcaatgagacccctgaagtaatagattcttttgtgcaagcacagttggataaaatactagacatgctcaaagtcctagcaagtccaaagccttcagagttctagctagacaggactaggggttcactagtctaagcatatattaatgccatgcccttgcccaaattcaagatgctgacttggaagatgtacacaaggaaagaagatcccataatacacctaaaatactttgagaattaaacaaatctctaacaagcatctggcaatatgcgatggcgaatcttttcagaaacttttgctaaaatagcccaacaatgttatttcaagctggccatgggaagacttaactcttgtgaagaattctcccaggaattctatactgagtttctgcttcaagacatatacccaccagataggaggattttgtcaaaataaagcaaagataagatgaaccattgaaggactacattctacgatctacggccgagggcacaaaggttaaaggcttgatagaagaaggtcgatatatgccatactcggaggtatcctaccattgagtgacttctagaaagatattaggaggatctcaacgaacaaccttgaggagtttcttgagcgagttgatggcttcttaaagttggaagaagatatctaacaagcctagacaagagggtacgtcaatgatgaacaaacacaaggcctcatagagccccaagtcctatccgacgcactgactagcgtagacaatctctaccaattctctaacaatgagaatggttgaggcaaacacattaacgatggcaatgaccaagatcattgcaagagagggaaatttaatgattcccttattccatgaagtccaagaaagaaggaagagaatttttcatgcttcaccctcctaccaaaactcataaagcaaagcatgccaagaagtcccaacagggcatgtcagtaacaggcaggacaaggctaccttctacctttgatggctggccaccatgttcgtgttgagttttatgccctaaataaaactcatttcaatataataagatttacttattaatatagatcagaaataacatttaatgttgcatggtt

SEQ ID NO: 319432 - DNA, 1274 bp, Cannabis indica
accaacataatactaatattaaagcaattacaaacttctcagaaatcccaacactagaccatcaacccactaccaaaacattcactatccactaatgcataataattttttttaacgtgcactaaagcataatattaaccgcaaagaagtagaaaatatgatgagagtatatttgctagagttataatcttaatgaaaaaaacaattacggataccacaaattatatataaattttatatgcttgtattctagatactgtttggaatatggaacaaattcaatacaataccaaaataaaactagttacgaacttctcaaaagcttaaaaacttaaccatcaacccactacacaaccaaaaagagtcattgttatccgaaattttgtccacctaatgttgcatgtccccatgggccaagattgaggagacgtggaatatagcctttgtaatagcaagacaacgtttctttgcaaggcatggaacaaccatcaagtaacaagcgagaggagttaagcaagtcgtcaagaagctacacaaccatgtctggccggccaacgagagtgtataggccgacaagaatgagcttatatggttggccaaggattgggcataagctggccagccaaaggtgacttttagaccaagaaggggcccgctcgaccaaggaaatgtaacctctggaagaaaaagctgtacaatggctggccaacacttgtaaatgctagcccccacctacaatggctggccaccacctacgaaggttggccaacacttgccaaagctagcaagaacatgacctgccagaccctgtcaagaacatggtcagccaatccccggcaggaacatggccagccagaccccaacctacagacattatgtggccaattagcctgcacctggctggtgcacggttggccagcttttacctgaaaggcctttggtgcgtagccttcatccatggatagcaagttaagcacgaattgtgccttgacagcctaagaaaataggaagaaaatctcaacaactatttttaagagataatttagtcttctaatgtttattatttaattatataaatgtagctttattaacttgtttttttaagggatattggttgttaatctacatgtaagccctactatataaagagcaatagtctaaccctaactctctaagtcttaagtctctaagcctcactaaagctctcaagctctaagtttgaaatcctaactctctcttctcctctcttccacatgccctagggatctctctct

SEQ ID NO: 319433 - DNA, 836 bp, Cannabis indica
accatgacatgaatccatccaaccctagaacggacccaaaccacagaccctgggcccagaccttagactcggacctgaatccgaacccgttttggggttcgaggttcgggtctggggtccaggtccaggtccgggttcgggtctgggtctaagtctgggtctggatctgggtccgagtttgggttggggtctggggtttggatttgggtcaacgtctgggtcggggtccaggtcctgatccatgtgttgggttgggtcgggttcgggtccaggttcgggtctgggtctaggctttgggtttcggggttagggttcggaagtctgaagtccaggatctaggattcgggttctatggtccgagtctaaggtttgagtctaggtctgggtgcgagttggggtctgggtccacgttcgggtcggggtccggatttgggtttgggtcaaggtctgagtctgtgttagggtacggggtctgggtttgggtcatggtccgagtctgagatccgagtccgggtcgagtttgggtctaggtccaggtcgggtttaggctaggtccatgtcaagtcgggttcgggtccaagttcaggtccgggttttgggttttagggtcggagtttgggtccgaggtctgggtctaggttcagatcgggttcgggtctgggttcgggttcgggttcgagtttcgagttcttgggttggggttcgacgttcgggatttggggtccgggttccatggtccgagtccagggttcgggtatgtgagtaaaaatataaaatataatatgttagacaaaaaaaattatttttgaaaattaaaaactacattttgatgtttt

SEQ ID NO: 319434 - DNA, 694 bp, Cannabis indica
ttttttttttttgtgatttatacctcctctttagtataatttttttgcatttatgccttttttattataatgttttgtatttatatatgccctttcttttatgtaaaaccttacacttacacattttcatatttttttttatatattgaccccactacaaaaaataagaatctttagtgacaattttttagttacaatataaattttttttgactaaatctaaatgtgacttttagccacaacaaaaaattactcgtgactaaaacatagtaattaaatacaagttaatttagttttactcgcaataagtattgtgactaaaaatacattgagtcacaataaattataatttttgtgattaatacttttagccacgaaccttttagtcacaacataataatgatttattattactcacaatttttttatttttaattacaaattttgttgttactaaagtaaattttttttgtagtaacactaaaaataaattttttgggcgtgaggtttagaggtcaaggtatacattagcaaaaagaaagaattaagttaattaattaacaaccaactaggtagtttttaataattgggtaattatgagtgacaatatatatctttatatattaaaagtgtctatctaacggcatttcttggtttaacagaatatacttaaaaataaaagaatattctgtta

SEQ ID NO: 319435 - DNA, 744 bp, Cannabis indica
taaattttttcatttttacattaacaaatcagtgttttttttaaaaaaaataaataaataaataaactttgtttgaatgtttgattataaaaattattttatttattatatcttttggaatttttaagagaagggagaaattgatttaaaaaaaaaaggggagaaacataaaggactttaatgccttttgatattatatcattttcaaacaagatcatctaggagcgtacatgcgaacctattcaattgtttctctcaatttttcaaattttataagcttctcattaattagctttaattttattaaaaaaataataagtaacagaccaataaatatgctaataataaattcattaactaatgactttttattgctcttcaatattttaatttcattaagttacttttgtcatgatgctcttttatatttattttttgttgctttagtttttagtgaagttacaaactattaatatacaatttaatgagttaaacctgaaaatgttattcaagtgatgtataataaatatgtagtctttcaagtttacaaaagaattttttaagttaaatttcaaattgtataatttatgtgtttaatagtgattaataaactattttaatgtgtattaagtatattaaaatgattgagtttacaaatgtaatatttaaaatatgttgagagagaaatatctgtaataaaagaagttttttgacatttttcattgattatgtgatcatgatact

SEQ ID NO: 319436 - DNA, 841 bp, Cannabis indica
aaaatagtttttaaaaatttgtgttaaacaccattaaatttttaaaatgacaaaaaactgttttctattctcatttttaaaaatacaattttaaaaactgaaaactaaaaacacacacaaacaacaaacaagttctttaattcctagagttatcactaattcacgagcctttgttgtaattttaattattcttctcttatgattaactagtggcatatagagatctaatctagcaatattgagctaaagttaacgtatcactatacattttttattttatctaaaatataaccttgttatttaatattaaaactgattttaatacttttttttttattaatattcttttaaaataatatatttaatttattatgaataaatagtggcataaataattaaatttttgaattataaaaagaataaatcaattaatttttttttagcgacataagtatctcgtatttgtaaaattataattttcgtcagtatacacgtgtaatataagggtcaacttcttaatcactaagtctggaaagaaaaatgtatcaattacttttaatacaaaaattatagtatattaacatttggtatgccacttaaaaaatagaataaatatgattttttttctttaaattatgatccttatagaattttgccttatgaatttttctctgatacgaaaatttttcttaaattatgtaaatcgttacaaatatccccctctagttattttttgctcatcttttaaaataattctcttatgttgctataagttgcaagaataattataataagggatattggcggctaaaccccccaaacttttgggtttgtgacagtt

SEQ ID NO: 319437 - DNA, 985 bp, Cannabis indica
gagtcaactcagttttttttttttttttggttatacactttaatatttatgcatgatcctaaatgtttttttttttttgataaatatgcatagttgcatattgtaaactatgtttaaaaaaattatcatcaaatcattcgtcatcataaatatttttttcattatttttatagcattttgataatattcaaccattaattttgattatttttatttttattatgttatatgagagtttaatattttgtcaaaaaaaaacacgagaaaagaaaatttttcttaaaattgttcattaatggattaatgatgtctttttatttttaaattttttcttcataaaaaaataatatcatcattcattatgttaaaagtatttttttatttttataccttccaccattattatattacactcataataattcatataatcaccgagacaaatctatataaaatgaaacttaaagtaataacattaattatatattacattatttatgctcaaaatatttatatatgtaatatatatattgaaatataatatccattgtacatacaaacaaacataatatataatatatttagcatggaataatatataactcacgatgaagttaatatttttagaaaatcaaataaggaaagtatagcaaatggtttcaaatcataggattatgttagttaatgtctttatttcaaaacttgtagagaaatggcctttgtagatattttattagggaaatttacatcctttactaacttttccatttttctttcaaatatactgtgacacggcaaagttaacttttttactgttttatttttttgtttatgtcggtagtatactgccttggttcaatttgtatatataaaaagtttacaagaattgattgatgactctcatgtcactttcattccatgtcagattttttaattttttaatttaaatttaaaattgattgatgactctcatgtcactttcatt

SEQ ID NO: 319438 - DNA, 951 bp, Cannabis indica
atttctctcattgattattctgattccaattaaataaaactttaatgcctcatttttcaattttctagattttgaggtggtgtttggttacaaaataaaaataaaataggaatgagaatggtaataggaataggaatagaatggaatggaatttctattcttttgtttggtaaagcctattgaatcaataattgaataagaattgtgatgattggtatggaatggcttttcaagtcattttatttaggaaaagtaattccttagtttacatgaattacaattcctatggaatgagtttccaatgacaataaacaaactaaacacttgaatgatctttctttaagaataacaattatattcctatactcattcatgtaaaccaaacacgaaaaattatataacttgaatcggcggaccatataaaggtaagggagacattttttttagtaaaaggaaaactttgttaataaatattgtctaaaattaaagatggtaaactagtaggaacaattctctcattataaacacaattaacaatatgaacagagtcacttgctaatggtttaataaaagaaagagacattattcaattaagacaataaaagacaacaatctctaataataaaaggaaaaatatatgtgttttagttaattacaatatattttttgtaattaaacgtatttataggtaaaacttaatagtaagtctcacttgttttactttaataaatattataaaaatccgctaaccaattatagaacgacacttcatcatagtactagacattgtgtgcctcatagaacgacacttcattattatatatatttaatattttaaaaatatatattagaaagtaatttaatttaatttacataatacttttcccaacagttataaacagtcatttaaagtgattttttccaacggtttgtaaactgtcatttaaagtg

SEQ ID NO: 319439 - DNA, 1037 bp, Cannabis indica
tcttgaagtatcattgcctcactcaaaagtactgatagagtatgttttattatatatgtaatcactagactatagaactgtcctaatccatcccttttgtactgcattttggtaaaccttcttgtagcaatccattcaataaatctttttggtgtaagagagcatcaaaggcaaaatgctcatgaaaatttaccttcaacgaatcatcatattcatcaatagggtttttgctaccactatgagactcaagagtgttttagtaatgtttgtttgtacttttttaatcgcacttatttttcctttgtcaatgttttggcaaaacgtgcttgctattctaagagtgatctccttaactgtaaggggagggatgacaccccgcgtgttccattttctcaattgtttaatatacgttgaacgaaagttcttttcaaaaaaatatagggtttttaaatcaccaatactttcactcccttcttattagaaagagactgacctaagatcaacaacttgctatatgtctaagagtgccattgcaaaaccttgttcacatcctacactcttgaaaatggatgtgagtataatttcctcttaaatcttttggtttgagtctagtttccaactcttatgaggacacataaaggaatcatccacccaatttcaaagaaaattcaacaacgtaccgtcatctcgagaggttccaacataatgaacctttgacgatgaataacttttttcaacgaattttttttttcctatatatctttgggtaaatgctattttagaccttacattttacaaaaattattaattattagaaccactgttttattaaataacaattcagaccctatatttttcaatgatataaaataaaaccattagtttaatttttgtcaaaatagaacgtaataataattttattttggagtgttattataactagattggttaagctagtttttggttggttatattaaaacaattgacaaaaattgagctgattgaattattttgtacaattttaaaaaatataagat

SEQ ID NO: 319440 - DNA, 1474 bp, Cannabis indica
ataaagatatgaatgaatacatttacctataagatcatcagtacacttatcaatgtgtcttaaatttgtttcgagatcagaaccaggagcaacttccttataagaaaaatctatgagaccgctaatgccagccaacggagctcgaatatcatggctagctctagcaaaagctagattttgatcttcattcttcttttgagctagtttagttgcctccatttgttttataagagttgctctcaaatagttctctactatggcatctctaaagtttttcaaaagaaagtagaaaatgaggaatatggttagaaccattattgatatgaggagaatgagttgtcccttaatgtgcttatgaataaacttgattaatccactttgtgggagtgctaatacataaacctgatcaaatttaagaaagagacatcaaagttagattattagtacatttatcccaaaatgaatcaaaatagaacataagattataatttcattcattaccaataaagtactatcaaaatattaatactgtacttacagattgaactccaatcaaatcaagtgaagaacaataaaagttgtaacttgctccttgaatgttgataacagtagctcttgttgttgatgaagtaccaatataaggatgacaagtaacatttccaatatgagtatttggtttaaccaattcaaaagaaaccaaaacattactattaccagtattgtcatcatgatcatccataacaacattaaacttcaactgagtccctttaatctcatcattaacaatcatttgaccatctttggtagtcaaatacaaactcccaccaacaagattaacctcatcatagtactcatcaaccaattccttcaccaaaaaacccaaaatgataacccctttattaacattattaatagtggctgatttaaggagcaagagatcatgaccattgtcccatttagtacccaaataagcataagagccattcatgctcttgaaggctaattctctaaaccaagttgcattagtggtgatatttgggttgaatttgactacatctccaagtagctttccagtgctatgatccacactttgtctgtaccaagtattattattattagtcttggatgatgaagaagaagaattggagtgcaatgcaaatgtttgattgttgagttggtccttgccataggagaaaatgagttgaccttccaatcctacgtatgagatttgactcaagtgtggggtcatcactagtgtttgaaacaaaattggagccacctgaaaatatatatatacacatatatatataaacacaaaaatcttacatagcaaaataaaatggaactattgtaatcaaggttggctctgagttaatttgagttttagaaaaaacaatttttggggcttttataaaataaatagtattttaaaattataaaaaatatatgtatatttaataaataaaaattaatt

SEQ ID NO: 319441 - DNA, 633 bp, Cannabis indica
ttactcacataaattatatctctacaaaaataaagatttatatatttcaaagacctttaaatcttaagtggaaaaataatacaatttgtatattaaggaagtgagatcaaagatagatggataatattacattaaaattcgtgaggatggataaacctatcttttatttacaaaattcataaaagtatgggttcattgcccactacatatgcctagtacactcatataatggtgcatgactggtttagaactggacccaaataccataaataagcatttcaacctaaatgctataatgtctaagggttacaagctttattatccatctcacaaaactataattgtggaattaataattgacttgatcagtgtgagtgatttatctaggaacttatattgaaaaatgatcatttatatttttaaactttcaccttaagtagtagattaattatgattcacaataacttaagtttaatggttattgagaatccataactaatcattaataatctacaattcattaataaaattataataagtcatgttatttagtaattacttacaatttataaacaacatgcatgttgaaccattttctcttaatgagtttgttggttgatcattaagatgact

SEQ ID NO: 319442 - DNA, 1136 bp, Cannabis indica
atgtcttggtgaaatctgtatcaggacttatgagcacaaggctcgtgggagacccaacattgagattgttgttgaagtttgttatttcccttatcttaaacttgcttatgtggcattccgctttgaaaatgcaaaattggagagtgataaatgatgtcacctctcggctagaaatactctcaatgggagagaagtgttttgggatggcatttcacgatgattatgccacatgggttgtgccatagctctcccaacatcccattataattcacacttaataaaaccaattaattcttgagtaaattatgaacatgagacacacttagattcatcttgaaaaggtctttccaatgaaagtttaaccaagtcatttggataaaaaatgagagagttatacttattttaccgaagggaagtatgtactttttagctcaaaatctgacatgttccatgtcatcatgatctgtatcaccttattatggtgcaggtcgaccgtgcatgttctcggacaccttggggtgtattttgacttatttttttgatggtgaatcatattttggaggtcttaggaacccaaaacctcattttgacgtctaaaaccctaataagggacttgtgccatcttttggtaccaaaagatgccagtggtcggctagggcatgtgggaagctgttggtggtgtttcttgcttatttcattcatatggatgctagaaaaatacattggacacattagttcttggccaattagtaggagagagcactgccatcttttgggacacaaagatggtagtggtcggccatgggagttacacatcctttggtgacttttctcacttgtatttggtactttatgttggaaatacactttggccacattagttcttggccaattggtaggagagagggtggtcaaccatgggggttatacaacctttggtgacttttctcacttgtatttggtaccttgatgttggaggaacacattttgacaaatctcctttggtgttttgagagaatagacatgtgccatttctgtgcccaaagatggaacaggtcagccatgcacttgcaatcttgaatttaagttcaagtttagtcattttagacctaaataagtcaagtccttgttggttt

SEQ ID NO: 319443 - DNA, 1141 bp, Cannabis indica
cgttttgtaacctaaatatttctctagtacatgcatcataatttttagaataaaaatagaataagtaattactaattatacaagtaaaatatacataataattattatattttaataatagatatataggttaattaccgtgaaaaagaaggcaagtaaaagaaaattataaggcattaatataaagtgattagttgtagtttacaaatatattacgtaatataatcgtaattaattaaataaatatatagtagtttaattattataagaaagaaccaaaaagtgattagttaagatacataaagtcgtagtcggtgatgctttttcactttagcaagatttgatttcaatttaattagccgtacaattatctatctatatatataatatgtatatatatatattatatatgtcgtcatcaaaatgacgaaattccatgtgtttatttatatacataaatatgttgagattaaaatgaaaaacgatgatacttaattaatcttattcaaatataaaattaattagtataaacactcatataaaaaataatattattatatataagaggaagaagaagtaccaagtacaaagacaaagacttaattaagcaaagaccatgaccaaaataattttaaaaaagattaataaaaaataatagaaaaggtcagtccattgaatttaaactagtatatataaagttgtgcacgcatggtataatacatgaacgaggtttattatttttaattatatcattgtataattttcgtattttaataataatatgtccatgtccaattaattaactttaaaaattaagaaccacaccaacttgcttaattattttatgtaatgaataatatttaaataaattaagatgtaaaaatcatttcattaaaatgacgtacttgagcaatatgtatatacgtgtcttaaacgatattatatatatgttattcaaggattagagaatgaaatattgaattattattattttttctaaattaatatatattatatagaacaattaattaataagataagtctttctttatttttatttatatatactcgtggaaggatttttgatttattgatttctacaattaatctcgctaaaattaataagagaatgttttcttac

SEQ ID NO: 319444 - DNA, 831 bp, Cannabis indica
ccttctctctctctatatatatatctatatatatatatactactcttcatatcttatatctatatatattacatatataattggaactcttgtgtgaaaaggtattcatttcaagaatatcaaacatggaaaccgtgtgatttacgaaataactgaatcatgaatactttctatctcatatatataattctactatgaaataatgaaataatgtgatgtgtctatataattgaccatataattaataaaagaagagcaacgacatagacttaatcaaagattattgtatggatttaccagttatgttataacaagttgtgttggagaccaaaacaagtccataatcaattaatgatgtcttttttattctattcttctttgtgttaaaaaagtcaagtaaaatgaccaccgagtatttagcttactcgtagggttttttgctctaaaacaaacggtggaggtttgagtaggaacagggccctgcgctaggattcgaaccatagaactaactctgagtaggagtaaggttaacatttatatatctaatatatctttacatgttattaatggtgtttgtctctcaacgtaatgtattattcatgtccctatttatcgttaaagttacacacattattttctctataggtgctcgtgtgttattgagattatatataattaagctcatcagcatgtgtggagtatactctataattcgcttgtaagatttgatgagccttgctatgggaactagtacccagcattaattttttataggtggtgttttatgattggttgtctaaaagctattttttaagttatatgagatctgat

SEQ ID NO: 319445 - DNA, 786 bp, Cannabis indica
tttttacttcgattcataacagaagcaaatagtagtgcaccaacgctaattacttttttgctttgattataaactgaagcaaataaataataaaaaattgaataaaattatcagatctgagatttacaaaataatatacattagacccattatcctgttatagtttcagaacatgataaaatttgagattttcttctttttcctgaggatggttcatcaggttgataaaatcttttctttgtggagatgatgcctggtgagatagattcattatttgcttgtcaaaatatagtatacacatatcagacaagctgtaaactttcgtagtgtgccaagttccaagaacttggtatgtagaaaagaacaagaaatcttcaatgtcaatgaaattggatagaactatatcaaaagataaatttggactgtaaaggaaatcaaaacttacaagctacataaacaactaaattaagtaccacgatgttcaccaaaatgatcacaaagacaagttcgtctcctccccaaattataatgccagaagaacactccccaaattgagggatgtcgcatgagagagaaagaaattacctgccattggagctcaggggagtcgccgtggagctatcgttggggtcaggactgcatgcgacaacaccatgcgagggggtcctaatgatgtgataatctcttgccattagggtcgttgttggggctgcctttggggtcatcgtacctgtgtgtgaaagagtagagtcatggtacgactagtgtagagagagagagagagag

SEQ ID NO: 319446 - DNA, 731 bp, Cannabis indica
aaaatcaatattctacaccatacaatgacatgaacccatcaaccccaaaccccagcctaaacccaaacccagactcgaacctaaacctgaacctagacatggatctagattcagaccctggacctagacccggacccagatcctaaactcagacccaaactcaaacttgaacccagaccccaaaacacgaacccagacccagacctcaaaccccaaacctagaccctaacctcagatttgggacctagtcctagacccaacaccgacccaagatttgaactcgaactcagacctaacctcggatccagacccagacccatgctcggacccggacccagacctgaactgaccctagacccaaactcggaccccgaacgtgaccccgatcggatccagacctagacctggaccccaaatcgtacctaaacactggaccccagaccctaaaccccaagcttaatcccagactcgagctaggtcctaagctgtggtccgagtccagttttggggctcgggtcagggtccgatccgagtttggggtcggtgtctgaggtcggggtcggggtctgggttagggttcggatctgagtctaggtctgagttagaggtccaggtccaggtccatgttctgggatctgggtttgggtttgggtcagggtccgtgttctaggtttggggctaggtctaggtccgagtttgggttcagggtttggggtttggcgtttgagttc

SEQ ID NO: 319447 - DNA, 1039 bp, Cannabis indica
ttaaacaggtaaatttatattatataatgaaaatcgtgatatgaaccagctctaacaagcgaaaataacttcagattcaacaataagtacatatgcatatacacacgacattgtccattttggatgaaccaatgttcacaaaccaaaaaaaaacagttgtacgctcacttttccttagattttacactgtccaaaagaatgtaaacaaaattatataagctttaatggaaactgttcttagcaggcaaacagttgaaaaacaaaagaaacaaacaaaatctctaaaatttaaatatatgtatataaaaaaaacgaataaatacccacagttgtcagaaatttttcgtagtaaatgttatatagaacagtaggcaaaattgtccggagaaatttctctttttctccgcaccgaaaaataaaatatatactttcttcgttgttaaatgaaagatgacaaaataaaatccgaaaattaatctaaaaataaaaaaaaataataaagttttaaaacagagaaaattttcatgattttatctgtttttatctcgcactttctcgagaatcaaaaaccggacaacaacaacaaaaaatgaaaataaaaaagaaataacaaaaagaaaggaagagacgatcacccaaatgtagtcatcaacatcgtcaattccgtgaagaacaagtgctgagggcggacgttcaacgccgccagacatgggagaattgtggaaaggccacggtctctgtgtatggaaaaacctgtagaaagaaggaattgcagcttgtttcacaagtaagtaggaagaagaggaaacggaatgagaatgaggagtgagagaaggagcgttgaagagaagaagaggtttttgaagcttcaaagctccttctcctctacactactacttctttttcgactcactcacgctcgaacgaacgaacgcacgcacggaccaaatttcgctacgtgtttcactctcgaaactctcccccttctcacgccttttatgccgttcctctttttttattcttttgggattttttcctt

SEQ ID NO: 319448 - DNA, 711 bp, Cannabis indica
aaaaaaaaaagaagaataaataatgatacaaaaggaattttgctttttgtacacgtataacaattttcgaattttttaaataaatgcaaaaagaaataatttatgaaattataaatatgttatttggctttaaaaaaatttatatcttatatatagatacaaatatatttaattcaaataaacattttttggcacttgttttaaatttaaataaacgcgttattattttattttatttttaagaataaacacattatctttttttttttaaaggtctataaaagcaattgaagagtaggagttttattcagaaatcactataacatcagagaaactagaaagtagaaaaggagtactttaacaatggaaattgctaagaaaatggatgaaggagtgaaatcaaggtcttgtaatatggattctaattccatattattcaatagtgaagatcatgaaaataatttttgtacaacatacattaatagtttcaagattcgtgatgagaaatattatgcttctagacaagtttttcttacaagttataaatttacaaagaaggaagaaaaaatgggagcaaaaacaaaaaaatggttgaagaataaacttaagatgcttctcaagggcccaacaaaagttgcttccaccgatcaatcactataatttaggtggcgtttggttggaggtaatgaaatggaatggaatggaaaggaa

SEQ ID NO: 319449 - DNA, 489 bp, Cannabis indica
cattttttttgcggtgcgggcggtttgagcggtttgagcggtttgatgtacacccctaggtttataaggtgaataatggtatgtttgagatgtatctcttattctcttatgataaatggtatgactcaaggtagttttaaaggggagaaaggattcaaacaagaagaccctatatctctcctgctatttgtactcattatagaatatcttactaaaagactccaattggaagctcgagaaaggacttttagatatcatccaatgtgtaaaaggttgcaacttacgagtttgctctttatgatttcacctccgcttctggtttgataacaaacaatgctaaattccagatatttttggggagttaaacatcaaaaaaaggaagctatcacttagattattcagtttgaaaatggtcaattttcccttaaatacttagggttcctattgttggaatttattttactaagatcttagatctactcacaagta

SEQ ID NO: 319450 - DNA, 1102 bp, Cannabis indica
aataataataattgtgtgtgcatgtcttttatatatatatatttatatagtcattcattcaccctggacgaaaccaaattattaacttcgttttaaacatatggtctatgtaaaattattcgatttattacaaacaccaattaatatcagacccaaaaagtggaaaagaagatgatgaacagggaatttctgaattcaaacactaagctagaacagtggtattaactaactcactcaactaaacttagggaagctttatttatatggaatagcagagtacaaaagcaaagaaatgccaaataacagaaaaactaactttcaacagtaataacggaaacccgttatgtaccatctatcctaattaacattatgttattaagggtttgtttggtatttcgtattacactgtattgtattgtatagtattatattgaattatatttcatgtaatattttatgtagatcgatctcaatgtgctttgaacgagcgtggaagactgggttggctgctagtgcagtagcactttgattgtcaacccaaatgattggggcagtgaggcattgaaacctgtagctcagataagagagatttgagccattgtatttctgtagtagcattggcgagggccctaaacttcctctccgtgctggaccgagcaacaacatgttgcttttttgcaaaccaactcgatcactagattatctcctaagaagattaagtagccgcctgttgatcgtcaatcgtcgatgcaacctgcccaatcggcacctgagtaggctgttagagatggaaatgaacttggttgaatgtgtagaccaagtgaaattgttcctttaagataacgaagtactcgtttgcaagcttcccaatgtgttgaagtaggggcatgtaaaaattgactaagcttgtttattatgactgcggcatctagtcttgtgagagacaaatattgaagagcaccaagtgtaatcctatataatgtgatgtcctccagtggctcaccaatattcaaagccaactttgctacagcacttgtgggattgggacttgctttagctccctccatatgtaatttgacaagcaagtcagttatatactttg

SEQ ID NO: 319451 - DNA, 1426 bp, Cannabis indica
caactagtatggggaccataggtctatataaccgagcttccaataagtcgaactaaatttaccaagtaaattccttaacttattaattccttgttgaatctacacttagaacttggaattgcactctagtcatatagaacgctctatatgttccatgatatagacacgtcattagttatccattgttgtaatcctaatttgatcaatgaccctctaatacatgatctacatggaaaaggcactaagttaccattaagaaagaaaaatgcatgcaaatcatcaaaagagtggatatatgactgtaacagcttattttattgatgattcttggaacttgcacagtcatattttgagttttaagtatgttccatgttctcacgatgcttcagcactacttgaggcactaagatcttatcttaatgaatagaaagtagaagacaagattagttcagtgactctcgataactatactgcaaatgatgctatgattaagcttttgaaaggacaatttgagccttacagttttattttgaagagaaagttcttacatgtgttgttgtgtacatatttaaatataattgtgaaggatgacttaagtgtcattagtgatagtgttgacaaaatttgagatagtgttgcttattggccggacacactaaaaggacatgaaaaatttgaagacactgcttgttaatttagagtaccatacatcaaaaaaaaaaatatatatatatatatatatgactggcgggacaatatcttgtcgggtcggattgggccaaatcggactcctttgccattcctacctatttgcgactacggtatatatgtcggttttataaatcgacgtaaattctttaaataacacttaaaaactgacgggaattatactttttgtagtagtatttatttatttattgttgtaataaagaaataaacaataattgaggtgtgaagtggaagaaggtgccggagttgctgaccttgttagagtggaatcaatgttgttggtcagagtgatgatatgtactgtcctatgtcctaagtaccatctgccgaccttgttgactttaataacttcaagctttaactcttctcgcattaaattgaaaagtcaagtgaaatctctttcatttttgctcttttagattgggcctattgggtttagtatatggaaagcccaaattatctgctatcatcaaaaggtttgtacaagtgggctttgaatgaatctgatcgagagaggcaaaaaatgatagaattgaatttggttttagaaagtagaaattacatcgatgggaaattaaataatgttgatggagtatgggatttttgttttgttacattattatgaagttttttatgctataattttataaataacttattaaatactataggtgtcgtttggtaatacttttgtttt

SEQ ID NO: 319452 - DNA, 1948 bp, Cannabis indica
gatgttaatgaaacatacttgttagtaaatctagatcctagtaaaatatatctaacacaaagcgtgcgaagaaaaccgtgtttcgaggcattaattaagtcagagcattaattagccaaaaaccgaagggacgcctagtcagcttcacatcgaatcacgaacagatgcacccagcacgtgtcacccattcaaaagtaaaggccgctcggatgaagtctccacgcaacttcagaagtactcacgtgcaaacttagggggaaaatgttatcccaattttcgcactctgatgtggcatcacacgctggtgacatgtggaatcaactccccatatttgcctggagaagatattccgaacagaacaccacatatatctacacggacgaagagtagtggacaatccgaacagcatgccaacacttagcaacttcagcacttgcatcgtgaagcataaaagcaatccctaaaaatctgggatcgtatcacagagatatggcaagctatctaaatcccagaatcagtgtagtatgtaatgtgtaatcttaccaattatagacattgtaaacaaaagggagaccttccctcaagcttgtagccctataaatagtgatctactctcactgggcaaagggtcgaaaaaaattatctaagagagtatactcagagatatcattgtaagagctttaagagaagaatctatgtattctttgttcttaagtcaatacaaaccaaggggactaggctattactgaactgctcggggccgaacctctttaaaactttgtgttctttatttatcttttcatattatatctatattatcgcttacaattaagactcattgtcgttggctaaaagcgaggtcaacactctgaatgtacacttttttaggttaagtatcattctgtacttctggataactacgaaggcctcctcgagatcatcactatgttccacaaaattccttgatttcacgagcatgtcatccacatatacctccatatttctcccaagtttctccttgttaaccaaccgttgataagtggctccgacattcttcaacccaaacggcatcatgttaaaacagtaaaccccttatccgtttgaaaaatggtgtgctcctattccaaaatatgcatcttcatttgattgtagccagagtaagcatccatgaagcttaacaatttgtatccagaagtggcatccaccatttggtctatccgcagtaggggaagacagtcttttggcaagccttgtttatgtttgtgaagtctatgcactttccatgtgccatttttcttggggaccaaaaccaaattttccaaccataccaagtacaatgactcccagaggaagtcattggaagttaacttatcaacttctgctttcacagcttctgcccttatcggatccaagggtcttcttttctgtcagacgggtgttgcatcttcattaatattcaagtcatggaaaatagtgtttgggtttattcccataatgtatgaatggctccatgctagcacatcctaatttttcttgactgtagtcataattttctctcaccaccaaatgtaaattcctctccaccttaatgtttttttagtggggtctgcctcacaaattcttacttcttccacatcctcttgaggttcaatcattctttctatcccaactatggatctagttcatcctgaaactcctcccaaatagcttcatcctccacctgaacgtctattctagtagaaaaaattatttcttcccagactgtgaacatggaccaaatagaaacattataaactgaatgaaaacactataacaacttcttgcacttatttggtcacccttaacccctctgatgctttttgtcatcacacgggcttcatgcacaaatgcctaggggtgggcatccgatccaatccaaccttttttttctcatccgatccaatccaat

SEQ ID NO: 319453 - DNA, 906 bp, Cannabis indica
gtattttagtaattaaaatcacataaaaggtataaatgttgtctttaccttatggaggtatttttgtaaataaaatgtcaatttatattttctatgtaataattcctttaaaaaatttatatttaaattgaaatatttaattttaactaaatatctaataattgattgagagaatatctcaaccacctggaaagaatctctcaactattttgaagaaatgtctcaaattcaaatttaaataaatgtttatcttttaaattagttaattaatccaaaaacaaatctagtggggcccactatttgtcatagtatcacggaacatagtgccaccatgtaatgttattataagatggtatcttgtcttgacaatatctttgtttcctcactttttttaaattaatttaatataaattatttattaccaaaataaataattactatattactaactcaaaatagatttttctcaacatcattttttgtgtaatccatacccttgacagtgttgtatgttgacctcacttttagccaacgacactgagtttttaaagcaattgaattgagtgatcaattactaataaaataataatagtttagcaaataaaaacacaaggaatttgtagagaataagtaagatcacaaggtttgaccaggtgagtttcttaatattcttgagaaatcttacaagtaatttagcagtgttatctgtattcctagatgcctgatacatggcaatcatagaaaggtgccactctagatgatcagtgattaatatattcttgtcgctagaagatgctaaagattattatgtttcagaagccaatcaaaggtccccaacattagcgagtacggatagggatccaagacttttactatccatccataattgggaaggatcagagttac

SEQ ID NO: 319454 - DNA, 586 bp, Cannabis indica
aaaataatttgaaataggttaatttttgatcgcttgataagagcttagcttttctgatttttcctctatttacagaaagcatttcaattcaattctttttaaaaataaaataatcaacacaagtaagcattttctcaaatagataaaacaataggaaaaatttatagtacccttgaaaaaagtattatttaggaaggttttatagtttattttttttttaataattatgtacattgtacatatttaaaatttcttgtaaattgttagagaattttcaataatttactaattcgaaaataaaatttaaaaaattacttactgtatgtacatgaaaagatagttacacacataataaaatacttgaatcatatttttaataggaaaatttgaattaatatgcttacattatcttaaaactgttttcctaacttatacttaacaaaattagttatatatgacacttttattgttttccctataataccctccccaattatatcaaccctctcttcccatcatcttcacacccgaaccattccaccaccaccaattttttttcttctcttcactcatttatacactacaa

SEQ ID NO: 319455 - DNA, 851 bp, Cannabis indica
cttgagtggaaaaattgtgatttgtaaggaagattatgatgcagcctggtatattgatatgttgaattttcttttgaatctcaattgctcttggaatactattagcctacatgttgaagaatgcgaggtacttgtattatgttttaattttatttgattttgtggccttatttcaatgctgtatattaatctatttactgtttgtgaagtaatatgtttatatgtttgcaatgcatgaaggctctcatttggcccgaaaagttcacgagggtatgtcgttctccattgctcaattggaagcatctcaaagttattactaaatgtaataatcctgaaataatatcagatttgaaggactcgctgatgtggatttcaccatccttagaaacattgtctattaacaaaatgcagatattttagttgctttaaaatatttaagaatgactatcttttattagttttagattagaaaatggtaccgtagtcctttatgagattatgtttattttattagtagctttggatgatgaacttgactatttactttgcaaaagaatgagatatttctttcttatattttactgtgaactagttgatattgtcctacttattgatgatattgttatatgagcacctgaagaaatagtcttggaatattctaaggctgcagtataaacacattattacataattgcaacaacttgatacacaaatataaagaagagaacaatggccatggcttttgttcttttttacctgttatatttatgtgtatgaatgaactttggataagaagatcataggctctttattgatatgtttgtctatgatgagtttcatatcaatttggg

SEQ ID NO: 319456 - DNA, 724 bp, Cannabis indica
aaataacaagaatacaacatataaatatatatatatataaaaaaaagaccatattttatatgtaaatcaaatttaaaaaattgtaaaagtattaaaaactctgtatttttatagtatttttttttattattattatgtgtttttatcattatcccataatttttttcaaaatacatgattcaaataatatttacctattttttaaaaattataattattacattgtaaaaaggaatggtaaagagaattaatctcctctatacaagagagttacctaaccacataaaaaaatattatacactttttacacataataatatatatttaatttttataatagataatgattttataggagactacattgtgtaaataaaattaattacacattattgggtaaaaaatatacataattgaaaaaaaaaaattgtgaaccagagtcaccataattccttgattttggacacgaatgattaataataatacataaattcaagcaaactaattactgagatatattctttaaaattttatgatccctaaaaatattaagaaaactgtaccattacatccataattttataagagaaatgctaaagagtaccagtggtgtatagtacccttctatgtgtcaatatcgttattggtctaactaagtatcgaaccccatatatttattataataatttttaaagagtatcgttaattaatcacaacgcgacat

SEQ ID NO: 319457 - DNA, 648 bp, Cannabis indica
aagagagagagaaatatcaattttagattttagttttttttttaaaaaagggtaaaatgggaagttcatgtgattaatggactaaatttgtacaaattaaggaagggtataaattttgatatggcttgtattattaaggccaaaaattgaaatttcccgtttttttatatggtgattggtgccttgttattttgtatggtaatattgttctgttatgttagtgttcattaattatagtcgttaaaattttattttttggaggtgacaaaaatttaatgagttcgaacaagatctctttttgagtattggagttggagataagttttttttttatcttatctattacattttctttttttttcattggtataatatgtttttactagtttttttttccttggttttgtaggtaggttcacatattagtagaaattgaacttatgtagatttagtggttgtactggattagtctcttccattgggctacctatttaatatttgagcaatttgcgccgaaaattttttatgttttaatttttatacacttaacccccttatctttttttagtggcaaaacccccttatgttttaacttttatacacttaacccccttatcttttttttgtggcaaaacccccttatatttt

SEQ ID NO: 319458 - DNA, 2211 bp, Cannabis indica
ggcaaagaggttttgctcaaatcggtcatccaagtaattcctacttatataatagcttgcttatgtatctcggtagctacttgtcattcattggagtccatcatgactaatttttggtggggtttcaatgctaacaatagacccaaggtccatggcaaagttgacaaaaactttataagtcaagaaaggatggcggattaggttttcgatcactgttcattttaattttaaccaagcaatgcttgctaagcaagcttggcgaattcttaagcatctaaattctcttgtggctatagtctttgcagccatataccaccctcaaacccctttcaccaactgctcccttggcctctctccctcttttgtttgacataacattcactgaagaaaagaattgctgcataaaggtctcatcacaaaaataggtaatggacagaacacatcccaactcatgattgttggattccctctttcaaccaagtccccccaaaccatcctatccctagccttgttgcttcttttataaaggacaacatgacttgggatatcaatcgtctcaactaaagagttatcctccccatattgttcaagatattctttcgattcctctccctctcttacctattgatgacaaccttatctggagattcacgaaattgggaacttactcggtcaaaactggataccacttaagctattcgaccaattcccctcctgacatcccttcgtcctcatccccctctccttactggaaatcacattggcatctcaatctctcctctaaactaaaacactttgtgtatcgagcctccacatccaccctaccaaccaacaagaaccttgcctataggaaaattacctagtcccccttgtgtgtccattgtggtagagatgttgaatcggtttcacatgccctattcttttgcaagaaagttagaagagtttggaaaggtgcaattttctatctttatctttttcaaatattgtttcttttcataaaattgtttttaatatctttactaacatgaaaaaagaagaggtgaaattttttctttgtataacttggtttgtttggcataacaagaacaagaagattaagaaacagacaatggatcaaactcatgctatcctcaacctcgctgaaagttacttggctgaatataaagcaacaactgttgttcacaatgcaccacttccagaagccaagcctgctgccacaatcagctggacacctcctccacaaggcctcctcaagctcaatacagatgcgacttcctcgaagaaccaccttaaagccggtcttagtggaattattcgcaatagtgatggagaagtagtcgctaccatagcttttcctcatataggaggcatgaatgctgcaattcttgaagcaaaatctattcttaaatctcttcactggtgcataaaagaaagcttccctcttcatcaggtagaaaccggatgtaaagctatcacagatgctctcgctgccaccaaagaggacctctctctcttcggagatctcatcaggctaattaagttggttttatctcacttccccaatgtcttgatcactcgtgttaagcgctctgctaacacatttgttcacaagctagcaaaatttactttgaggttagatgaagcttcaatttggattggagatgacccttgtaatcttgctcctcttctcttcccttaagggcatccctcccactacaaaaaaaaacacacacacacacacaaagtgtgttaggtgacattttatattatttttttcttttacttttattaagttttggaggctttcacattttgtgaacaaataatgtgtacaagtttgatataatatgatgtttattttgaaaagaatttcacatagtttatgcattattttgggtgctatatttgtatatataaataaaatatctatttctttacttttatttatcacaaaattagtatgtggttgaatgattttttatgattaattcaatcttgcttaattacttatattttttattttattgttttatgaacattttaattttataaaaaaaaaagtataaaatattacgaattacgaaatgcatataaagtatttgttatttatactaaataattaattaaataaataaatattatgacaaatcatagaattaaattttttaatttttttaaaaatttaaaatttaaaatatatattacatattt

SEQ ID NO: 319459 - DNA, 1217 bp, Cannabis indica
atatcactttaaattttctttacatcatacctttacttaaataacccttatattccaactagtaaaatatgtctagtgcataacttgtttactttgcaaactttgacatgtaccaaatcattctttttaaacttttctcggtcgtgaaaaattcctctgaactattaagactgttgaatttaaggacttttgtccaattttagtaagaaaaggctaacatgaatgaaagttctgggggtatgatttgacacatgttaaaatttaaggagcttgatttggtagatattaaagtcagaggagtataatttagtacataaacaatcattaaactagtaaaattgattataatttgaaaaaaaatcattaaatttaataatctcaatagttcaagaaaaatttatagcgctcaaaaaaattcaaataacgtgatttgatacatgtcaaaatttagataacaaaattttaattaggcaaacaaaaataaataataagggggcgggccttgttcctgttaatatgcgatgtgacaccacacacacgcacgctttccctggatttcatcccaaatttatactgtaaccatataatatttgatctcatacaatttttttgatgtctttatatgtatatatattaaatgtgtagtcccattcgaaaaaagatgaaaagcactatagtgcaacacacttgcgtgctatacctaatttataatcttttaatatttaaccaataatgaattttcttaggagaaatattgttttaaatataattaaattatacgcctataattttttttgtgttttcgatctttaaataatttcagttttaaactttttgtgtgaaaactaattatacaatttgtaagattatagatttcttcactcattaatagttcattttgtagctcttgatgttctaatgaggctaattattatttgttattttttttttgttaaaaaaaaccattcattttgtgattgaacattcttgccatacacctaaccaccactcgctataaagttctatgtttttggttttagaaaaaaattattctcagtgtttttatatatcatgtagttataagagggaaatttgattttctatacctacatatacctaatattttatttctaaactaatacatatcaccatggaaaatatatgaccactttatccaaaacccaaaaatacccctctcaaatttctcatactttttt

SEQ ID NO: 319460 - DNA, 1056 bp, Cannabis indica
aactccatctctttctctctctaacctgacctctctctctttctctgttgcttcggtgcagtgctggaggaacctgcgctagccattaacggtagcgaggaaccagcaatccacccaagccctaaagttaaaccccaatcctctctttcatccctcttcttctctctcctaatagcgcacacaaactagaagctacccattgttggcgttgatggtccatgtgggcctcaaattttagttcctatcgccccttagtttttcttctagctcgtctctctcctcacaagcttcctctctcgctcttctcatgtatctcttgacccaaatcaaataagccacgagtcgtggcttccttcgccatgagccactgctcaaccacatttgggggagatttgagttgcatgagcaatatctgcttgaacattagaccccctattatttctttggttgttgagtaggttgttgagcaaggattcctttgaaaaggtgacctatttctcgattgaaagaacccttgttgaatttgaggttggccagctggctacacttgaatttacagattccatcaatagaaggaaagtcaccaagtccaagaattccaatggcttgggcttgctccattcgcagattattaacatctacttgacaagtatcataggagtgaggctccccacacagttcacataccacctgggcttgcttgacttggactgtcacactactacaaaaatgggtttttctaacgtttttaaatagtcgtttaaagtattctcgtcagtttttataaccgtcgcctatatgatcgtcgtaaaacaggcataataggcgtcgattcaaaaccatcgctaatgtgggtatcctgacggtttgaaactgtcgcctataactgggtataggcgacggtctataaccgtgccttatactataggcgacggtgtcggaaatgtaaaaaaaatacagatttttcagccattaatggcaaaaaaatctttattttcctccattttttcctccattagctttataattttacctaaattaaaataaaacaactaa

SEQ ID NO: 319461 - DNA, 3423 bp, Cannabis indica
ttttattgggttttacgacttaattcgcagcctaatcatgcagtccacgtgtggaattatacaagatatcttgcaggccttctcttggtcagctagacacctgttgggagtaggctagtcggccatggtgttgtccaaaggcttgccgaccatagggctggccaccttgcttttgtgaggaagctggtttgtcacttgatctttttgaatgttgaggtccctgtttgttgatgtactaacttggccttcttgttggtgagtcatactgccaagtggtgctgattttgtccatgtaagcactggcacatcaggtgggaaaaaatcgatgtaatatttgcctattaagtccctctatggatgtctgtatggataaggacttaccaattagattgtcgcagtcaagactactgtagcctttgctgaataaaaggttttccatttttagtcatttgaaatactttgccttgactgtttaatcttattttttgtagtaaactaactactttaattatctctttgttgtgtaggtgaagtaagtgaagaaagggtcccacatgtactatataagtgcattttagggggaaaacccttttcactttttacatttcgcttctatcactagaaattgtcatttgaagaagctcctccttctctatagagagacaaacccatcaagagtcatttcctagaattttcgcaccgtttcgacgatccaagcattccacattcttccttagcagtttcttgtagtgggtaagctttttattcctgctatttcacttgatttggttgatttttccatgaatgcataaaaaaaattttgctttgaacatccattgattcctacattagattcttgcctttttagtattttgatctgcatgatagccttaggatatgtaatgtgtgatttctagatgaaaaagatatgaatctaaccttcattgtgattcttgcctctttgagtcacaaagaacacaaagaatgtgtctgagttcttaaacagacacatgtttggatccatacaagtcttggccggccaagggaggctactagggggtctggctggctaaggggatgtcacccgcaggctagccaacctatgcttggaaaagatattcctggccgaccctagactgggtcatggggtctgaccggccactaaggcttggaaccctggacgaccatggctccaagggggcagccagattcttaacctatgttgaccttgcctagggtctcgtgacaacattagaggtatatacaattgtagtattttgtgtagctccccttgcaaactctgtataaggctcggtagtgagaccattatagtcaattgtataacttaggacttaatatatgtcttagttagtgtacttaaaatggtacttggttcataattgaccctgtacattgtgattaacctggaaggtacccttgggtactgttgactagaatgcgtttgtagctttgtcaggttgctcacctccctttatctcttcaatgcaggtggttttgggtgctagataggggaggtgacactcgtctaggtcccttggttattctgttgtcatggccaaaacaaaacagacttgtcgtagagcgccttcatgtaccgccatgtagctagtgtggctacaagaggctgggtcagaattatagaagaggctattcaccctcatgttgatattgatctagaggttaattaggggggctaatagtcccgacgttgactctaatcttgaggaggctgcgtcggttaggagaatgagataaaaaacctgtattgtcctttccaactctctcttaggtcattacgatgctaatggtaacctgctgaataggcttggtgagccttcagtgcttggcttggatcaatcttttgagcctgagatgttggatgcaaaatcacagggagacagttgggtctctcctgcttctaccctctcttatgatgcttttagcaagatactttctagtggcttagtgagggtgtccattgaaagataccttgtagagattactggggtcaccgacttccccttggttggttggcttggttatagtgtcatattgagcaggggcagtgttgccacttcatccatacttctaagacattgatgcttacttcaggatgtgtccgacacaattcacccagaaaagtatcaagtacctttcgacgatgttctttttatatagggagataggctagactcagcctactcctatgatatcggatattactttgacctgtagtgtgctttgaagtagaatagaactaggtacttccactctagctaagtcaaccactagtggttgggtgacaccaatagcacagccatgtcaaaagttggttggtacgccaagaagtacttcattgcttatggcattcgtaggattggacactacgagttttagtgggtgatgctcttcaaatgctctatccccacattgtgaatgagggatagggcaaaccatatcctatctctctcggtggagaaaagaaacatactcaggttgactagtttggcgaacttccagaggtatggtttatacccttctacttctacagttacgggaggcccagctgcggagggggcttgtcctggagatggacaagttcctgacttggatgacgacgtgcctttgtctcgcatagcacaaaatctaaagaggaaagagagggccctttactgacgcttggccagtgggggtccaattgttgatgcttctctctgaataaggcctagaggtcagacttttggggcacctgctcgccccttacctacatctagagggaagggcaaggcttttgtagaggatttcgacagttcctcttttgaggacgatggtatttgatagttgataacatcatctcttacattcttatcttgcattgaatgtttatgacttgctttcttactttgctacatttctttttgtagatatgtctttcaagttgagaggtcttactagggggccttctgatgagcgtacaggtcgactgatggccaaggtggcgcaaacctcttctggcgtaaatgttgttgggtcatctttgcctcctcctctactagggcctgcaccagttgggtagcctgtgatatagactacgtgccaggtggttgggaatattttacttggatttagatttactaacaagtatgttgattaacatcctaaatatgaatatctctagaacaatgaaattaaacacataagggattagaaaaccttacattggttgcatcagaatataatgactccttccgctaagatctctaaaccttttttcctttctgtgcagagtattatcaagatttgatcctagatctctttctctccttcgggtttgattaccatagtcttactcactattgagtacttgacttgctatgattgggaatggcactctttcactca

SEQ ID NO: 319462 - DNA, 549 bp, Cannabis indica
aaaattgttttgaagtgtaaaatcaaaaaggccctaaaaaatttatttcatttaataattaatatgtgtcaatcaaggtttattataactttattttattatttttaaattttgtaaaaattttaatgtgatttgctatgtcacttttgtgacagtttttttttttttaattaaaattgattattaataattgagaaatcttctcatacattctttattgtattttcatctcatttcatattttatctcatttgttcatttttttatggctttttttcttttattttttattgtaattgaaacctctctctcttgtttatcttcttttttgtgagtttttttgtgtttcaaaatccataggtaattatcttttttgtttttttttaccctcttttttcttaaggtggtatttggttgggaggaatgaaattataggaataggaatgagaatagaaattggaataggaatggactggaataaaattgaaaatacataaaaaaaattgataaaaaaaattattaaatttttttcaaatcttgcattggaat

SEQ ID NO: 319463 - DNA, 547 bp, Cannabis indica
tgtcttttctaaatggaaactaagattggggttaagtatatgagtaagatttgcaagtccttacagtttgagaatgggcgtttcatcccttctgttggccgtgcaggggggattttgtttattatggaacaaagatgttgatattgtgattgaaaagtcttttgattttggttttgtgtgttcggtttttgatgttgcggtggcgaaatcctggaatctcattgccatttatggcactccttatgatgaacacaaattgtactttctgggataatatggaagacattgctaattcttgtaatggtccgtgggcgcttatgggtgacttaaatgtcttgttgactagagaggataaatctaggaggcagggcctttttgccccgtgatggtgctaccctccaaaagtttttgcttgctacctgggggtgttgatctggggttcagaggttgtagatttacttggctcaacaaacgtgcttctggccatttggttaaagagtaggttagaccgtgttattgtggataccacttggctggcgagttgtcc

SEQ ID NO: 319464 - DNA, 860 bp, Cannabis indica
tataggcacactttatatagaatatatatatatatatatatgtaaattcattatataggaatttcaattatgagataactaaaattttgatagtagtataaataaataaatataaatttaatatatatatatacatcggtaattatttatttgatatttattattcttagagaataaaatgactgatatcaatggcaaattattacacgatcataatattattaaatagaaatttttcctgctcttctctctctttcggtgctttaccggagctatggcaaaaagggcaaaaatagccggaaaagtgaaatcaaagggaaggaaatcaggaccatcatcttcgaagaggatcatcaagaccagatctatggatgcggttcttagagttcaagaattggagataccagatgacaaagaaccaatggagcagtaccaggagccgtactgctcacctgaagaaactaaatcgatttctgaaagacaaagtgaattacaatagcagttttctgcttggcttgatgttgctaattagggttgtacaaaaatttttgtaaaccgtccaaaccgaataacccgtccaaaccaaaccgacaaaatcgataaaaaaaacaaaccaaaaaaacccgacaaaattataaaccgctcaatctgttaattgggcaggttgaaaataggtccaacccacccaattaaaccaagcaacccgatcagatccaaattaatgtttttaaaattatatttttattatatgtaatataattatatatggacatataataaaaaaacttaaaaataaattaaaaaaacccctaaaatcctaaatcgaaccccagacccttccctcttcgtatcgcattgta

SEQ ID NO: 319465 - DNA, 761 bp, Cannabis indica
ttgtccatcttgataagaaaatacgctaagtgttgggaaggttcccatctcgttgtattctcttcgtgatatttgtaatatgaggtgatcttctcgctatatgaaatgcgaggtatcttatgttaatatactcactccgctcagatggatgcatgatcctttcttgtctatatatttcgaggcatggatatgtctcgttaacctcagatcaatagtaactgtactcatctcgctattgactacaaagttaatacgttttgaatattttttatctaacctttagttaataaacgagttatttaatatgcatttaatgatactattgtatcattttagaattgttccgtattctttctattggacacgtgtcaacttctgaagtgtagccgaattttaggtataacacatatgtacatatatatttttggtatgaaagcataaaatttaattattcatctaaactaaataaaaataataattaatttgattgggtgttggatgtattatatttttggacactaaatccaacatccgatctgatttaattggatattcaaaaataacatccaatctgatccgatcacaattggatatttaatatttggcagtagattgtgattgaatcagtcggttataattagatttgatcgatttatgcacaaccctactcgtgactaagccaaacaagtggttctagaaggtaatcacatttagttgaaaagttttgctcattaaataattttaaatttctccaatgcaca

SEQ ID NO: 319466 - DNA, 862 bp, Cannabis indica
ttttgtaactagtcgctaggcgacaattattttgtatgaacagtaaacttttgtaaatgattttataatcgggatcccaagtcttttgtataaatgttttacaagtttaattaaaaagcaaaaattttaattaatcacgttttccataaacctcgttgattagcaacgagctgcacagcatgtttaaaaataacgtaatacgtctatgttagttagggtgttacaatcaacaaatattaaattccagaaggataattataagcttcaactcaagatcatctactttgtggagaagacaacagagtaaaatgcacatggtttcaataaagaaaatttcaaaggaggaagaaaaagaaggtttagatgcaactaactatttgggcacaacatgaatgataggcaacacaaagggcaatagttcaaactggacaacttagagatcatggatacaaattcgtaaaggatgatacaataaacaactatagagattatatcacaaaatcaagacttgaggaagagaggaaattaatattcgaggttgacattcctagattttgaacacccaaaaaaaaaagtgatatttagcccttatagtgctcgagaaagaatgacaatggttctatcagaagttaaaattattgagagcaaatcatttcgacaaatattaaaagtttagctgacttagagagctagtaacgtagattcctagaaggactctccgaagctagaatccaatatctcggaaacacataaatttcgtccaattagaagtggaaaagttagaggaaaaaaaagagaacactactacaaaattgggctttagaggcggtttttaagggctttcagcgtcggtattggcgaa

SEQ ID NO: 319467 - DNA, 995 bp, Cannabis indica
gctccacagtgttacttagtctgttaattacatatggagttaaatattatagttaccacaactcatttatatggctaaaaatatatataagttttacaagatagttactaaatcatgcttgtattaggccccaaccaattgttggcacttcttatatgaaaaaaatgatctttttcatttttacacttcaaaaaaattcacacaacaacccacatacagtaaatagagtaacttaaatcgtaaccaaaatccacatagcaatctacatagaaatcaccagagcaaccactggagcaacccaaaccgtaaatttaaaaaataaaaataaaaaatggtatatggaataattctaaaaaaaaaaaattgtttgaaaatcatcaacgtgaatctcatgaattaaagcaaacatacaaatatagattaataagaaaaaattaaacaaatacctcttacatatttcaatctattaagatacattatctaagtgtattaattatattattttctttttcttatttatgtcactttctcttacaaatcagggctggtcctaaaatgttaattattgaggtcatatctaagaatgtgtatgtggtttttcttaaaaaaaagtaattattttaaaggaaaatattttttttggggtccggctgagtgagtcttaggcgcaggcttgacctgtcttagcctaagatcgggtataatttttaatcaaacaaatttttgtataaattggctatctatattaaattgaaattttagttgtaatttttttaaaactatattcattaataatttttaactgtttatcaaacacttttatatagtacaactttagtcatacgagaaagttttcatagagtgtggcaaacaaacctttagggccagtttggcacagctgtgctctggaaaaaagcagcttagctgtgttgtgagaaaaaacagctgtagcaaatctgtgaaaaaaagctgagttgagtgttcggtaaattata

SEQ ID NO: 319468 - DNA, 2420 bp, Cannabis indica
gggcataaaacccaaaatcaagatctgaacttagattctcctttagttaacagtttgaactacacaatctttctcattatgttgagtattgctttgaaatgtgtgggtaatttctcaacactaaggaccacgaatttttgtgaagaaacactaagagaattttgaaataatgaatagaaaataatagattttctttttgattcactttgtcagacaagagagagtctaaaatgtcatctttgaaccaaaagttattatgttctatttatagggattcattaggttcagggttagaactaaatggactgatttgaaagatccaataacttaaaataaactcctatggctgtaccccttataaaggcccatgagttagatttcttccattattttgctcccataatgaagtaaacttgtctttcttcaataatgtcgtattttcgctctacttatttaaatactaattctatctattttataattaaaattaattatcaaataaaattgccatttaaatatatttattaattagaccttccaaggtctctgaattatgaataaaccttcaattctactttcttctcaattatgcccttcctttgtaaaattcacaaataagacatagtctttatttagaatctattgacctcaaatttggctaaccaatagcagagttgaataaaatgctatttcttaccacgtgttacacaattaaaataaaaaagtaagtagacacaagattttatggaggttcgacccccttagttagtgggtaacgacctactccccttttagttgaattgatactagagataataccacttagatcactatagtgataggatatgaagtggctctcttaagattataatgtgataaccagagttggcaaatctcaagtgagaatagagtaataagcatgtgagagagagagatgagatgagttatcaaacatagagcttgatgcttaggatttgagactttgggttttagggcttgattaatgatctttatataggagagcttacatccgtaatatccctaaaaaatatgtaaataagactattatttacataataaattaataaaatacaaatgactaaatttcccctcaaaaatagggaagttactgatatttcccctctatttttgtgggttgttaaggcccaatttgtggtttgacttgttgtccacggatgaaagttgcacaccaaaacttaccaagccaatggttggccgaccatgcagctgtagagtgcatgttggtcggccatatgatgtccaaaagatggccgacctatgctagccatagggtcggtcaggggtggccagccagccccctttaggtggctagtttgtcatttcgtcgtccttcctaagtactcggacccctcttttaataagctatactcccacgtggcattaatgttggccacatggacatcccatgtcaggttagaaaaattggaataacattttccttgcaagtcctcgtgtagacgtttatgcgaatagggactttctagcttagttgggtctgttgtagccttaactgggaaaatattgcagtataatgagcctttgaagtattttcccttgactgtctaatcatattccttaacaatgagttaactgcatttctcttctgcatgttttttagttacatgctgcatggcaagtgaaaaggggtcccacagaacctatataagcttatgggagggaaatcacttttcactttccacatttcaatctctctctataaaaagtaactcttgatagatcttccatctctctagaggctgacgctcattgtgatccatctcttgggaattttacaccattttcacgattcaagcttcccatcttcttcaacaacaacttctagtagtggttaagctttataatctcgttattcactaatttatttgattttgccatggttgtttgtagcttttctttactttgaatatttttggattttgatttgcatgagagttttaggacatataagtgtgatttcttgacaaaaaaatttaattttgaccttcgttgtgattcttaactctctgagtcacgaagaacacaaaaaacatgtttgagctcttgaaaaacacacactttgatctataacaaaccctagctggccattgaggtcttattcaatacctggctggccatgggttcttcttttgggagttggtcaaaaatagaggtaccctaaagtttgggcggccaatgcctaggcttagggtccctatcttatccttcactgggtcatggtgttggattttgtgccctaaataaaactctattttaatgtaatctttaaaattcctttatcaataaagaaatagatttatttcattacttgtttaatgttttatttggttcacatgattatttcatgatcatttgtttaa

SEQ ID NO: 319469 - DNA, 927 bp, Cannabis indica
tgattgagtacatgcccacacatatcaagttggtcctcaatcatagtatgtaaaactgtgaagaatccaatcaacaagaaggagaatcgggctcagatcttggtgatactctgctacagaaatgatacaagggttagacttctgagcaggaggagtcatttgatttcgctgcacccactgtaaggtttcttaaactttatatgtgtttatttcattgttctagaaattcatattaggatgttaaacaacatacatggtagtaaatctagatcctggtaaaataattccaacagttcaatgggaatatctttacatggtcaaataaacaacatggggaggatcgaatttattctaagatttacatgattttagctaaccaggtctggctgaatgcttatgagaatgctgaagctacatttcttaatgaggggttattcgaccattctcctgggatccttactttgtatcctcatttgaatggtggaatcaaaccctttaaatactttagaatatggaaatctcattctaagtataaaagtagtttagaagagatatggaatcaacctattgggggttcgaagatgtttcaagtggtctcaaggttgaaattgttcaaaaaaggggtactgaacgacataaataaggaaggatacatggacttgcaggctactacagctaaggctaaagctaaattggataacattcagaccagattgcagcaaagtcccttgaattatgagctgcataatgaagaaaaggaggctcgggaaagctatgtaaaagtacagcatgattatgtatctttcctgaaagaaaaagcaaaaaatggcatggatacatgatggagataacaacacaacattgtttcatgctagcataaagcaaagattgagacaaaataggatcttctccattgagcagcaaaat

SEQ ID NO: 319470 - DNA, 903 bp, Cannabis indica
ttattattttaaaaaagagacattaactatctataaagttaaaaatagaaccatttacttacatttctccgtgaaaagtcacatattttataaacaacttctgttagtttttaacagaatttttaaaaataatttatttagtcacaacaaattctgtcaaagtcacaagaatttctatttcatagacatttatataataggtaagattagatttaacttttgctgaaatattttctacaaaagcttcaaatatatgctactgttagtaataatgtaccatgcaaatgggattcttgcgaacatgaccaaaaccaatgctcctagtgaagaattcatagaaataccaaagggcaccagtacctagtaccttgtgattgtaattaaatatcgagttgaacacattttaatttagtaactatctatatatatctataaaggagaagtataagacggtgacgtgatagtctaaaaactctagaaaataatatttctatttttctctttttttttctaatttttttattaaaattaaatattttaaataaataaaaatctataataataaatatatgcagttacatcaattgtataaatatatttagatttttttaatttttttttcaaaatatctaattcttaatttttttttgacgtaggtatttatcatttttttaatataaattattctatcctgtttctttgtattctattttttgtattcatatacacatatgaagcataacatacgtaggtatttatcatttttttaatataaattttctatacatatatatttttataaaaatctatatatatatctataaaggagaattataaaatggtgacgtagtagtctaaaaactctacaaaatactatttattttttcttttttttttcttatt

SEQ ID NO: 319471 - DNA, 1048 bp, Cannabis indica
gtttttactgttattttacgatttattttttttttttatttattttactgttatttttaattgttttgttttgttattttacgttgttttaggttattttatagaaaaaaagtatttttgtaaaaaattccgtatgtaaaattgtaaatttttgttcaaaaactaatatttttataaaaacccctaaaataattggtgttgatcattgcttgtctcgctcaaaatgaaagaactcaaacataattcattatgagacgtgtcttttcaataattcaatgaaatatgatcttattttattatatgtttatatataagaataattgaatgagatatttttataaaattaatagaggtgtgtcaagtgcacacaaaaaatatctaatattggggcatggatcctaatattttttttttcctatattttttatgatggtagtcatagcacaatttttgtaatttaaaaagaaattgaaaaaatttcagtaccaaaataagtataaacagttattttttaacaagtatgaaaaaataaaaaatagatatacatttaataatttgaaggtaaatcatttaaggtttcttaaaactttacatgtgaaaacgcttataaaaaattaagagggtttttacgtaaaatattaaaataaattaatttgttacatttttactgtaacctagttatttttgcatttataccgcttaaagctacttttttatgtgcaatttctcaaattataatcgcacttaaaactataaaaatacaatatagtttaggaggtttatattattattattaaacattataataaaaaaattaaaatttatttaataaaatttcaacaatataaaaaaaatgtattgaacttttaacgtcagtaatcaaatcattgtactaaattatttctaaaaaattatataattatgggtaaatactattttggaccttctattttacaaaagttaccaattggaccctgtgttttgttaaaatgacaaaatggaccctgtatttttttaaaatagtacaaataggaccctgaattgattt

SEQ ID NO: 319472 - DNA, 1207 bp, Cannabis indica
acaagttcaacccagtcaccaaaccaaactcggtttggttgaatctgcatctcttctttgcaaaataaaaagtggacttcttcttccttctcaaattttatcttttgcatcaccaactgatgtaacaatgcacccaaaaactttaatggctgtctctcaaagaattgtttgaaaggagattccttcaccctatcccataatttgaattcctcaaattttactttaagtatcggatagtaaaaactacagctacgctaagtgacatgacctgtgtaatgctatgacactagaagtataagtcgtggaggtcttaaactctaaaaaataaacataagaaaatacaagttagaaattctgcagagaagcatcggacaaacatcggaaggatatcggaccagcatttacctcaaacaaaaaaatgttaaaagataaaaatgaaacaacaatcagaccaactatcaagccaaccatcgtcctatatcggacctagatacattctatcaaaaaataaaaattataaatagaatcaaacccattatcgacccttacatcgtcctctattagacctactagtattctatataaaaaaatatgcaataacaattggacccataatcgggccaaccatcgtccgttgtcggatctagacacattgtataaaaaaaattaaaatcacaaaaagtatcagacccactgtcgacccttacatcgtcctctatcggacctaagcatctattggttagcatagggcctgaatcgaaagtacattgtcctctatcgaacctatattcaacctctaacttttttcaaaagcacatgcatcgagcctacatcggacctacattggatatgcatcaggtataagctaaaaactagatttgtcgcagtaacgcaaattagatccaaaacaaatcgtaaatctaattaaactcacacatatcacagatcaggcattaaaaaacaaaaatctaccctaaatcaatgaacaattaaacccaaaaataaaaataatgcatatatagttaaaaaaaatgattcaaaataggataaaaacttaccttagacatctttggtggctgtccgtggatgagacaattgagatccacgagattgggttgtgatagtggtcgtggctgtagttttgggttaagacggtgggagagagagagagagagagagagagagagagagagagagagagagagag

SEQ ID NO: 319473 - DNA, 1092 bp, Cannabis indica
tgtctcgcacgttagtttttgctagtaaaaaaaaaatgtctatgtaaagatattctttgtgactctacctaagcattttcaattactatatacgtcgtacttctttttgagcaaattaattttgctcttttatttattaaaggtgattcaaattcttttcctataatgaacttttaaggaaaatggtatatagatttttttttttttccaatactttagaaaataatatagataaaaaatgcagcacatactttttatgtgccttattccactactatataaatatatatttatatattggtatattaatttgttaggttattattctcaccccacaaatatgaatgaatatcattttatattttaggagaattctcccattgcatagtactcttaattaagaaaacaaaatcactgtacattttcttatgtttcgatgtgattgtacccctagccaacaatctaaattcgctttcaattactattaaatctcatatttttataaaaaattaattccaaaaaaaagtgatatataagtattagtgtaattaaatacttaaaatttttgaatttttaattagcataaaacaaacgattttttataatagataaagtagtcaaaattattaaaagtgtacacctttatggcagttattataccatttttatggcttatttggtgatttttatggcagttatttattttttcagttgtggtgcctggctgggtgtagggctcgcaaaacgggtcagacacgatgagacgactcgaaacccgcacgagagttaacgtgtttgggtttaccttaaatgggttcgggtcgtgttcgggttgactcgtctaacccgtttaataaacgggtcgtgttcgggttgacacgtctaacacaaaatgttgggttttgtgccataaataaaacccatttctatataatcagatttactagttaataaagatcagaaatcattttatgttgcatggttcacatgatttatttcatgattgcttaatgtataaattctattaggtccagaacatatgtaattgtttatgattatagtgttgtcagcacagtggaatataatcatgat

SEQ ID NO: 319474 - DNA, 1422 bp, Cannabis indica
tcaatatgtggtgtaaaaatctcgttataatttgggtgtttgaaaagtcatatgaaaattgaaattagatgtaattggaagtaattacacagtttaatgtattttttttggacacataattacacaataattgtgtaattaaaattaatttgaaggcttcaattactctctctaattctcataccttataaaaattgggtgtaattacataccaaaaataatttaattatttaatataatttagtccttcatttttatttttatttttcatatacataattttattttttgtcctgtgcatgatgctattttataatacttttcattgtgattttcttgtattgttgtaaataaaacaataaactaattaatatacaaatatagggtatatgattttttttatcatggtttttctcttttgaattagatatctaatagatttaagagaattttttttttatttttatactttaaagtagttttttttatatatattttttttacagaaattctcatatcaaccctcatagcaactaactgaacaatctaaatcgcaactaaaatacacatagcaacccacataaaaattaccagcaaccaccaaagtatctcaaaccgtaaatttttttaaaaaaaagttaaaaaataatatatagaataattctcttaaatttattcattatttaacataaatttttattgatgacttaaatttattttattattaatttttaatcaacaaaagaatgataaacactcaaacttgattggaaaactatacaccaaataaaatattttaagatatataaaaagtaaaaattattttaaatatttattagaatgataataattattatattaatacaatattaatttatcatgtaattatcaactatcttatcaaacttaatataccctgaaaaaaatctcttatgtggcgtgtcaaaagtttttgattattattgctactataattgtttttttttatatatatattattaattaatttagaaatgtcaattattcgtctgatcagcatatgaatatatgcttgaaagatatatagaggaaaatagaagcttttatatgtatcagtttggttgggtagtttggccccccgacaagaaagatcactaccttgattatatcacacatttcgctataaaattttaaatcaaatttataatatgttttatggtgtatttgttaagaacactctaaattttaatttagccctaattaatttatgaaaattaaataataaaatatagattagcagaagcgtactggtatccataaaattaatttttaaatggtttgatcttccgatttgcatcaaaaacttgctctaaaagtttttccttggtaatagggatacaagagtgaaaagatacgatataaatggggaccattaccgtttat

SEQ ID NO: 319475 - DNA, 731 bp, Cannabis indica
atgcttgtggtccatctggtcttttggaagcagttggccttctggtccatctaccacacatattcaggatgaacccggtccagtgaaggaaacctcccttttctggtaattgtggataaatgttcctccgcagtaggcccatcttcagggatggttcccaaaatctccacaagctgaggtgttgctattgagacttcggtttggtcttgtcctacttgtcctacaaaaggtattccggcgatctgaacggagtccctaggggcgaacatgactttgtccgcaagagggtcttggttcaaatctatgggaggaagggtaaactttttcaagaaaaaaggtaaacgaaggaaaaggcgggatcttctttcctatgcacacagtcttgccgtaccacccaagttcggccctgaccctaacctagaccaaaatctttcttgctctaaaaagaaaatgccaagaaactcagacagggggttagagtacttacttggcaaaacagaaggaatagtcggggattccaaaaagtaatgcctaaaaagattaagagcaatgatagagaatggtttcttacattatagatctcattcaatcttggctttagattgatatgtacttgtacatagatttcggccctaattgggtgcgcataggtgttgggttttgtgccctaaataaaacccatttcaatataatctactagttaataaagatcagaaataacatttaatgtt

SEQ ID NO: 319476 - DNA, 990 bp, Cannabis indica
aattgtattcttggatagagtttcacttgtagtataggaaatccagtgtaagattgctagatgaaaaaaaaaacttaatgaagtgtgtgtgtcttttttcctttcttcggttagacgatgagctatattggttcgaggagttgtctccgccgattgtgaattgctgttttgtttaatcatgtgtgattttaatcaccgcgtcaaaaaaaaaaaaaatacttaatgatatataaaaaaaaaaaaatatgttgtgtactgtgacacgaaaacttatggaccaaatagaatattatattgaaaaaaaaacttaaaaaaataatggtagctagcttctccagagtgctaaattcaatgtatatcagatgcctagtcatgactggtcaccattaaactaatcagattactaaagccaagagactagagagcctagagactaatactacttaaaatataaattattattattggttaaatagtatttaaaaattcaatctcaatagcttctcctttcaatctttcaaaatatatctcaccaaaactttgttaataaatacttaatgtatcctatggaataagttattccatattgcctgttgcactttatcaaacattacaggtaccactcgaatcagaaccacaacatcttgaatatattgagactgaattgaatgaatagccacctaaacctcaatcccatgatattgtggtaatttggatatgcaaagtacttgcaacataagaaacttcaagggctaagaggttgagacttaggaggatgagaaatgctcaatcacaaacataaccccaaacacaagtactttgtaacgtcctattggtttgtgcgctacagtattttcttaattactgtgcactcctttactaattaaagaatttaaaaacgtgattaattataattttcataataaaaataaacttaaactttaataattaaacataatttacatagttttgggatcccgttaaaagttt

SEQ ID NO: 319477 - DNA, 2596 bp, Cannabis indica
tattttgtaaaaaaaaaagttttggtcctatatttaaatattttagaaacagggagtccccgtaaatattaacagttaccttttataaaagttgtgtttttattttgattataaatttttaattagtcacacattttatatatttatataatttgtaaaacaagtatttgtaaaagcacacaggtgacgttcctttgggatagggcgttacaacatggtatcagagtgaccaaggtttaaagatcctaaagacttgtttgaaatgtacactggttacaaagactcgtttgacttatagttcagtaagttttaattgttagcttatttgtaaattatcttatcatttggaatatgttgattgtggcatagtaaaggttgttgtgaaagtaaatatatggaaatacttattagtattgtcatttcttggtaatatgactgcatatgtatagattatgcacccgaggcagtccggtaggggtaactgcaagctttctaggctcggggttggcggtgagggcgagaatcctccaccaccaccacactaggaggaattatatgatgcaatacaagagactatccaacaacaaggcaagaaaattcaagagtcgagggagcagcgggttcagcctgctccaaaccttaatcctgatccttcggcacctttggtagtgccactggacgtgggaaatcgtctagagttgttttgtgagtgattcaggaagtagaacccaccaatgtttgagaggtggagctgatccactcaaggaagaacaacggatgaatatgataacaataatttttaatttcatgtgggtctagaataatgatcgggttagatgtgccatttacatgttgcgtgaagatgttcgcatctggtgggaaattgtatcacagggtcatgacttgaatagcatgacctgagaagttttccgggcactattctacgagaaatattataatgagtctattcgagcagcaaaagcgtaagagtttatacgactgactcaacgcagtatgacagtgacaaagtatgccactgagttcgatcgactagaaaactttggttccaatgaagtggctactaaggctgctagaaaggctaaatttatttgggggttgaatgaatacatttcatgagacgtggtggtcgttgctaaacaacctgggtttgtacggacttctgcacagatagtggagttggcccttgttgctgagggtggcaaagaccagatacataagagaaatagtgtaagaagagatttgcggaaaaagtctagtgttgattctgataggggaaatgacctaggtgactataagaaaagacccgattcatcagctacataaccgaataagaggtttcagagtaatcaaggtttccaccgtggtggaaacgagaattggtagacctatcccaaatttccaaggtgcaagaggcacaatcagggcaagtttcaagctagggtctgcttccagtgtggggtagtaggccatttaaaaaggaattgccctcaactgttgcgatcagaacagaagtgtaaagaccgcttagcttaaatttggaaattagcagattattagggtttacttatgaaaattagttattaattctaaattattaatatatgatgatttatttgaattcagaatgcattttatatgtcatatatagaaattttatatttttgcatgttcagtgttcggtaacaaaggaacgcggtgtatggcttagttgaatcacatcttagtattttattatagtggggcaatatagttagacattgggaatgtcgagattagtcaggaatttggaatttcccaaaatacccttagtacccttttatgttgtattagtgtgagaggggcaaaatggtcatttttccccatgtgtattttgtccttcagtggacttagatacattcagtaacttgattcttttagtgtaatggctgatgctttttgatttattactattatctcattttcaagaaaagaaaagtaaggaaaattcattttctctcaagctctctctctctctctctctctctcgcaaatttcttggggctactagggttggatttttcccagtaattcaagtctttctcagctaattattagtaaatcaaatccaaggtatagctcttgcacctcctctttattttcttgaagtataaggaaagtgaatttttgcatgcttggtgattatgttgttgggctgctgttaatgttttgttttgttttctaaagcttaattatgtttagataaatggatttaagcaggttctagtggttgttggttggttttaatcaagtttggagtttgaactcaaactttggtctttaatggtgaaatttgattttgaggttttgtggttgttttgttgcttgggttttgttctttatggtctaaatagcaggcctggaaagtttgatttgaattggggttgatttggttgagatatgagagttttggtctttcatgctctgaactggaattccaattcagagcggcctgtaggaaccggaattccggttggctcccaagaattttcccaaaaccgaaattccggttggggaaccgctctaccggttggggcaa

SEQ ID NO: 319478 - DNA, 1628 bp, Cannabis indica
ctcaacaagtacaaaaagtcgaatccatcttagatgaattacttgctaatgaagagcaatattggcaacaacgtgcacgtgttgattggctgcaatcgggggataggaacaccaaatttttccacgcgaaagcctcggcaagacattcaaataaccggattaggtccttatcagatgaaaatggtactgtgttcaatttaacaaatgacattgttgttgtagtttttgcatattttgaaaacctttccaagcccaaaacgaagatcattgggcattgcaacatgtgcttcatgtcattcccaccacggtttctgaaaagcacaatatgttccttttgaaagagttctccgccgatggtgtttatgaagccttaaaatctatgaatggagatggtagtccgggtattgatgggatgtcagcattgttctatcaacacaattggcatattgtgggcaatttagttactcaatcagttttgcatgttctgaatgatgggggtagtcctgaagctcttaacaaatccttaattactctcatccccaagatcgaaaaactgaaaaccatgaaagaagtccgccctattagtttgtgtaatgtggtttacaaactaatttctaagtctttggtgatacgccttaagtcaattcttcctcatgtcatttcggagacacaaagtgctttcttaccaaactggctcatcacagataatatccttgttgcttttgagttagtacattgtttgaaacataaaacaagaggcaaaaaagggtttttagctcttaaactcgacatgagtaaggaatttgatagagtggaatggtctttcatggccgttgtgatggcaaagatgggtttcaatattcgttggatcaacctcatcatgaatttcttgcaaacaactcaactctcctttattattaacggttctgtctcgggtaatgtgaaacctcaaagaggccttcgacaaggagatctgttatctccttacttgtttttaatctattctgaaggcttgtctcgacttttacagtatgaggagtctattggctgcttaaaaggtctgcctgtatctcgtcactctccatcaattttcaacttattatttgcagatgatagcctactgttttgtgaggcaactgatcgatcttgtggtgccatcaaaagagctttggatacatatcataagtcttcaggtcaacaactgaatacagagaaatctatcatgtcttttactccaaatactaccgatgaagccaagctctctttccagaatattcttggaatgtctatatgtgattgtcatgagtcctacctcggcttaccttcttactccgaacttgataaaaagcagttgttcaacaacattaaggagcgcatttggaagttattacatacttggacagacaagtattttttcggttgggggtaaagaagtactcttgaaagctgttatacaatcaattcccacttatgcaatgagttgcttcaagcttctagtaaaaatctgtcatgaaattgaggctatgatgtctaacttctggtggggaacaacttcggatgagaagaaaatccattagaaacaatggaaatttctttgtaaatcaaagttggatggtggattaggattt

SEQ ID NO: 319479 - DNA, 1930 bp, Cannabis indica
aatgattggagaaaagttccaaaagaatttaaaaatccattatgggagtacatcaaggtaacgctaatagccaaaattaatttagcatatgaagttgaatatttaatgtcattctaactattattgataattcttgcagtcaatgttcaagttaggcccaaaagataagcattctaccttaaaaattgctggacaaagatggaaagactggaaatcgttcctaacaaagaacctaattttcaaatacaaagataaagttccaacaatgctcaatcgtcctctagatgcttatgccacatgttacacgcttgaagactggaaagcatttgctgccaaaagatgtagtcctggatgggcaaaaaagagaaagaaaatacaagatatcaagagcaaaaatacatacaaccaccatgcagggcgaggtggtgttaagaaagttgaagaaagttggagaaagagttgggccaccagctcactatatatgacagagcagacttgtggattagaatacacaagagcaaaaaaggcgagctcgatggccttgctcaagaggtctttaaccggattgtaagtttcatttatcatatatgttcttgtatcaaatctttaaacacttttatgttgttcaaattcttattaattctactttattaaatgtaggctgagatacaaaagcaggttgaggaggggacaatattagtagaaggctcaaaagacatactcactctagccttgggaacaaaagagcacgtaggacgtgttaaaggaatggggcgtggcgtcacacagacacaaattttcaaaatctcacgtcctaaaagaaagagagtcaatgacaatgattgtatgagtgaggtagagaagcgacttcaagagtcagaggaacggggtcgtaagcaagacgaattattaaagaaattcctccaaatagtcaaaagccaaagtggtgttgctggcacctcacatgcatctaattcaagtgttgggggagcatccaacgaaccaacttttgctgttgttacctcaattgtaggagaaacacctgctgcatgggcctctattccaccagctgccagggcctctactccactagctcccaaagcctttgctccactagttgttccaacaccaccacttgttgctctaccagccacagccaatgcagctgctccactagcaccatcttcggttacttctaataatgtattatttacttactttttaaaatgattttcattatgcatgcttaattttcatatgataattatttaatttctttttaaaattaattttgtttgtctcttgttttgtttgcaaatgaagagattgaggtatgatatgtacgtgattgatccaaagaaaaagatccaatcttagttgcatcaggttatgtgaaacttgaaaaggcagacaaagaaggcaatattaccgtacatggagtaaaaaagaagtttgttgattttaaacgtgtctttgttgagaaggtggttgaaaaaaatatcattctctcatgccctatagagcatgaaggcttcgatacagttggtttagctgtgaataattttgtagcttggccaaagaacctaatcggcatacatccagatgatttagaaaaggtatgtcactttatttaaacttattttattttactataaacatctagtatttttaattaatgttatgtttgatgtagatgaaagaaaagaagaaggtttcgagagatcattcagctccactaactcagccactgatacacccaacagtgttggctataagcctgtgaacccttgtctattgcacagggcccatttaaataagggtccaattccttgccttcttttcatattggttttttttatgaaataaaacagtatgaaaaaaaaaggaacaattattactttccactttttaagtgatgcataatctcgta

SEQ ID NO: 319480 - DNA, 590 bp, Cannabis indica
aaaaaaaacaatactacattgattttgaatatatagatcgaatataaaatggatgactcatttcatcattggcaaaagatgactcataacatagtatagagaattcatgtatgcagaaaaaatagagaatatctagcttttaactatatatattttaatagatagatctaaactcattttaaaaattgttctcaatgatttttattttagagttcaagtgcaatttaaaacattgatttttattttaattattatatgtattttattatcattttttaattcccttctatgtattatatagtatattaataaaatatttttaaattaactgcgcgaacagcggttatagtataaggaggtgacttggcggtctaaggtctctccaaagatattttccttttttctctttaactagttaacaacccgcgcttcgcggcggaagtttaaaaaaatttaacattactaattttcatataatttttatatgaataatatgagaaggtatgtgtacaaacgagtcagcttgacatgtaagtacaaaatttcttttttttttaatgaaagcccgacatggttcatataacactctt

SEQ ID NO: 319481 - DNA, 643 bp, Cannabis indica
aatcaacacacaaccaacaccagccaactgaggacacgggcggcgagaccctaccctttgcaggtctggccagccatggaagagtactaggcggccagaccatgcctaatgtagattttagtcatgaatgggttcttgattcaggatgatcatttcatatgtttccaatcaaagaactgttcaatgatcttgaagaaagaaaggtggggaaatatttcttggtgacaataaggcctgtcaaatccatgaaattggctcaattgtgatcaaaatgcatgatggagtgaagaggaagattcaaagtgtaaggtatgtaccagaccttaaaagaaacttattatctattggtgtattgactcaaataggttgtaaggttgaaattgatgataagtttctcaaggtttaaagaattctaaaatggttattaaaagagaatttagaaatggtctctataccatgattggtgaaattgttactgattgtgtcaatactgtttcatcaagccatgattatgactaaactaaaatgtggcacctaaggcttggtcatgtgagccaaaggggtccgttggagctggaaaacatggaattctttagggaaaacgtagtggtaagcttgatttttgtgaagaatgtgtgtatgg
